(19) United States
(12) Patent Application Publication
(10) Pub. No.: US 2005/0255478 A1
(43) Pub. Date: Nov. 17, 2005

(54) Staphylococcus epidermidis nucleic acids and proteins

(76) Inventor: William John Kimmerly, Encinitas, CA (US)

Correspondence Address: GLAXOSMITHKLINE;CORPORATE INTELLECTUAL PROPERTY, MAI B475, FIVE MOORE DR., PO BOX 13398, RESEARCH TRIANGLE PARK, NC, 27709-3398, US

(21) Appl. No.: 10/793,626

(22) Filed: Mar. 4, 2004

Related U.S. Application Data
(62) Division of application No. 09/710,279, filed on Nov. 9, 2000, now Pat. No. 6,703,492.
(60) Provisional application No. 60/164,258, filed on Nov. 9, 1999.

(51) Int. Cl. C12Q 1/68; C07H 21/04; C12N 1/21; C07K 14/31

(52) U.S. Cl. 435/6; 435/69.3; 435/252.3; 435/471; 530/350; 536/23.7

(57) ABSTRACT

S epidermidis polypeptides and DNA (RNA) encoding such polypeptides and a procedure for producing such polypeptides by recombinant techniques is disclosed. Also disclosed are methods for utilizing such polypeptides and DNA (RNA) for the treatment of infection, particularly infections arising from S epidermidis. Antagonists against the function of such polypeptides and their use as therapeutics to treat infection are also disclosed. Also disclosed are diagnostic assays for detecting diseases related to the presence of S epidermidis nucleic acid sequences and the polypeptides in a host. Also disclosed are diagnostic assays for detecting polynucleotides and polypeptides related to S epidermidis

### CROSS REFERENCE TO RELATED APPLICATIONS

[0001] This application is a divisional of U.S. application Ser. No. 09/710,279 filed Nov. 9, 2000 which claims priority from Provisional Application No. 60/164,258 filed Nov. 9, 1999.

### FIELD OF THE INVENTION

[0002] The present invention provides nucleic acids, and peptides, polypeptides and proteins encoded by the nucleic acids, isolated from Staphylococcus epidermidis.

### BACKGROUND OF THE INVENTION

[0003] Staphylococcus epidermidis is a gram-positive bacteria present in the normal flora of humans, and is typically present on the skin. It is catalase positive, and grows aerobically. It is inplicated in various human conditions and diseases, including subacute bacterial endocarditis (Baddour L M et al., Production of experimental endocarditis by coagulase-negative staphylococci: variability in species virulence, J. Infect. Dis. 150: 721-727, 1984; Karchmer A W, Archer G L, Dismukes W E, Staphylococcus epidermidis causing prosthetic valve endocarditis: microbiologic and clinical observations as guides to therapy, Ann Intern Med. 1983;98:447-455.) and septicemia (Christensen G D et al., Nosocomial septicemia due to multiply antibiotic-resistant Staphylococcus epidermidis, Ann. Intern. Med. 96: 1-10, 1982). S. epidermidis is estimated to be responsible for about 12% of all hospital patient infections. Because of the organism's peculiar ability to colonize polymer and metallic surfaces, there is a correlation of infection with the insertion of intravenous lines or catheters or implantation of prosthetic devices. Treatment can be difficult since different isolates of S. epidermidis show a broad spectrum of antibiotic resistance. The organism also produces a polysaccharide biofilm which helps to protect the bacteria from the human immune system (Tojo M et al., Isolation and characterization of a capsular polysaccharide adhesin from Staphylococcus epidermidis, J. Infect. Dis. 157: 713-722, 1988).

[0004] The present invention advantageously provides isolated nucleic acids and their encoded peptides, polypeptides and proteins from the genome of S. epidermidis, as well as the genomic map of S. epidermidis. Thus, the present invention fulfils a a widely-felt need for S. epidermidis diagnostics, antigens, and products useful in procedures for preparing antibodies and for identifying compounds effective against S. epidermidis infection. Selected nucleic acids and/or polypeptides of the present invention can be advantageously utilized as targets in screenings assays for antibiotics, as diagnostics of infections, and as means to identify S epidermidis in any given sample and distinguish it from other bacteria.

### SUMMARY OF THE INVENTION

[0005] The present invention provides an isolated polynucleotide comprising a member selected from the group consisting of:
[0006] (a) a polynucleotide encoding a polypeptide having at least a 70% identity to a polypeptide set forth in the Sequence Listing;
[0007] (b) a polynucleotide which is complementary to the polynucleotide of (a); and
[0008] (c) a polynucleotide comprising at least 15 sequential bases of the polynucleotide of (a) or (b). The present invention further provides polypeptides encoded by these polynucleotides and methods of using the polynucleotides and polypeptides.

### DETAILED DESCRIPTION OF THE INVENTION

[0009] Glossary

[0010] The following illustrative explanations are provided to facilitate understanding of certain terms used frequently herein, particularly in the Examples. The explanations are provided as a convenience and are not limitative of the invention.

[0011] BINDING MOLECULE refers to a molecule or ion which binds or interacts specifically with polypeptides or polynucleotides of the present invention, including, for example enzyme substrates, cell membrane components and classical receptors. Binding between polypeptides (or polynucleotides) of the invention and such molecules may be exclusive to polypeptides of the invention, which is preferred, or it may be highly specific for polypeptides of the invention, which is also preferred, or it may be highly specific to a group of proteins that includes polypeptides of the invention, which is preferred, or it may be specific to several groups of proteins at least one of which includes a polypeptide of the invention. Binding molecules also include antibodies and antibody-derived reagents that bind specifically to polypeptides of the invention.

[0012] GENETIC ELEMENT generally means a polynucleotide comprising a region that encodes a polypeptide or a polynucleotide region that regulates replication, transcription or translation or other processes important to expression of the polypeptide in a host cell, or a polynucleotide comprising both a region that encodes a polypeptide and a region operably linked thereto that regulates expression. Genetic elements may be comprised within a vector that replicates as an episomal element; that is, as a molecule physically independent of the host cell genome. They may be comprised within plasmids. Genetic elements also may be comprised within a host cell genome; not in their natural state but, rather, following manipulation such as isolation, cloning and introduction into a host cell in the form of purified DNA or in a vector, among others.

[0013] HOST CELL is a cell which has been transformed or transfected, or is capable of transformation or transfection by an exogenous polynucleotide sequence.

[0014] IDENTITY, as known in the art, is the relationship between two or more polypeptide sequences or two or more polynucleotide sequences, as determined by comparing the sequences. In the art, identity also means the degree of sequence relatedness between polypeptide or polynucleotide sequences, as the case may be, as determined by the match between strings of such sequences. Identity can be readily calculated (Computational Molecular Biology, Lesk, A. M., ed., Oxford University Press, New York, 1988; Biocomputing: Informatics and Genome Projects, Smith, D. W., ed., Academic Press, New York, 1993; Computer Analysis of Sequence Data, Part I, Griffin, A. M., and Griffin, H. G., eds., Humana Press, New Jersey, 1994; Sequence Analysis in Molecular Biology, von Heinje, G., Academic Press, 1987; and Sequence Analysis Primer, Gribskov, M. and Devereux, J., eds., M Stockton Press, New York, 1991). While there exist a number of methods to measure identity between two polynucleotide or two polypeptide sequences, the term is well known to skilled artisans (Sequence Analysis in Molecular Biology, von Heinje, G., Academic Press, 1987; Sequence Analysis Primer, Gribskov, M. and Devereux, J., eds., M Stockton Press, New York, 1991; and Carillo, H., and Lipman, D., SIAM J. Applied Math., 48: 1073 (1988)). Methods commonly employed to determine identity between sequences include, but are not limited to those disclosed in Carillo, H., and Lipman, D., SIAM J. Applied Math., 48:1073 (1988). Preferred methods to determine identity are designed to give the largest match between the sequences tested. Methods to determine identity are codified in computer programs. Preferred computer program methods to determine identity between two sequences include, but are not limited to, GCG program package (Devereux, J., et al., Nucleic Acids Research 12(1): 387 (1984)), BLASTP, BLASTN, and FASTA (Atschul, S. F. et al., J. Molec. Biol. 215: 403 (1990)).

[0015] ISOLATED means separated “by the hand of man” from its natural state; i.e., that, if it occurs in nature, it has been changed or removed from its original environment, or both. For example, a naturally occurring polynucleotide or a polypeptide naturally present in a living organism in its natural state is not “isolated,” but the same polynucleotide or polypeptide separated from the coexisting materials of its natural state is “isolated”, as the term is employed herein. As part of or following isolation, such polynucleotides can be joined to other polynucleotides, such as DNAs, for mutagenesis, to form fusion proteins, and for propagation or expression in a host, for instance. The isolated polynucleotides, alone or joined to other polynucleotides such as vectors, can be introduced into host cells, in culture or in whole organisms. Introduced into host cells in culture or in whole organisms, such DNAs still would be isolated, as the term is used herein, because they would not be in their naturally occurring form or environment. Similarly, the polynucleotides and polypeptides may occur in a composition, such as a media formulations, solutions for introduction of polynucleotides or polypeptides, for example, into cells, compositions or solutions for chemical or enzymatic reactions, for instance, which are not naturally occurring compositions, and, therein remain isolated polynucleotides or polypeptides within the meaning of that term as it is employed herein.

[0016] POLYNUCLEOTIDE(S) generally refers to any polyribonucleotide or polydeoxribonucleotide, which may be unmodified RNA or DNA or modified RNA or DNA. Thus, for instance, polynucleotides as used herein refers to, among others, single-and double-stranded DNA, DNA that is a mixture of single- and double-stranded regions or single-, double- and triple-stranded regions, single- and double-stranded RNA, and RNA that is mixture of single- and double-stranded regions, hybrid molecules comprising DNA and RNA that may be single-stranded or, more typically, double-stranded, or triple-stranded, or a mixture of single- and double-stranded regions. In addition, polynucleotide as used herein refers to triple-stranded regions comprising RNA or DNA or both RNA and DNA. The strands in such regions may be from the same molecule or from different molecules. The regions may include all of one or more of the molecules, but more typically involve only a region of some of the molecules. One of the molecules of a triple-helical region often is an oligonucleotide. As used herein, the term polynucleotide includes DNAs or RNAs as described above that contain one or more modified bases. Thus, DNAs or RNAs with backbones modified for stability or for other reasons are “polynucleotides” as that term is intended herein. Moreover, DNAs or RNAs comprising unusual bases, such as inosine, or modified bases, such as tritylated bases, to name just two examples, are polynucleotides as the term is used herein. It will be appreciated that a great variety of modifications have been made to DNA and RNA that serve many useful purposes known to those of skill in the art. The term polynucleotide as it is employed herein embraces such chemically, enzymatically or metabolically modified forms of polynucleotides, as well as the chemical forms of DNA and RNA characteristic of viruses and cells, including simple and complex cells, inter alia. The term polynucleotide also embraces short polynucleotides often referred to as oligonucleotide(s). “Polynucleofide” and “nucleic acid” are often used interchangeably herein.

[0017] POLYPEPTIDES, as used herein, includes all polypeptides as described below. The basic structure of polypeptides is well known and has been described in innumerable textbooks and other publications in the art. In this context, the term is used herein to refer to any peptide or protein comprising two or more amino acids joined to each other in a linear chain by peptide bonds. As used herein, unless otherwise indicated, the term refers to both short chains, which also commonly are referred to in the art as peptides, oligopeptides and oligomers, for example, and to longer chains, which generally are referred to in the art as proteins, of which there are many types. It will be appreciated that polypeptides often contain amino acids other than the 20 amino acids commonly referred to as the 20 naturally occurring amino acids, and that many amino acids, including the terminal amino acids, may be modified in a given polypeptide, either by natural processes, such as processing and other post-translational modifications, but also by chemical modification techniques which are well known to the art. Even the common modifications that occur naturally in polypeptides are too numerous to list exhaustively here, but they are well described in basic texts and in more detailed monographs, as well as in a voluminous research literature, and they are well known to those of skill in the art. Among the known modifications which may be present in polypeptides of the present are, to name an illustrative few, acetylation, acylation, ADP-ribosylation, amidation, covalent attachment of flavin, covalent attachment of a heme moiety, covalent attachment of a nucleotide or nucleotide derivative, covalent attachment of a lipid or lipid derivative, covalent attachment of phosphotidylinositol, cross-linking, cyclization, disulfide bond formation, demethylation, formation of covalent cross-links, formation of cystine, formation of pyroglutamate, formylation, gamma-carboxylation, glycosylation, GPI anchor formation, hydroxylation, iodination, methylation, myristoylation, oxidation, proteolytic processing, phosphorylation, prenylation, racemization, selenoylation, sufation, transfer-RNA mediated addition of amino acids to proteins such as arginylation, and ubiquitination. Such modifications are well known to those of skill and have been described in great detail in the scientific literature. Several particularly common modifications, glycosylation, lipid attachment, sufation, gamma-carboxylation of glutamic acid residues, hydroxylation and ADP-ribosylation, for instance, are described in most basic texts, such as, for instance PROTEINS—STRUCTURE AND MOLECULAR PROPERTIES, 2nd Ed., T. E. Creighton, W. H. Freeman and Company, New York (1993). Many detailed reviews are available on this subject, such as, for example, those provided by Wold, F., Posttranslational Protein Modifications: Perspectives and Prospects, pgs. 1-12 in POSTTRANSLATIONAL COVALENT MODIFICATION OF PROTEINS, B. C. Johnson, Ed., Academic Press, New York (1983); Seifter et al., Meth. Enzymol. 182:626-646 (1990) and Rattan et al., Protein Synthesis: Posttranslational Modifications and Aging, Ann. N.Y. Acad. Sci. 663: 48-62 (1992). It will be appreciated, as is well known and as noted above, that polypeptides are not always entirely linear. For instance, polypeptides may be generally as a result of posttranslational events, including natural processing event and events brought about by human manipulation which do not occur naturally. Circular, branched and branched circular polypeptides may be synthesized by non-translation natural process and by entirely synthetic methods, as well. Modifications can occur anywhere in a polypeptide, including the peptide backbone, the amino acid side-chains and the amino or carboxyl termini. In fact, blockage of the amino or carboxyl group in a polypeptide, or both, by a covalent modification, is common in naturally occurring and synthetic polypeptides and such modifications may be present in polypeptides of the present invention, as well. For instance, the amino terminal residue of polypeptides made in E coli or other cells, prior to proteolytic processing, almost invariably will be N-formylmethionine. During post-translational modification of the peptide, a methionine residue at the NH₂-terminus may be deleted. Accordingly, this invention contemplates the use of both the methionine-containing and the methionineless amino terminal variants of the protein of the invention. The modifications that occur in a polypeptide often will be a function of how it is made. For polypeptides made by expressing a cloned gene in a host, for instance, the nature and extent of the modifications in large part will be determined by the host cell posttranslational modification capacity and the modification signals present in the polypeptide amino acid sequence. For instance, as is well known, glycosylation often does not occur in bacterial hosts such as, for example, E coli. Accordingly, when glycosylation is desired, a polypeptide should be expressed in a glycosylating host, generally a eukaryotic cell. Insect cell often carry out the same posttranslational glycosylations as mammalian cells and, for this reason, insect cell expression systems have been developed to express efficiently mammalian proteins having native patterns of glycosylation, inter alia. Similar considerations apply to other modifications. It will be appreciated that the same type of modification may be present in the same or varying degree at several sites in a given polypeptide. Also, a given polypeptide may contain many types of modifications. In general, as used herein, the term polypeptide encompasses all such modifications, particularly those that are present in polypeptides synthesized recombinantly by expressing a polynucleotide in a host cell.

[0018] VARIANT(S) of polynucleotides or polypeptides, as the term is used herein, are polynucleotides or polypeptides that differ from a reference polynucleotide or polypeptide, respectively. Variants in this sense are described below and elsewhere in the present disclosure in greater detail. (1) A polynucleotide that differs in nucleotide sequence from another, reference polynucleotide. Generally, differences are limited so that the nucleotide sequences of the reference and the variant are closely similar overall and, in many regions, identical. As noted below, changes in the nucleotide sequence of the variant may be silent. That is, they may not alter the amino acids encoded by the polynucleotide. Where alterations are limited to silent changes of this type a variant will encode a polypeptide with the same amino acid sequence as the reference. Also as noted below, changes in the nucleotide sequence of the variant may alter the amino acid sequence of a polypeptide encoded by the reference polynucleotide. Such nucleotide changes may result in amino acid substitutions, additions, deletions, fusions and truncations in the polypeptide encoded by the reference sequence, as discussed below. (2) A polypeptide that differs in amino acid sequence from another, reference polypeptide. Generally, differences are limited so that the sequences of the reference and the variant are closely similar overall and, in many regions, identical. A variant and reference polypeptide may differ in amino acid sequence by one or more substitutions, additions, deletions, fusions and truncations, which may be present in any combination.

[0019] Techniques are available to evaluate temporal gene expression in bacteria, particularly as it applies to viability under laboratory and host infection conditions. A number of methods can be used to identify genes which are essential to survival per se, or essential to the establishment/maintenance of an infection. Identification of expression of a sequence by one of these methods yields additional information about its function and permits the selection of such sequence for further development as a screening target. Briefly, these approaches include:

1) Signature Tagged Mutagenesis (STM)

[0020] This technique is described by Hensel et al., Science 269: 400-403(1995), the contents of which is incorporated by reference for background purposes. Signature tagged mutagenesis identifies genes necessary for the establishment/maintenance of infection in a given infection model.

[0021] The basis of the technique is the random mutagenesis of target organism by various means (e.g., transposons) such that unique DNA sequence tags are inserted in close proximity to the site of mutation. The tags from a mixed population of bacterial mutants and bacteria recovered from an infected host are detected by amplification, radiolabeling and hybridization analysis. Mutants attenuated in virulence are revealed by absence of the tag from the pool of bacteria recovered from infected hosts.

[0022] In Streptococcus pneumoniae, because the transposon system is less well developed, a more efficient way of creating the tagged mutants is to use the insertion-duplication mutagenesis technique as described by Morrison et al., J. Bacteriol. 159:870 (1984) the contents of which is incorporated by reference for background purposes.

2) In Vivo Expression Technology (IVET)

[0023] This technique is described by Camilli et al., Proc. Nat'l. Acad. Sci. USA. 91:2634-2638 (1994), the contents of which is incorporated by reference for background purposes. IVET identifies genes up-regulated during infection when compared to laboratory cultivation, implying an important role in infection. Sequences identified by this technique are implied to have a significant role in infection establishment/maintenance.

[0024] In this technique random chromosomal fragments of target organism are cloned upstream of a promoter-less reporter gene in a plasmid vector. The pool is introduced into a host and at various times after infection bacteria may be recovered and assessed for the presence of reporter gene expression. The chromosomal fragment carried upstream of an expressed reporter gene should carry a promoter or portion of a gene normally upregulated during infection. Sequencing upstream of the reporter gene allows identification of the up regulated gene.

3) Differential Display

[0025] This technique is described by Chuang et al., J. Bacteriol. 175:2026-2036 (1993), the contents of which is incorporated by reference for background purposes. This method identifies those genes which are expressed in an organism by identifying mRNA present using randomly-primed RT-PCR. By comparing pre-infection and post infection profiles, genes up and down regulated during infection can be identified and the RT-PCR product sequenced and matched to library sequences.

4) Generation of Conditional Lethal Mutants by Transposon Mutagenesis.

[0026] This technique, described by de Lorenzo, V. et al., Gene 123:17-24 (1993); Neuwald, A. F. et al., Gene 125: 69-73(1993); and Takiff, H. E. et al., J. Bacteriol. 174:1544-1553(1992), the contents of which is incorporated by reference for background purposes, identifies genes whose expression are essential for cell viability.

[0027] In this technique transposons carrying controllable promoters, which provide transcription outward from the transposon in one or both directions, are generated. Random insertion of these transposons into target organisms and subsequent isolation of insertion mutants in the presence of inducer of promoter activity ensures that insertions which separate promoter from coding region of a gene whose expression is essential for cell viability will be recovered. Subsequent replica plating in the absence of inducer identifies such insertions, since they fail to survive. Sequencing of the flanking regions of the transposon allows identification of site of insertion and identification of the gene disrupted. Close monitoring of the changes in cellular processes/morphology during growth in the absence of inducer yields information on likely function of the gene. Such monitoring could include flow cytometry (cell division, lysis, redox potential, DNA replication), incorporation of radiochemically labeled precursors into DNA, RNA, protein, lipid, peptidoglycan, monitoring reporter enzyme gene fusions which respond to known cellular stresses.

5) Generation of Conditional Lethal Mutants by Chemical Mutagenesis.

[0028] This technique is described by Beckwith, J., Methods in Enzymology 204: 3-18(1991), the contents of which are incorporated herein by reference for background purposes. In this technique random chemical mutagenesis of target organism, growth at temperature other than physiological temperature (permissive temperature) and subsequent replica plating and growth at different temperature (e.g. 42° C. to identify ts, 25° C. to identify cs) are used to identify those isolates which now fail to grow (conditional mutants). As above close monitoring of the changes upon growth at the non-permissive temperature yields information on the function of the mutated gene. Complementation of conditional lethal mutation by library from target organism and sequencing of complementing gene allows matching with library sequences.

[0029] Each of these techniques may have advantages or disadvantages depending on the particular application. The skilled artisan would choose the approach that is the most relevant with the particular end use in mind. For example, some genes might be recognised as essential for infection but in reality are only necessary for the initiation of infection and so their products would represent relatively unattractive targets for antibacterials developed to cure established and chronic infections.

6) RT-PCR

[0030] Bacterial messenger RNA, preferably that of S. epidermidis, is isolated from bacterial infected tissue e.g. 48 hour murine lung infections, and the amount of each mRNA species assessed by reverse transcription of the RNA sample primed with random hexanucleotides followed by PCR with gene specific primer pairs. The determination of the presence and amount of a particular mRNA species by quantification of the resultant PCR product provides information on the bacterial genes which are transcribed in the infected tissue. Analysis of gene transcription can be carried out at different times of infection to gain a detailed knowledge of gene regulation in bacterial pathogenesis allowing for a clearer understanding of which gene products represent targets for screens for novel antibacterials. Because of the gene specific nature of the PCR primers employed it should be understood that the bacterial mRNA preparation need not be free of mammalian RNA. This allows the investigator to carry out a simple and quick RNA preparation from infected tissue to obtain bacterial mRNA species which are very short lived in the bacterium (in the order of 2 minute halflives). Optimally the bacterial mRNA is prepared from infected murine lung tissue by mechanical disruption in the presence of TRIzole (GIBCO-BRL) for very short periods of time, subsequent processing according to the manufacturers of TRIzole reagent and DNAase treatment to remove contaminating DNA. Preferably the process is optimized by finding those conditions which give a maximum amount of bacterial 16S ribosomal RNA, preferably that of S. epidermidis, as detected by probing Northerns with a suitably labeled sequence specific oligonucleotide probe. Typically a 5′ dye labelled primer is used in each PCR primer pair in a PCR reaction which is terminated optimally between 8 and 25 cycles. The PCR products are separated on 6% polyacrylamide gels with detection and quantification using GeneScanner (manufactured by ABI).

[0031] Use of the of these technologies when applied to the sequences of the present invention enables identification of bacterial proteins expressed during infection, inhibitors of which would have utility in anti-bacterial therapy.

Polynucleotides

[0032] The present invention relates to novel polynucleotides and novel polypeptides of S. epidermidis, among other things, as described below. The invention particularly relates to the nucleotide sequences set forth in the Sequence Listing SEQ ID NOs: 1-3334, typically as odd numbered ID numbers, and the corresponding deduced amino acid sequences also set forth in the Sequence Listing SEQ ID NOs:1-3334, typically as even numbered ID numbers. SEQ ID NOs 1-3334 refer to open reading frames (ORFs). The invention also relates to consensus polynucleotide sequences from which the ORFs were extracted. These genomic sequences include the ORFs, intergenic regions and ribosomal RNA genes. Such genomic polynucleotides are set forth as SEQ ID Nos 3335-4464. It will be noted that minor errors in sequencing can occur which do not depart from the spirit of the invention; S. epidermidis polynucleotides and polypeptides having any corrected sequences are thus encompassed by this invention.

[0033] Using the information provided herein and known, standard methods, such as those for cloning and sequencing and those for synthesizing polynucleotides and polypeptides (see, e.g., Sambrook et al., Molecular Cloning: A Laboratory Manual, 2d Ed., Cold Spring Harbor Laboratory Press, Cold Spring Harbor, N.Y. (1989)), one can generate numerous unique fragments, both longer and shorter than the polynucleotides and polypeptides set forth in the Sequence Listing, of the S. epidermidis genome and the S. epidermidis coding regions, which are encompassed by the present invention. To be unique, a fragment must be of sufficient size to distinguish it from other known nucleic acid sequences, most readily determined by comparing any selected S. epidermidis fragment to the nucelotide sequences in computer databases such as GenBank. Such comparative searches are standard in the art. Many unique fragments will be S. epidermidis—specific. Typically, a unique fragment useful as a primer or probe will be at least about 20 to about 25 nucleotides in length, depending upon the specific nucleotide content of the sequence. Additionally, fragments can be, for example, at least about 30, 40, 50, 60, 75, 80, 90, 100, 150, 200, 250, 300, 400, 500 or more nucleotides in length. The nucleic acid fragment can be single, double or triple stranded, depending upon the purpose for which it is intended.

[0034] Additionally, as discussed above and below, modifications can be made to the S. epidermidis polynucleotides and polypeptides that are encompassed by the present invention. For example, nucleotide substitutions can be made which do not affect the polypeptide encoded by the nucleic acid, and thus any polynucleotide which encodes the polypeptides of this invention is within the present invention. Additionally, certain amino acid substitutions (and corresponding nucleotide substitutions to encode them) can be made which are known in the art to be neutral (Robinson W. E. Jr. and Mitchell, W. m., AIDS 4: S141-S162 (1990). Such variations may arise naturally as allelic variations (e.g., due to genetic polymorphism) or may be produced by human intervention (e.g., by mutagenesis of cloned DNA sequences), such as induced point, deletion, insertion and substitution mutations. Minor changes in amino acid sequence are generally preferred, such as conservative amino acid replacements, small internal deletions or insertions, and additions or deletions at the ends of the molecules. Substitutions may be designed based on, for example, the model of Dayhoff, et al. (in Atlas of Protein Sequence and Structire 1978, Nat'l Biomed. Res. Found., Washington D.C.). These modifications can result in changes in the amino acid sequence, provide silent mutations, modify a restriction site, or provide other specific mutations. Likewise, such amino acid changes result in a different nucleic acid encoding the polypeptides and proteins. Thus, alternative polynucleotides, which are within the parameters of the present invention, are contemplated by such modifications.

[0035] Furthermore, the polynucleotide sequences set forth as SEQ ID Nos: 1-3334 in the Sequence Listing are open reading frames (ORFs), i.e., coding regions of S. epidermidis. The polypeptide encoded by each open reading frame can be deduced, and the molecular weight of the polypeptide thus calculated using amino acid residue molecular weight values well known in the art. Any selected coding region can be functionally linked, using standard techniques such as standard subcloning techniques, to any desired regulatory sequence, whether a S. epidermidis regulatory sequence or a heterologous regulatory sequence, or to a heterologous coding sequence to create a fusion protein, as further described herein.

[0036] Polynucleotides of the present invention may be in the form of RNA, such as mRNA or cRNA, or in the form of DNA, including, for instance, cDNA and genomic DNA obtained by cloning or produced by chemical synthetic techniques or by a combination thereof. The DNA may be triple-stranded, double-stranded or single-stranded. Single-stranded DNA may be the coding strand, also known as the sense strand, or it may be the non-coding strand, also referred to as the anti-sense strand.

[0037] The coding sequence which encodes a S. epidermidis polypeptide of this invention may be identical to the coding sequence of a polynucleotide set forth in the sequence listing. It also may be a polynucleotide with a different sequence which, as a result of the redundancy (degeneracy) of the genetic code, encodes a S. epidermidis polypeptide set forth in the seqence listing.

[0038] Polynucleotides of the present invention which encode a S. epidermidis polypeptide set forth in the seqence listing may include, but are not limited to, the coding sequence for a mature polypeptide, by itself; the coding sequence for a mature polypeptide and additional coding sequences, such as those encoding a leader or secretory sequence, such as a pre-, or pro- or prepro- protein sequence; the coding sequence of a mature polypeptide, with or without the aforementioned additional coding sequences, together with additional, non-coding sequences, including for example, but not limited to non-coding 5′ and 3′ sequences, such as the transcribed, non-translated sequences that play a role in transcription (including termination signals, for example), ribosome binding, mRNA stability elements, and additional coding sequence which encode additional amino acids, such as those which provide additional functionalities. Thus, for instance, a polypeptide may be fused to a marker sequence, such as a peptide, which facilitates purification of the fused polypeptide. In certain embodiments of this aspect of the invention, the marker sequence is a hexa-histidine peptide, such as the tag provided in the pQE vector (Qiagen, Inc.), among others, many of which are commercially available. As described in Gentz et al., Proc. Natl. Acad. Sci., USA 86:821-824 (1989), for instance, hexa-histidine provides for convenient purification of the fusion protein. The HA tag may also be used to create fusion proteins and corresponds to an epitope derived of influenza hemagglutinin protein, which has been described by Wilson et al., Cell 37:767 (1984), for instance. Polynucleotides of the invention also include, but are not limited to, polynucleotides comprising a structural gene and its naturally associated genetic elements.

[0039] In accordance with the foregoing, the term “polynucleotide encoding a polypeptide” as used herein encompasses polynucleotides which include a sequence encoding a polypeptide of the present invention, particularly a polypeptide having a S. epidermidis amino acid sequence set forth in the Sequence Listing. The term encompasses polynucleotides that include a single continuous region or discontinuous regions encoding the polypeptide (for example, interrupted by integrated phage or insertion sequence or editing) together with additional regions, that also may contain coding and/or non-coding sequences.

[0040] The present invention further relates to variants of the herein above described polynucleotides which encode for fragments, analogs and derivatives of the polypeptide having a deduced S. epidermidis amino acid sequence set forth in the Sequence Listing. A variant of the polynucleotide may be a naturally occurring variant such as a naturally occurring allelic variant, or it may be a variant that is not known to occur naturally. Such non-naturally occurring variants of the polynucleotide may be made by mutagenesis techniques, including those applied to polynucleotides, cells or organisms.

[0041] Among variants in this regard are variants that differ from the aforementioned polynucleotides by nucleotide substitutions, deletions or additions. The substitutions, deletions or additions may involve one or more nucleotides. The variants may be altered in coding or non-coding regions or both. Alterations in the coding regions may produce conservative or non-conservative amino acid substitutions, deletions or additions. Preferred are polynucleotides encoding a variant, analog, derivative or fragment, or a variant, analogue or derivative of a fragment, which have a S. epidermidis sequence as set forth in the Sequence Listing, in which several, a few, 5 to 10, 1 to 5, 1 to 3, 2, 1 or no amino acid(s) is substituted, deleted or added, in any combination. Especially preferred among these are silent substitutions, additions and deletions, which do not alter the properties and activities of the S. epidermidis polypeptides set forth in the Sequence Listing. Also especially preferred in this regard are conservative substitutions.

[0042] Further preferred embodiments of the invention are polynucleotides that are at least 70% identical over their entire length to a polynucleotide encoding a polypeptide having an amino acid sequence set forth in the Sequence Listing, and polynucleotides which are complementary to such polynucleotides. Alternatively, most highly preferred are polynucleotides that comprise a region that is at least 80% or at least 85% identical over their entire length to a polynucleotide encoding a S. epidermidis polypeptide set forth in the Sequence Listing, including complementary polynucleotides. In this regard, polynucleotides at least 90%, 91%, 92%, 93%, 94%, 95%, or 96% identical over their entire length to the same are particularly preferred, and among these particularly preferred polypeptides, those with at least 95% are especially preferred. . Furthermore, those with at least 97% are highly preferred among those with at least 95%, and among these, those with at least 98% and at least 99% are particularly highly preferred, with at least 99% or 99.5% being the more preferred.

[0043] Preferred embodiments in this respect, moreover, are polynucleotides which encode polypeptides which retain substantially the same biological function or activity as the mature polypeptide encoded by the DNA set forth in the Sequence Listing.

[0044] The present invention further relates to polynucleotides that hybridize to the herein above-described sequences. In this regard, the present invention especially relates to polynucleotides which hybridize under stringent conditions to the herein above-described polynucleotides. Stringent conditions are typically selective conditions. As herein used, the term “stringent conditions” means hybridization will occur only if there is at least 95% and preferably at least 97% identity between the sequences. For a specific sequence, stringent conditions can be determined empirically according to the nucleotide content, as is known in the art. For example, a typical example of stringent conditions is hybridization of a 48 mer having 55% GC content at 42° C. in 50% formamide and 750 mM NaCl followed by washing at 55° C. in 15 mM NaCl and 0.1% SDS.

[0045] As discussed additionally herein regarding polynucleotide assays of the invention, for instance, polynucleotides of the invention as discussed above, may be used as a hybridization probe for RNA, cDNA and genomic DNA to isolate full-length cDNAs and genomic clones encoding polypeptides of the present invention and to isolate cDNA and genomic clones of other genes that have a high sequence similarity to the polynucleotides of the present invention. Such probes generally will comprise at least 15 bases. Preferably, such probes will have at least 20, at least 25 or at least 30 bases, and may have at least 50 bases. Particularly preferred probes will have at least 30 bases, and will have 50 bases or less, such as 30, 35, 40, 45, or 50 bases.

[0046] For example, the coding region of the polynucleotide of the present invention may be isolated by screening using the known DNA sequence to synthesize an oligonucleotide probe. A labeled oligonucleotide having a sequence complementary to that of a gene of the present invention is then used to screen a library of cDNA, genomic DNA or mRNA to determine to which members of the library the probe hybridizes.

[0047] The polynucleotides and polypeptides of the present invention may be employed as reagents and materials for development of treatments of and diagnostics for disease, particularly human disease, as further discussed herein relating to polynucleotide assays, inter alia.

[0048] The polynucleotides of the present invention that are oligonucleotides can be used in the processes herein as described, but preferably for PCR, to determine whether or not the S. epidermidis genes identified herein in whole or in part are present and/or transcribed in infected tissue such as blood. It is recognized that such sequences will also have utility in diagnosis of the stage of infection and type of infection the pathogen has attained.

[0049] The polynucleotides may encode a polypeptide which is the mature protein plus additional amino or carboxyl-terminal amino acids, or amino acids interior to the mature polypeptide (when the mature form has more than one polypeptide chain, for instance). Such sequences may play a role in processing of a protein from precursor to a mature form, may allow protein transport, may lengthen or shorten protein half-life or may facilitate manipulation of a protein for assay or production, among other things. As generally is the case in vivo, the additional amino acids may be processed away from the mature protein by cellular enzymes.

[0050] A precursor protein, having the mature form of the polypeptide fused to one or more prosequences may be an inactive form of the polypeptide. When prosequences are removed such inactive precursors generally are activated. Some or all of the prosequences may be removed before activation. Generally, such precursors are called proproteins.

[0051] The present invention additionally contemplates polynucleotides functionally encoding fusion polypeptides wherein the fusion polypeptide comprises a fragment of a S. epidermidis polypeptide and one or more polypeptide(s) derived from another S. epidermidis polypeptide or from another organism or a synthetic polyamino acid sequence. Such polynucleotides may or may not encode amino acid sequences to facilitate cleavage of the S. epidermidis polypeptide from the other polypeptide(s) under appropriate conditions.

[0052] In sum, a polynucleotide of the present invention may encode a mature protein, a mature protein plus a leader sequence (which may be referred to as a preprotein), a precursor of a mature protein having one or more prosequences which are not the leader sequences of a preprotein, or a preproprotein, which is a precursor to a proprotein, having a leader sequence and one or more prosequences, which generally are removed during processing steps that produce active and mature forms of the polypeptide.

Polypeptides

[0053] The present invention further relates to peptides, polypeptides and proteins (collectively referred to as “polypeptides”) of S. epidermidis. The amino acid sequence of these polypeptdes is set forth in the Sequence Listing.

[0054] The invention also relates to fragments, analogs and derivatives of these polypeptides. The terns “fragment,” “derivative” and “analog” when referring to a polypeptide whose amino acid sequence is set forth in the Sequence Listing, means a polypeptide which retains essentially the same biological function or activity as such polypeptide. Thus, an analog includes a proprotein which can be activated by cleavage of the proprotein portion to produce an active mature polypeptide.

[0055] The fragment, derivative or analog of the polypeptide of the present invention may be (i) one in which one or more of the amino acid residues are substituted with a conserved or non-conserved amino acid residue (preferably a conserved amino acid residue) and such substituted amino acid residue may or may not be one encoded by the genetic code, or (ii) one in which one or more of the amino acid residues includes a substituent group, or (iii) one in which the mature polypeptide is fused with another compound, such as a compound to increase the half-life of the polypeptide (for example, polyethylene glycol), or (iv) one in which the additional amino acids are fused to the mature polypeptide, such as a leader or secretory sequence or a sequence which is employed for purification of the mature polypeptide or a proprotein sequence. Such fragments, derivatives and analogs are deemed to be within the scope of those skilled in the art from the teachings herein.

[0056] Among the particularly preferred embodiments of the invention in this regard are polypeptides set forth in the Sequence Listing, variants, analogs, derivatives and fragments thereof, and variants, analogs and derivatives of the fragments. Additionally, fusion polypeptides comprising such polypeptides, variants, analogs, derivatives and fragments thereof, and variants, analogs and derivatives of the fragmants, in addition to a heterologous polypeptide, are contemplated by the present invention. Such fusion polypeptides and proteins, as well as polynucleotides encoding them, can readily be made using standard techniques, including standard recombinant techniques for producing and expressing a recombinant polynucleic acid encoding a fusion protein.

[0057] Among preferred variants are those that vary from a reference by conservative amino acid substitutions. Such substitutions are those that substitute a given amino acid in a polypeptide by another amino acid of like characteristics. Typically seen as conservative substitutions are the replacements, one for another, among the aliphatic amino acids Ala, Val, Leu and lle; interchange of the hydroxyl residues Ser and Thr, exchange of the acidic residues Asp and Glu, substitution between the amide residues Asn and Gin, exchange of the basic residues Lys and Arg and replacements among the aromatic residues Phe, Tyr.

[0058] Further particularly preferred in this regard are variants, analogs, derivatives and fragments, and variants, analogs and derivatives of the fragments, having the amino acid sequence of any polypeptide aet forth ing the Sequence Listing, in which several, a few, 5 to 10, 1 to 5, 1 to 3, 2, 1 or no amino acid residues are substituted, deleted or added, in any combination. Especially preferred among these are silent substitutions, additions and deletions, which do not alter the properties and activities of the polypeptide of the present invention. Also especially preferred in this regard are conservative substitutions. Most highly preferred are polypeptides having an amino acid sequence set forth in the Sequence Listing without substitutions.

[0059] The polypeptides and polynucleotides of the present invention are preferably provided in an isolated form, and preferably are purified to homogeneity.

[0060] The polypeptides of the present invention include any polypeptide set forth in the Sequence Listing (in particular a mature polypeptide) as well as polypeptides which have at least 70% identity to a polypeptide set forth in the Sequence Listing, preferably at least 80% or 85% identity to a polypeptide set forth in the Sequence Listing, and more preferably at least 90% similarity (more preferably at least 90% identity) to a polypeptide set forth in the Sequence Listing and still more preferably at least 95%, 96%, 97%, 98%, 99%, or 99.5% similarity (still more preferably at least 95%, 96%, 97%, 98%, 99%, or 99.5% identity) to a polypeptide set forth in the Sequence Listing and also include portions of such polypeptides with such portion of the polypeptide generally containing at least 30 amino acids and more preferably at least 50 amino acids, such as 30, 35, 40, 45 or 50 amino acids.

[0061] Fragments or portions of the polypeptides of the present invention may be employed for producing the corresponding full-length polypeptide by peptide synthesis; therefore, the fragments may be employed as intermediates for producing the full-length polypeptides. Fragments or portions of the polynucleotides of the present invention may be used to synthesize full-length polynucleotides of the present invention.

Fragments

[0062] Also among preferred embodiments of this aspect of the present invention are polypeptides comprising fragments of the polypeptide having the amino acid sequence set forth in the Sequence Listing, and fragments of variants and derivatives of the polypeptides set forth in the Sequence Listing.

[0063] In this regard a fragment is a polypeptide having an amino acid sequence that entirely is the same as part but not all of the amino acid sequence of the aforementioned S. epidermidis polypeptides and variants or derivatives thereof.

[0064] Such fragments may be “free-standing,” i.e., not part of or fused to other amino acids or polypeptides, or they may be comprised within a larger polypeptide of which they form a part or region. When comprised within a larger polypeptide, the presently discussed fragments most preferably form a single continuous region. However, several fragments may be comprised within a single larger polypeptide. For instance, certain preferred embodiments relate to a fragment of a polypeptide of the present invention comprised within a precursor polypeptide designed for expression in a host and having heterologous pre and pro-polypeptide regions fused to the amino terminus of the fragment and an additional region fused to the carboxyl terminus of the fragment. Therefore, fragments in one aspect of the meaning intended herein, refers to the portion or portions of a fusion polypeptide or fusion protein derived from a polypeptide of the present invention.

[0065] Representative examples of polypeptide fragments of the invention, include, for example, in any selected polypeptide, fragments from about amino acid number 1-20, 21-40, 41-60, 61-80, 81-100, and 101-200, 201-300, or, at the COOH-terminal end, the C-terminal 20 amino acids, the C-terminal 30 amino acids, the C-terminal 40 amino acids, the C-terminal 50 amino acids, and any combination of these fragments, such as fragment from about amino acid number 1-40, 1-60, 21-60, 41-80, 61-100, and the like.

[0066] In this context “about” herein includes the particularly recited ranges larger or smaller by several, a few, 5, 4, 3, 2 or 1 amino acid at either extreme or at both extremes.

[0067] Preferred fragments of the invention include, for example, truncation polypeptides including polypeptides having an amino acid sequence set forth in the Sequence Listing, or of variants or derivatives thereof, except for deletion of a continuous series of residues (that is, a continuous region, part or portion) that includes the amino terminus, or a continuous series of residues that includes the carboxyl terminus or, as in double truncation mutants, deletion of two continuous series of residues, one including the amino terminus and one including the carboxyl terminus. Fragments having the size ranges set out above also are preferred embodiments of truncation fragments, which are especially preferred among fragments generally. Degradation forms of the polypeptides of the invention in a host cell are also preferred.

[0068] Also preferred in this aspect of the invention are fragments characterized by structural or functional attributes of the polypeptide of the present invention. Preferred embodiments of the invention in this regard include fragments that comprise alpha-helix and alpha-helix forming regions, beta-sheet and beta-sheet-forming regions, turn and tum-forming regions, coil and coil-forming regions, hydrophilic regions, hydrophobic regions, alpha amphipathic regions, beta amphipathic regions, flexible regions, surface-forming regions, substrate binding region, and high antigenic index regions of the polypeptide of the present invention, and combinations of such fragments.

[0069] Preferred regions are those that mediate activities of the polypeptide of the present invention. Most highly preferred in this regard are fragments that have a chemical, biological or other activity of the polypeptide of the present invention, including those with a similar activity or an improved activity, or with a decreased undesirable activity. Particularly preferred are fragments comprising receptors or domains of enzymes that confer a function essential for viability of S. epidermidis or the ability to cause disease in humans. Further preferred polypeptide fragments are those that comprise or contain antigenic or immunogenic determinants in an animal, especially in a human.

[0070] It will be appreciated that the invention also relates to, among others, polynucleotides encoding the aforementioned fragments, polynucleotides that hybridize to polynucleotides encoding the fragments, particularly those that hybridize under stringent conditions, and polynucleotides, such as PCR primers, for amplifying polynucleotides that encode the fragments. In these regards, preferred polynucleotides are those that correspond to the preferred fragments, as discussed above.

Vectors, Host Cells, Expression

[0071] The present invention also relates to vectors which comprise a polynucleotide or polynucleotides of the present invention, host cells which are genetically engineered with vectors of the invention and the production of polypeptides of the invention by recombinant techniques.

[0072] Host cells can be genetically engineered to incorporate polynucleotides and express polypeptides of the present invention. Introduction of a polynucleotides into the host cell can be effected by calcium phosphate transfection, DEAE-dextran mediated transfection, transvection, microinjection, cationic lipid-mediated transfection, electroporation, transduction, scrape loading, ballistic introduction, infection or other methods. Such methods are described in many standard laboratory manuals, such as Davis et al., BASIC METHODS IN MOLECULAR BIOLOGY, (1986) and Sambrook et al., MOLECULAR CLONING: A LABORATORY MANUAL, 2nd Ed., Cold Spring Harbor Laboratory Press, Cold Spring Harbor, N.Y. (1989).

[0073] Polynucleotide constructs in host cells can be used in a conventional manner to produce the gene product encoded by the recombinant sequence. Alternatively, the polypeptides of the invention can be synthetically produced by conventional peptide synthesizers.

[0074] Mature proteins can be expressed in mammalian cells, yeast, bacteria, or other cells under the control of appropriate promoters. Cell-free translation systems can also be employed to produce such proteins using RNAs derived from the DNA constructs of the present invention. Appropriate cloning and expression vectors for use with prokaryotic and eukaryotic hosts are described by Sambrook et al., MOLECULAR CLONING: A LABORATORY MANUAL, 2nd Ed., Cold Spring Harbor Laboratory Press, Cold Spring Harbor, N.Y. (1989).

[0075] In accordance with this aspect of the invention the vector may be, for example, a plasmid vector, a single or double-stranded phage vector, a single or double-stranded RNA or DNA viral vector. Plasmids generally are designated herein by a lower case p preceded and/or followed by capital letters and/or numbers, in accordance with standard naming conventions that are familiar to those of skill in the art. Starting plasmids disclosed herein are either commercially available, publicly available, or can be constructed from available plasmids by routine application of well known, published procedures, given the teachings herein. Many plasmids and other cloning and expression vectors that can be used in accordance with the present invention are well known and readily available to those of skill in the art.

[0076] Preferred among vectors, in certain respects, are those for expression of polynucleotides and polypeptides of the present invention. Generally, such vectors comprise cis-acting control regions effective for expression in a host operatively linked to the polynucleotide to be expressed. Appropriate trans-acting factors either are supplied by the host, supplied by a complementing vector or supplied by the vector itself upon introduction into the host.

[0077] In certain preferred embodiments in this regard, the vectors provide for specific expression. Such specific expression may be inducible expression or expression only in certain types of cells or both inducible and cell-specific. Particularly preferred among inducible vectors are vectors that can be induced for expression by environmental factors that are easy to manipulate, such as temperature and nutrient additives. A variety of vectors suitable to this aspect of the invention, including constitutive and inducible expression vectors for use in prokaryotic and eukaryotic hosts, are well known and employed routinely by those of skill in the art.

[0078] A great variety of expression vectors can be used to express a polypeptide of the invention. Such vectors include, among others, chromosomal, episomal and virus-derived vectors, e.g., vectors derived from bacterial plasmids, from bacteriophage, from transposons, from yeast episomes, from insertion elements, from yeast chromosomal elements, from viruses such as baculoviruses, papova viruses, such as SV40, vaccinia viruses, adenoviruses, fowl pox viruses, pseudorabies viruses and retroviruses, and vectors derived from combinations thereof, such as those derived from plasmid and bacteriophage genetic elements, such as cosmids and phagemids, all may be used for expression in accordance with this aspect of the present invention. Generally, any vector suitable to maintain, propagate or express polynucleotides to express a polypeptide in a host may be used for expression in this regard.

[0079] The appropriate DNA sequence may be inserted into the vector by any of a variety of well-known and routine techniques, such as, for example, those set forth in Sambrook et al., MOLECULAR CLONING, A LABORATORY MANUAL, 2nd Ed.; Cold Spring Harbor Laboratory Press, Cold Spring Harbor, N.Y. (1989).

[0080] The DNA sequence in the expression vector is operatively linked to appropriate expression control sequence(s), including, for instance, a promoter to direct mRNA transcription. Representatives of such promoters include, but are not limited to, the phage lambda PL promoter, the E. coli lac, trp and tac promoters, the SV40 early and late promoters and promoters of retroviral LTRs.

[0081] In general, expression constructs will contain sites for transcription initiation and termination, and, in the transcribed region, a ribosome binding site for translation. The coding portion of the mature transcripts expressed by the constructs will include a translation initiating AUG at the beginning and a termination codon appropriately positioned at the end of the polypeptide to be translated.

[0082] In addition, the constructs may contain control regions that regulate as well as engender expression. Generally, in accordance with many commonly practiced procedures, such regions will operate by controlling transcription, such as transcription factors, repressor binding sites and termination, among others.

[0083] Vectors for propagation and expression generally will include selectable markers and amplification regions, such as, for example, those set forth in Sambrook et al., MOLECULAR CLONING, A LABORATORY MANUAL, 2nd Ed.; Cold Spring Harbor Laboratory Press, Cold Spring Harbor, N.Y. (1989).

[0084] Representative examples of appropriate hosts include bacterial cells, such as streptococci, staphylococci, E. coli, streptomyces and Bacillus subtilis cells; fungal cells, such as yeast cells and Aspergillus cells; insect cells such as Drosophila S2 and Spodoptera Sf9 cells; animal cells such as CHO, COS, HeLa, C127, 3T3, BHK, 293 and Bowes melanoma cells; and plant cells.

[0085] The following vectors, which are commercially available, are provided by way of example. Among vectors preferred for use in bacteria are pQE70, pQE60 and pQE-9, available from Qiagen; pBS vectors, Phagescript vectors, Bluescript vectors, pNH8A, pNH 16a, pNH18A, pNH46A, available from Stratagene; and ptrc99a, pKK223-3, pKK233-3, pDR540, pRIT5 available from Pharmacia, and pBR322 (ATCC 37017). Among preferred eukaryotic vectors are pWLNEO, pSV2CAT, pOG44, pXT1 and pSG available from Stratagene; and pSVK3, pBPV, pMSG and pSVL available from Pharmacia. These vectors are listed solely by way of illustration of the many commercially available and well known vectors that are available to those of skill in the art for use in accordance with this aspect of the present invention. It will be appreciated that any other plasmid or vector suitable for, for example, introduction, maintenance, propagation or expression of a polynucleotide or polypeptide of the invention in a host may be used in this aspect of the invention.

[0086] Promoter regions can be selected from any desired gene using vectors that contain a reporter transcription unit lacking a promoter region, such as a chloramphenicol acetyl transferase (“CAT”) transcription unit, downstream of restriction site or sites for introducing a candidate promoter fragment; i.e., a fragment that may contain a promoter. As is well known, introduction into the vector of a promoter-containing fragment at the restriction site upstream of the cat gene engenders production of CAT activity, which can be detected by standard CAT assays. Vectors suitable to this end are well known and readily available, such as pKK232-8 and pCM7. Promoters for expression of polynucleotides of the present invention include not only well known and readily available promoters, but also promoters that readily may be obtained by the foregoing technique, using a reporter gene.

[0087] Among known prokaryotic promoters suitable for expression of polynucleotides and polypeptides in accordance with the present invention are the E. coli lacl and lacZ and promoters, the T3 and T7 promoters, the gpt promoter, the lambda PR, PL promoters and the trp promoter.

[0088] Among known eukaryotic promoters suitable in this regard are the CMV immediate early promoter, the HSV thymidine kinase promoter, the early and late SV40 promoters, the promoters of retroviral LTRs, such as those of the Rous sarcoma virus (“RSV”), and metallothionein promoters, such as the mouse metallothionein-I promoter.

[0089] Recombinant expression vectors will include, for example, origins of replication, a promoter preferably derived from a highly-expressed gene to direct transcription of a downstream structural sequence, and a selectable marker to permit isolation of vector containing cells after exposure to the vector.

[0090] Polynucleotides of the invention, encoding the heterologous structural sequence of a polypeptide of the invention generally will be inserted into the vector using standard techniques so that it is operably linked to the promoter for expression. The polynucleotide will be positioned so that the transcription start site is located appropriately 5′ to a ribosome binding site. The ribosome binding site will be 5′ to the AUG that initiates translation of the polypeptide to be expressed. Generally, there will be no other open reading frames that begin with an initiation codon, usually AUG, and lie between the ribosome binding site and the initiation codon. Also, generally, there will be a translation stop codon at the end of the polypeptide and there will be a polyadenylation signal in constructs for use in eukaryotic hosts. Transcription termination signal appropriately disposed at the 3′ end of the transcribed region may also be included in the polynucleotide construct.

[0091] For secretion of the translated protein into the lumen of the endoplasmic reticulum, into the periplasmic space or into the extracellular environment, appropriate secretion signals may be incorporated into the expressed polypeptide. These signals may be endogenous to the polypeptide or they may be heterologous signals.

[0092] The polypeptide may be expressed in a modified form, such as a fusion protein, and may include not only secretion signals but also additional heterologous functional regions. Thus, for instance, a region of additional amino acids, particularly charged amino acids, may be added to the N- or C-terminus of the polypeptide to improve stability and persistence in the host cell, during purification or during subsequent handling and storage. Also, regions also may be added to the polypeptide to facilitate purification. Such regions may be removed prior to final preparation of the polypeptide. The addition of peptide moieties to polypeptides to engender secretion or excretion, to improve stability or to facilitate purification, among others, are familiar and routine techniques in the art. A preferred fusion protein comprises a heterologous region from immunoglobulin that is useful to solubilize or purify polypeptides. For example, EP-A-O 464 533 (Canadian counterpart 2045869) discloses fusion proteins comprising various portions of constant region of immunoglobin molecules together with another protein or part thereof. In drug discovery, for example, proteins have been fused with antibody Fc portions for the purpose of high-throughput screening assays to identify antagonists. See, D. Bennett et al., Journal of Molecular Recognition, Vol. 8 52-58 (1995) and K. Johanson et al., The Journal of Biological Chemistry, Vol. 270, No. 16, pp 9459-9471 (1995).

[0093] Cells typically then are harvested by centrifugation, disrupted by physical or chemical means, and the resulting crude extract retained for further purification.

[0094] Microbial cells employed in expression of proteins can be disrupted by any convenient method, including freeze-thaw cycling, sonication, mechanical disruption, or use of cell lysing agents; such methods are well known to those skilled in the art.

[0095] Mammalian expression vectors may comprise expression sequences, such as an origin of replication, a suitable promoter and enhancer, and also any necessary ribosome binding sites, polyadenylation regions, splice donor and acceptor sites, transcriptional termination sequences, and 5′ flanking non-transcribed sequences that are useful or necessary for expression.

[0096] The polypeptide can be recovered and purified from recombinant cell cultures by well-known methods including ammonium sulfate or ethanol precipitation, acid extraction, anion or cation exchange chromatography, phosphocellulose chromatography, hydrophobic interaction chromatography, affinity chromatography, hydroxylapatite chromatography and lectin chromatography. Most preferably, high performance liquid chromatography is employed for purification. Well known techniques for refolding protein may be employed to regenerate active conformation when the polypeptide is denatured during isolation and or purification.

[0097] Polynucleotide Assays

[0098] This invention is also related to the use of the polynucleotides of the present invention to detect complementary polynucleotides such as, for example, as a diagnostic reagent. Detection of complementary nucleotides in a eukaryote, particularly a mammal, and especially a human, will provide a diagnostic method for diagnosis of a disease. Eukaryotes (herein also “individual(s)”), particularly mammals, and especially humans, infected with S. epidermidis may be detected at the DNA level by a variety of techniques. By selecting regions of nucleic acids that vary among strains of S. epidermidis, preferred candidates for distinguishing a specific strain of S. epidermidis can be obtained. Furthermore, by selecting regions of nucleic acids that vary between S. epidermidis and other organisms, preferred candidates for distinguishing a S. epidermidis from other organisms can be obtained. Nucleic acids for diagnosis may be obtained from an infected individual's cells and tissues, such as bone, blood, muscle, cartilage, and skin. Genomic DNA may be used directly for detection or may be amplified enzymatically by using PCR (Saiki et al., Nature, 324: 163-166 (1986) prior to analysis. RNA or cDNA may also be used in the same ways. As an example, PCR primers complementary to the nucleic acid forming part of the polynucleotide of the present invention can be used to identify and analyze for its presence and/or expression. Using PCR, characterization of the strain of S. epidermidis present in a mammal, and especially a human, may be made by an analysis of the genotype of the prokaryote gene. For example, deletions and insertions can be detected by a change in size of the amplified product in comparison to the genotype of a reference sequence. Point mutations can be identified by hybridizing amplified DNA to radiolabeled RNA or alternatively, radiolabeled antisense DNA sequences. Perfectly matched sequences can be distinguished from mismatched duplexes by RNase A digestion or by differences in melting temperatures.

[0099] Sequence differences between a reference gene and genes having mutations also may be revealed by direct DNA sequencing. In addition, cloned DNA segments may be employed as probes to detect specific DNA segments. The sensitivity of such methods can be greatly enhanced by appropriate use of PCR or another amplification method. For example, a sequencing primer can be used with double-stranded PCR product or a single-stranded template molecule generated by a modified PCR. The sequence determination is performed by conventional procedures with radiolabeled nucleotide or by automatic sequencing procedures with fluorescent-tags.

[0100] Genetic characterization based on DNA sequence differences may be achieved by detection of alteration in electrophoretic mobility of DNA fragments in gels, with or without denaturing agents. Small sequence deletions and insertions can be visualized by high resolution gel electrophoresis. DNA fragments of different sequences may be distinguished on denaturing formamide gradient gels in which the mobilities of different DNA fragments are retarded in the gel at different positions according to their specific melting or partial melting temperatures (see, e.g., Myers et al., Science, 230:1242 (1985)).

[0101] Sequence changes at specific locations also may be revealed by nuclease protection assays, such as RNase and S1 protection or the chemical cleavage method (e.g., Cotton et al., Proc. Natl. Acad. Sci., USA, 85: 4397-4401 (1985)).

[0102] Thus, the detection of a specific DNA sequence may be achieved by methods such as hybridization, RNase protection, chemical cleavage, direct DNA sequencing or the use of restriction enzymes, e.g., restriction fragment length polymorphisms (RFLP) and Southern blotting of genomic DNA.

[0103] In addition to more conventional gel-electrophoresis and DNA sequencing, mutations also can be detected by in situ analysis.

[0104] Cells carrying mutations or polymorphisms in the gene of the present invention may also be detected at the DNA level by a variety of techniques, to allow for serotyping, for example. For example, RT-PCR can be used to detect mutations. It is particularly preferred to use RT-PCR in conjunction with automated detection systems, such as, for example, GeneScan. RNA or cDNA may also be used for the same purpose, PCR or RT-PCR. As an example, PCR primers complementary to the nucleic acid encoding the polypeptide of the present invention can be used to identify and analyze mutations. The primers may be used to amplify the gene isolated from the individual such that the gene may then be subject to various techniques for elucidation of the DNA sequence. In this way, mutations in the DNA sequence may be diagnosed.

[0105] The invention provides a process for diagnosing disease, arising from infection with S. epidermidis, comprising determining from a sample isolated or derived from an individual an increased level of expression of a polynucleotide having the sequence of a polynucleotide set forth in the Sequence Listing. Increased expression of polynucleotide can be measured using any on of the methods well known in the art for the quantitation of polynucleotides, such as, for example, PCR, RT-PCR, RNase protection, Northern blotting and other hybridization methods.

[0106] Polypeptide Assays

[0107] The present invention also relates to diagnostic assays such as quantitative and diagnostic assays for detecting levels of the polypeptide of the present invention in cells and tissues, including determination of normal and abnormal levels. Thus, for instance, a diagnostic assay in accordance with the invention for detecting over-expression of the polypeptide compared to normal control tissue samples may be used to detect the presence of an infection, for example, and to identify the infecting organism. Assay techniques that can be used to determine levels of a polypeptide, in a sample derived from a host are well-known to those of skill in the art. Such assay methods include radioimmunoassays, competitive-binding assays, Western Blot analysis and ELISA assays. Among these, ELISAs frequently are preferred. An ELISA assay initially comprises preparing an antibody specific to the polypeptide, preferably a monoclonal antibody. In addition, a reporter antibody generally is prepared which binds to the monoclonal antibody. The reporter antibody is attached to a detectable reagent such as radioactive, fluorescent or enzymatic reagent, such as horseradish peroxidase enzyme.

[0108] Antibodies

[0109] The polypeptides, their fragments or other derivatives, or analogs thereof, or cells expressing them can be used as an immunogen to produce antibodies thereto. The present invention includes, for example, monoclonal and polyclonal antibodies, chimeric, single chain, and humanized antibodies, as well as Fab fragments, or the product of an Fab expression library.

[0110] Antibodies generated against the polypeptides corresponding to a sequence of the present invention can be obtained by direct injection of the polypeptides into an animal or by administering the polypeptides to an animal, preferably a nonhuman. The antibody so obtained will then bind the polypeptide itself. In this manner, even a sequence encoding only a fragment of the polypeptides can be used to generate antibodies binding the whole native polypeptides. Such antibodies can then be used to isolate the polypeptide from tissue expressing that polypeptide.

[0111] For preparation of monoclonal antibodies, any technique known in the art which provides antibodies produced by continuous cell line cultures can be used. Examples include various techniques, such as those in Kohler, G. and Milstein, C., Nature 256: 495-497 (1975); Kozbor et al., Immunology Today 4: 72 (1983); Cole et al., pg. 77-96 in MONOCLONAL ANTIBODIES AND CANCER THERAPY, Alan R. Liss, Inc. (1985); U.S. Pat. No. 5,545,403; U.S. Pat. No.5,545,405; U.S. Pat. No. 5,654,403; U.S. Pat. No. 5,792,838; U.S. Pat. No. 5,316,938; U.S. Pat. No. 5,633,162; U.S. Pat. No.5,644,036; U.S. Pat. No. 5,858,725.

[0112] Techniques described for the production of single chain antibodies (U.S. Pat. No.4,946,778) can be adapted to produce single chain antibodies to immunogenic polypeptide products of this invention. Also, transgenic mice, or other organisms such as other mammals, may be used to express humanized antibodies to immunogenic polypeptide products of this invention.

[0113] Alternatively, phage display technology could be utilized to select antibody genes with binding activities towards the polypeptide either from repertoires of PCR amplified v-genes of lymphocytes from humans screened for possessing anti-Fbp or from naive libraries (McCafferty, J. et al., (1990), Nature 348, 552-554; Marks, J. et al., (1992) Biotechnology 10, 779-783). The affinity of these antibodies can also be improved by chain shuffling (Clackson, T. et al., (1991) Nature 352, 624-628).

[0114] If two antigen binding domains are present, each domain may be directed against a different epitope—termed ‘bispecific’ antibodies.

[0115] The above-described antibodies may be employed to isolate or to identify clones expressing the polypeptide or purify the polypeptide of the present invention by attachment of the antibody to a solid support for isolation and/or purification by affinity chromatography.

[0116] Thus, among others, antibodies against the polypeptide of the present invention may be employed to inhibit and/or treat infections, particularly bacterial infections and especially infections arising from S. epidermidis.

[0117] Polypeptide derivatives include antigenically, epitopically or immunologically equivalent derivatives which form a particular aspect of this invention. The term “antigenically equivalent derivative” as used herein encompasses a polypeptide or its equivalent which will be specifically recognized by certain antibodies which, when raised to the protein or polypeptide according to the present invention, interfere with the immediate physical interaction between pathogen and mammalian host. The term “immunologically equivalent derivative” as used herein encompasses a peptide or its equivalent which when used in a suitable formulation to raise antibodies in a vertebrate, the antibodies act to interfere with the immediate physical interaction between pathogen and mammalian host.

[0118] The polypeptide, such as an antigenically or immunologically equivalent derivative or a fusion protein thereof can be used as an antigen to immunize a mouse or other animal such as a rat or chicken. The fusion protein may provide stability to the polypeptide. The antigen may be associated, for example by conjugation, with an immunogenic carrier protein, for example bovine serum albumin (BSA) or keyhole limpet haemocyanin (KLH). Alternatively, a multiple antigenic peptide comprising multiple copies of the protein or polypeptide, or an antigenically or immunologically equivalent polypeptide thereof, may be sufficiently antigenic to improve immunogenicity so as to obviate the use of a carrier.

[0119] Preferably the antibody or derivative thereof is modified to make it less immunogenic in the individual. For example, if the individual is human the antibody may most preferably be “humanized,” wherein the complimentarity determining region(s) of the hybridoma-derived antibody has been transplanted into a human monoclonal antibody, for example as described in Jones, P. et al. (1986), Nature 321, 522-525 or Tempest et al.,(1991) Biotechnology 9, 266-273.

[0120] The use of a polynucleotide of the invention in genetic immunization will preferably employ a suitable delivery method such as direct injection of plasmid DNA into muscle (Wolff et al., Hum Mol Genet 1992, 1:363, Manthorpe et al., Hum. Gene Ther. 1963:4, 419), delivery of DNA complexed with specific protein carriers (Wu et al., J Biol Chem 1989:264,16985), coprecipitation of DNA with calcium phosphate (Benvenisty & Reshef, PNAS, 1986:83,9551), encapsulation of DNA in various forms of liposomes (Kaneda et al., Science 1989:243,375), particle bombardment (Tang et al., Nature 1992, 356:152, Eisenbraun et al., DNA Cell Biol 1993, 12:791) and in vivo infection using cloned retroviral vectors (Seeger et al., PNAS 1984:81,5849).

[0121] Binding Molecules and Assays

[0122] This invention also provides a method for identification of molecules, such as binding molecules, that bind to the polypeptide of the present invention. Genes encoding proteins that bind to the polypeptide can be identified by numerous methods known to those of skill in the art, for example, ligand panning and FACS sorting. Such methods are described in many laboratory manuals such as, for instance, Coligan et al., Current Protocols in Immunology 1(2): Chapter 5 (1991). Also, a labeled ligand can be photoaffinity linked to a cell extract. Polypeptides of the invention also can be used to assess the binding capacity of a binding molecule, in cells or in cell-free preparations.

[0123] Polypeptides of the invention may also be used to assess the binding or small molecule substrates and ligands in, for example, cells, cell-free preparations, chemical libraries, and natural product mixtures. These substrates and ligands may be natural substrates and ligands or may be structural or functional mimetics.

[0124] The invention further provides a complex of a polypeptide and a binding molecule which comprises a polypeptide as described herein and a binding molecule capable of modulating the activity of the polypeptide. A complex of this kind can arise in vivo upon administration to a patient of a binding molecule as described herein.

[0125] Antagonists and Agonists—Assays and Molecules

[0126] The invention also provides a method of screening compounds to identify those which enhance (agonist) or block (antagonist) the function of polypeptides or polynucleotides of the present invention, such as its interaction with a binding molecule. The method of screening may involve high-throughput.

[0127] For example, to screen for agonists or antagonists, a synthetic reaction mix, a cellular compartment, such as a membrane, cell envelope or cell wall, or a preparation of any thereof, may be prepared from a cell that expresses a molecule that binds to the polypeptide of the present invention. The preparation is incubated with labeled polypeptide in the absence or the presence of a candidate molecule which may be an agonist or antagonist. The ability of the candidate molecule to bind the binding molecule is reflected in decreased binding of the labeled ligand. Molecules which bind gratuitously, i.e., without inducing the functional effects of the polypeptide, are most likely to be good antagonists. Molecules that bind well and elicit functional effects that are the same as or closely related to the polypeptide are good agonists.

[0128] The functional effects of potential agonists and antagonists may by measured, for instance, by determining activity of a reporter system following interaction of the candidate molecule with a cell or appropriate cell preparation, and comparing the effect with that of the polypeptide of the present invention or molecules that elicit the same effects as the polypeptide. Reporter systems that may be useful in this regard include but are not limited to colorimetric labeled substrate converted into product, a reporter gene that is responsive to changes in the functional activity of the polypeptide, and binding assays known in the art.

[0129] Another example of an assay for antagonists is a competitive assay that combines the polypeptide of the present invention and a potential antagonist with membrane-bound binding molecules, recombinant binding molecules, natural substrates or ligands, or substrate or ligand mimetics, under appropriate conditions for a competitive inhibition assay. The polypeptide can be labeled, such as by radioactivity or a colorimetric compound, such that the number of polypeptide molecules bound to a binding molecule or converted to product can be determined accurately to assess the effectiveness of the potential antagonist.

[0130] Potential antagonists include small organic molecules, peptides, polypeptides and antibodies that bind to a polypeptide of the invention and thereby inhibit or extinguish its activity. Potential antagonists also may be small organic molecules, a peptide, a polypeptide such as a closely related protein or antibody that binds to the same sites on a binding molecule without inducing functional activity of the polypeptide of the invention.

[0131] Potential antagonists include a small molecule which binds to and occupies the binding site of the polypeptide thereby preventing binding to cellular binding molecules, such that normal biological activity is prevented. Examples of small molecules include but are not limited to small organic molecules, peptides or peptide-like molecules.

[0132] Other potential antagonists include antisense molecules (see Okano, J. Neurochem. 56:560 (1991); OLIGODEOXYNUCLEOTIDES AS ANTISENSE INHIBITORS OF GENE EXPRESSION, CRC Press, Boca Raton, Fla. (1988), for a description of these molecules).

[0133] Preferred potential antagonists include derivatives of the polypeptide of the invention.

[0134] In a particular aspect, the invention provides the use of the polypeptide, polynucleotide or inhibitor of the invention to interfere with the initial physical interaction between a pathogen and mammalian host responsible for sequelae of infection. In particular the molecules of the invention may be used: i) in the prevention of adhesion of S. epidermidis to mammalian extracellular matrix proteins on in-dwelling devices or to extracellular matrix proteins in wounds; ii) to block protein mediated mammalian cell invasion by, for example, initiating phosphorylation of mammalian tyrosine kinases (Rosenshine et al., Infect Immun. 60:2211 (1992)); iii) to block bacterial adhesion between mammalian extracellular matrix proteins and bacterial proteins which mediate tissue damage; iv) to block the normal progression of pathogenesis in infections initiated other than by the implantation of in-dwelling devices or by other surgical techniques.

[0135] Each of the DNA coding sequences provided herein may be used in the discovery and development of antibacterial compounds. The encoded protein upon expression can be used as a target for the screening of antibacterial drugs. Additionally, the DNA sequences encoding the amino terminal regions of the encoded protein or Shine-Delgarno or other translation facilitating sequences of the respective mRNA can be used to construct antisense sequences to control the expression of the coding sequence of interest.

[0136] The antagonists and agonists may be employed, for instance, to inhibit diseases arising from infection with Staphylococcus, especially S. epidermidis, such as sepsis and endocarditis.

[0137] Vaccines

[0138] Another aspect of the invention relates to a method for inducing an immunological response in an individual, particularly a mammal, which comprises inoculating the individual with the polypeptide of the invention, or a fragment or variant thereof, adequate to produce antibody to protect said individual from infection, particularly bacterial infection and most particularly Staphylococcus infections. Yet another aspect of the invention relates to a method of inducing immunological response in an individual which comprises, through gene therapy or otherwise, delivering a nucleic acid functionally encoding the polypeptide, or a fragment or a variant thereof, for expressing the polypeptide, or a fragment or a variant thereof in vivo in order to induce an immunological response to produce antibodies or a cell mediated T cell response, either cytokine-producing T cells or cytotoxic T cells, to protect said individual from disease, whether that disease is already established within the individual or not. One way of administering the gene is by accelerating it into the desired cells as a coating on particles or otherwise.

[0139] A further aspect of the invention relates to an immunological composition which, when introduced into a host capable of having induced within it an immunological response, induces an immunological response in such host, wherein the composition comprises recombinant DNA which codes for and expresses an antigen of the polypeptide of the present invention. The immunological response may be used therapeutically or prophylactically and may take the form of antibody immunity or cellular immunity such as that arising from CTL or CD4+ T cells.

[0140] The polypeptide of the invention or a fragment thereof may be fused with co-protein which may not by itself produce antibodies, but is capable of stabilizing the first protein and producing a fused protein which will have immunogenic and protective properties. This fused recombinant protein preferably further comprises an antigenic co-protein, such as Glutathione-S-transferase (GST) or beta-galactosidase, relatively large co-proteins which solubilise the protein and facilitate production and purification thereof. Moreover, the co-protein may act as an adjuvant in the sense of providing a generalized stimulation of the immune system. The co-protein may be attached to either the amino or carboxy terminus of the first protein.

[0141] Provided by this invention are compositions, particularly vaccine compositions, and methods comprising the polypeptides or polynucleotides of the invention and immunostimulatory DNA sequences, such as those described in Sato, Y. et al. Science 273: 352 (1996).

[0142] Also, provided by this invention are methods using the described polynucleotide or particular fragments thereof which have been shown to encode non-variable regions of bacterial cell surface proteins in DNA constructs used in such genetic immunization experiments in animal models of infection with S. epidermidis. Such fragments will be particularly useful for identifying protein epitopes able to provoke a prophylactic or therapeutic immune response. This approach can allow for the subsequent preparation of monoclonal antibodies of particular value from the requisite organ of the animal successfully resisting or clearing infection for the development of prophylactic agents or therapeutic treatments of S. epidermidis infection in mammals, particularly humans.

[0143] The polypeptide may be used as an antigen for vaccination of a host to produce specific antibodies which protect against invasion of bacteria, for example by blocking adherence of bacteria to damaged tissue. Examples of tissue damage include wounds in skin or connective tissue caused e.g. by mechanical, chemical or thermal damage or by implantation of indwelling devices, or wounds in the mucous membranes, such as the mouth, mammary glands, urethra or vagina.

[0144] The present invention also includes a vaccine formulation which comprises the immunogenic recombinant protein together with a suitable carrier. Since the protein may be broken down in the stomach, it is preferably administered parenterally, including, for example, administration that is subcutaneous, intramuscular, intravenous, or intradermal. Formulations suitable for parenteral administration include aqueous and non-aqueous sterile injection solutions which may contain anti-oxidants, buffers, bacteriostats and solutes which render the formulation isotonic with the bodily fluid, preferably the blood, of the individual; and aqueous and non-aqueous sterile suspensions which may include suspending agents or thickening agents. The formulations may be presented in unit-dose or multi-dose containers, for example, sealed ampoules and vials, and may be stored in a freeze-dried condition requiring only the addition of the sterile liquid carrier immediately prior to use. The vaccine formulation may also include adjuvant systems for enhancing the immunogenicity of the formulation, such as oil-in-water systems and other systems known in the art. The dosage will depend on the specific activity of the vaccine and can be readily determined by routine experimentation.

[0145] While the invention has been described with reference to certain polypeptides, it is to be understood that this covers fragments of the naturally occurring protein and similar proteins with additions, deletions or substitutions which do not substantially affect the immunogenic properties of the recombinant protein.

[0146] Compositions

[0147] The invention also relates to compositions comprising the polynucleotide or the polypeptides discussed above or the agonists or antagonists. Thus, the polypeptides of the present invention may be employed in combination with a non-sterile or sterile carrier or carriers for use with cells, tissues or organisms, such as a pharmaceutical carrier suitable for administration to a subject. Such compositions comprise, for instance, a media additive or a therapeutically effective amount of a polypeptide of the invention and a pharmaceutically acceptable carrier or excipient. Such carriers may include, but are not limited to, saline, buffered saline, dextrose, water, glycerol, ethanol and combinations thereof. The formulation should suit the mode of administration.

[0148] Kits

[0149] The invention further relates to diagnostic and pharmaceutical packs and kits comprising one or more containers filled with one or more of the ingredients of the aforementioned compositions of the invention. The ingredient(s) can be present in a useful amount, dosage, formulation or combination. Associated with such container(s) can be a notice in the form prescribed by a governmental agency regulating the manufacture, use or sale of pharmaceuticals or biological products, reflecting approval by the agency of the manufacture, use or sale of the product for human administration.

Administration

[0150] Polypeptides and other compounds of the present invention may be employed alone or in conjunction with other compounds, such as therapeutic compounds.

[0151] The pharmaceutical compositions may be administered in any effective, convenient manner including, for instance, administration by topical, oral, anal, vaginal, intravenous, intraperitoneal, intramuscular, subcutaneous, intranasal or intradermal routes among others.

[0152] The pharmaceutical compositions generally are administered in an amount effective for treatment or prophylaxis of a specific indication or indications. In general, the compositions are administered in an amount of active agent of at least about 10 μg/kg body weight. In most cases they will be administered in one or more doses in an amount not in excess of about 8 mg/kg body weight per day. Preferably, in most cases, dose is from about 10 μg/kg to about 1 mg/kg body weight, daily. For administration particularly to mammals, and particularly humans, it is expected that the daily dosage level of the active agent will be from 0.01 mg/kg to 10 mg/kg and typically around 1 mg/kg. For example, a dose may be 1 mg/kg daily. It will be appreciated that optimum dosage will be determined by standard methods for each treatment modality and indication, taking into account the indication, its severity, route of administration, complicating conditions and the like. The physician in any event will determine the actual dosage which will be most suitable for an individual and will vary with the age, weight and response of the particular individual. The above dosages are exemplary of the average case. There can, of course, be individual instances where higher or lower dosage ranges are merited, and such are within the scope of this invention.

[0153] In therapy or as a prophylactic, the active agent may be administered to an individual as an injectable composition, for example as a sterile aqueous dispersion, preferably isotonic.

[0154] Alternatively the composition may be formulated for topical application, for example in the form of ointments, creams, lotions, eye ointments, eye drops, ear drops, mouthwash, impregnated dressings and sutures and aerosols, and may contain appropriate conventional additives, including, for example, preservatives, solvents to assist drug penetration, and emollients in ointments and creams. Such topical formulations may also contain compatible conventional carriers, for example cream or ointment bases, and ethanol or oleyl alcohol for lotions. Such carriers may constitute from about 1% to about 98% by weight of the formulation; more usually they will constitute up to about 80% by weight of the formulation.

[0155] The pharmaceutical composition may be administered in conjunction with an in-dwelling device. In-dwelling devices include surgical implants, prosthetic devices and catheters, i.e., devices that are introduced to the body of an individual and remain in position for an extended time. Such devices include, for example, artificial joints, heart valves, pacemakers, vascular grafts, vascular catheters, cerebrospinal fluid shunts, urinary catheters, continuous ambulatory peritoneal dialysis (CAPD) catheters, etc.

[0156] The composition of the invention may be administered by injection to achieve a systemic effect against relevant bacteria shortly before insertion of an in-dwelling device. Treatment may be continued after surgery during the in-body time of the device. In addition, the composition could also be used to broaden perioperative cover for any surgical technique to prevent Staphyloccocus wound infections.

[0157] Many orthopaedic surgeons consider that humans with prosthetic joints should be considered for antibiotic prophylaxis before dental treatment that could produce a bacteremia. Late deep infection is a serious complication sometimes leading to loss of the prosthetic joint and is accompanied by significant morbidity and mortality. It may therefore be possible to extend the use of the active agent as a replacement for prophylactic antibiotics in this situation.

[0158] In addition to the therapy described above, the compositions of this invention may be used generally as a wound treatment agent to prevent adhesion of bacteria to matrix proteins exposed in wound tissue and for prophylactic use in dental treatment as an alternative to, or in conjunction with, antibiotic prophylaxis.

[0159] Alternatively, the composition of the invention may be used to bathe an indwelling device immediately before insertion. The active agent will preferably be present at a concentration of 1 μg/ml to 10 mg/ml for bathing of wounds or indwelling devices.

[0160] A vaccine composition is conveniently in injectable form. Conventional adjuvants may be employed to enhance the immune response. A suitable unit dose for vaccination is 0.5-5 μg/kg of antigen, and such dose is preferably administered 1-3 times and with an interval of 1-3 weeks.

[0161] With the indicated dose range, no adverse toxicological effects should be observed with the compounds of the invention which would preclude their administration to suitable individuals.

[0162] The antibodies described above may also be used as diagnostic reagents to detect the presence of bacteria containing the protein.

[0163] In order to facilitate understanding of the following example certain frequently occurring methods and/or terms are explained in the foregoing glossary.

[0164] The present invention is further described by the following examples. While illustrating certain specific aspects of the invention, the examples do not portray the limitations or circumscribe the scope of the disclosed invention.

[0165] All examples were carried out using routine molecular biology techniques as generally described in standard laboratory manuals, such as Sambrook et al., MOLECULAR CLONING: A LABORATORY MANUAL, 2nd Ed.; Cold Spring Harbor Laboratory Press, Cold Spring Harbor, N.Y. (1989).

### EXAMPLES

[0166] A small insert plasmid library was generated in the minimal sequencing vector pOT2a (O. Hubbard, C. Martin, and M. Palazzolo, unpublished). pOT2a vector was prepared by BstXI digestion of the parent plasmid pOT2a-sacB followed by preparative agarose gel electrophoresis to separate the 1.6 kb vector fragment from a B. subtilis sacB gene fragment. To prepare inserts for library construction S. epidermidis SR1 strain genomic DNA was sonicated and the resulting random fragments were end-repaired with klenow and T4 polymerase and phosphorylated with T4 polynucleotide kinase. Oligos (5′-CTCTAAAG-3′, 5′-CTTTAGAGCACA-3′) (SEQ ID NO.:4465) to create BstX1 adaptors were annealed and ligated to the blunt-ended fragments. The configuration of the BstXI sites in pOT2a and the sequence of the adaptors allowed a ligation strategy that minimized the recovery of clones without insert (Seed, 1987). DNA samples were electrophoresed on a low-melting-temperature agarose gel and fragments of 3000-4000 bp were isolated and purified. The linearized vector and random DNA fragments were ligated overnight using T4 DNA ligase at 16 C and transformed into DH10B competent cells (Life Technologies Inc., Gaithersburg, Md.) by electroporation. Transformed bacteria were selected on LB agar plates containing 5% sucrose and 12.5 ug/ml chloramphenicol. Sequencing templates were isolated from single colonies and purified using R.E.A.L. Prep 96 Plasmid Kit (QIAGEN, Chatsworth, Calif.). Seq01 primer (5′-CACTATAGMCTCGAGCAGCTG-3′) (SEQ ID NO.:4466) and seq02 primer (5′-CGACTCACTATAGGGAGACCG-3′) (SEQ ID NO.:4467) were used to generate end-sequence using ABI Prism BigDye Terminators (PE Applied Biosystems, Foster City, Calif.).

[0167] Constructs from the pOT2a library were transformed into POX38 bacteria and selected on LB agar plates containing 12.5 ug/ml chloramphenicol. A single colony from each construct was used to inoculate an overnight culture. These POX38 cultures were mated with a culture of the F-bearing, kanamycin resistant JGM strain by combining the two strains and shaking for 3 hours at 37 C without antibiotics. Each successful mating event resulted in the random insertion of a single gamma-delta transposon into the pOT2a construct. This collection of transpositions was captured in the JGM cells by selection of the mated cultures on LB agar plates containing 12.5 ug/ml chloramphenicol and 25 ug/ml kanamycin. A transposon library was created for each of the original pOT2a library constructs by picking 96 individual colonies. A set of two PCR reactions was performed on each of the 96 library members to determine the position of the transposon integration. PM001 primer (5′- CGTTAGMCGCGGCTACA-3′) (SEQ ID NO.:4468) and NGDIR primer (5′-GTTCCATTGGCCCTCAAAC-3′) (SEQ ID NO.:4469) were used to determine the integration site distance from the left side of the vector and PM002 primer (5′-GCCGATTCATTAATGCAGGT-3′) (SEQ ID NO.:4470) and NGDIR primer were used to confirm the integration position by measuring the distance from the right side of the vector. PCR products were electrophoresed in 1× TBE on 1.4% agarose gels. After gel analysis, a subset of transposon clones was selected for sequencing based upon obtaining an integration site about every 300 bp along the full length of the pOT2a insert. Sequencing templates were purified using R.E.A.L. Prep 96 Plasmid Kit (QIAGEN, Chatsworth, Calif.). M21 primer (5′-GTAAAACGACGGCCAGT-3′) (SEQ ID NO.:4471) and rev primer (5′-CAGGAAACAGCTATGAC-3′) (SEQ ID NO.:4472) were used to generate internal sequence using ABI Prism BigDye Terminators (PE Applied Biosystems, Foster City, Calif.).

[0168] The sequences, including ORFs (nucleic acid sequences within SEQ ID NOs 1-3334 ) and non-ORFs (SEQ ID NOs 3335-4464 ) are set forth in the Sequence Listing. The non-ORF regions may be particularly useful as diagnostic sequences. The ribosomal RNA genes may also be useful to distinguish between species. Also, intergenic regions generally may be useful diagnostics to establish genus and species of an unidentified microbe, as there may be less selective pressure to maintain fidelity of the sequences in these intergenic regions as compared to intragenic regions.

[0169] About 26 different isolates of S. epidermidis have been submitted to ATCC listed in their on-line catalog, listed below:

| | | |
|---|---|---|
| 1: | ATCC Number: 146 Organism: | Staphylococcus epidermidis |
| 2: | ATCC Number: 33501 Organism: | Staphylococcus epidermidis |
| 3: | ATCC Number: 49741 Organism: | Staphylococcus epidermidis |
| 4: | ATCC Number: 51625 Organism: | Staphylococcus epidermidis |
| 5: | ATCC Number: 29997 Organism: | Staphylococcus epidermidis |
| 6: | ATCC Number: 19654 Organism: | Staphylococcus epidermidis |
| 7: | ATCC Number: 14389 Organism: | Staphylococcus sp. deposit |
| 8: | ATCC Number: 14852 Organism: | Staphylococcus epidermidis |
| 9: | ATCC Number: 49134 Organism: | Staphylococcus epidermidis |
| 10: | ATCC Number: 13518 Organism: | Staphylococcus epidermidis |
| 11: | ATCC Number: 9491 Organism: | Staphylococcus epidermidis |
| 12: | ATCC Number: 35547 Organism: | Staphylococcus epidermidis |
| 13: | ATCC Number: 35984 Organism: | Staphylococcus epidermidis |
| 14: | ATCC Number: 35983 Organism: | Staphylococcus epidermidis |
| 15: | ATCC Number: 700296 Organism: | Staphylococcus epidermidis |
| 16: | ATCC Number: 49461 Organism: | Staphylococcus epidermidis |
| 17: | ATCC Number: 29641 Organism: | Staphylococcus epidermidis |
| 18: | ATCC Number: 29887 Organism: | Staphylococcus epidermidis |
| 19: | ATCC Number: 29886 Organism: | Staphylococcus epidermidis |
| 20: | ATCC Number: 55133 Organism: | Staphylococcus epidermidis |
| 21: | ATCC Number: 27626 Organism: | Staphylococcus sp. deposit |
| 22: | ATCC Number: 31874 Organism: | Staphylococcus epidermid |
| 23: | ATCC Number: 14990 Organism: | Staphylococcus epidermid |
| 24: | ATCC Number: 155 Organism: | Staphylococcus sp. deposit |
| 25: | ATCC Number: 155-U Organism: | Staphylococcus sp. depos |
| 26: | ATCC Number: 12228 Organism: | Staphylococcus epidermid |

[0170] Throughout this application, various publications are referenced. These publications are hereby incorporated by reference in their entirety.

[0171] While the invention has been described with respect to certain specific embodiments, it will be appreciated that many modifications and changes may be made by those skilled in the art without departing from the spirit of the invention. It is intended, therefore, by the appended claims, to cover all such modification and changes as fall within the true spirit and scope of the invention.

1. An isolated polynucleotide comprising a member selected from the group consisting of:
(a) a polynucleotide encoding a polypeptide having at least a 70% identity to a polypeptide set forth in SEQ ID No. 4;
(b) a polynucleotide which is complementary to the polynucleotide of (a); and
(c) a polynucleotide comprising at least 15 sequential bases of the polynucleotide of (a) or (b).

2. The polynucleotide of claim 1 wherein the polypeptide has at least 80% identity to the polypeptide set forth in SEQ ID No. 4.

3. The polypeptide of claim 2 wherein the polypeptide has at least 90% identity to the polypeptide set forth in SEQ ID No. 4.

4. The polynucleotide of claim 1 wherein the polynucleotide is DNA.

5. The polynucleotide of claim 1 wherein the polynucleotide is RNA.

6. The polynucleotide of claim 4 wherein the polynucleotide has at least 80% identity to a polynucleotide set forth in SEQ ID No. 4.

7. The polynucleotide of claim 6 wherein the polynucleotide has at least 90% identity to a polynucleotide set forth in SEQ ID No. 4.

8. The polynucleotide of claim 4 comprising a polynucleotide set forth in SEQ ID No. 4.

9. (canceled)

10. (canceled)

11. A vector comprising the DNA of claim 4.

12. A host cell comprising the vector of claim 11.

13.-29. (canceled)

The application's sequence listing, which the Patent Office published only in electronic form, follows.

SEQUENCE LISTING (4472 sequences)

SEQ ID NO: 1 - DNA, 1246 bp, Artificial Sequence
  Description of Artificial Sequence: synthetic nucleic acid sequence
atgcaagctttacgagataaagtaggccaacaaaataacgttcaccaacaaagtaattatttcaatgaagatgaacaaccaaaacataactatgataattctgtacaagccggtcaaactattattgataaacttcaagatccaatcatgaacaaaaatgaaattgagcaggctattaatcaaatcaatacgactcaaacagcgttaagtggagaaaataaattacacactgaccaagaaagcacaaatagacaaatagaaggtttatctagtttgaacacagctcaaatcaacgccgaaaaagatttagtcaatcaagctaaaacaagaacagatgttgctcaaaagttagctacagctaaagaaataaattctgctatgagtaatttaagagatggcattcaaaataaagaggacatcaaacgtagcagtgcatatatcaacgcagatccgactaaagttacagcttacgatcaagcactacagaacgcagaaaatatcatcaatgccacaccaaacgtagagcttaataaagctacaattgaacaagcgctatcacgcgttcaacaagcacaacaagatcttgatggtgttcaacaattagctaatgctaaacaacaagctacacaaactgtcaatgggttaaatagcttaaatgacggtcaaaagcgtgaattaaatctattaattaattcagctaatacccgtacaaaagtacaagaagaattaaacaaagcaactgaatcgaaccatgcgatggaagctttaagaaacagtgttcaaaacgttgatcaagtaaaacaaagtaacaattatgtcaatgaagatcaacctgaacagcacaattatgataatgctgtcaatgaagctcaagctacaatcaacaacaatgctcaacctgttctagacaaattagctatagaacgtttaactcaaactgttaacactacaaaagatgcattacatggtactcaaaaactgatacaagaccaacaagctgctgaaactggaatacgtggtttaacgagtctcaatgaacctcagaaaaatgctgaagtagctaaagtaactgcagcaacaacacgtgatgaagtgagaaatattcgtcaagaagcaacaacattagatactgcaatgcttggtttacgtaaaagcattaaagataaaaacgatactaaaaatagtagtaaatatattaatgaggatcatgaccaacaacaagcttatgacaatgctgtaaataatg

SEQ ID NO: 2 - protein, 416 aa, Artificial Sequence
  Description of Artificial Sequence: synthetic amino acid sequence
  MOD_RES (416): variable amino acid
MQALRDKVGQQNNVHQQSNYFNEDEQPKHNYDNSVQAGQTIIDKLQDPIMNKNEIEQAINQINTTQTALSGENKLHTDQESTNRQIEGLSSLNTAQINAEKDLVNQAKTRTDVAQKLATAKEINSAMSNLRDGIQNKEDIKRSSAYINADPTKVTAYDQALQNAENIINATPNVELNKATIEQALSRVQQAQQDLDGVQQLANAKQQATQTVNGLNSLNDGQKRELNLLINSANTRTKVQEELNKATESNHAMEALRNSVQNVDQVKQSNNYVNEDQPEQHNYDNAVNEAQATINNNAQPVLDKLAIERLTQTVNTTKDALHGTQKLIQDQQAAETGIRGLTSLNEPQKNAEVAKVTAATTRDEVRNIRQEATTLDTAMLGLRKSIKDKNDTKNSSKYINEDHDQQQAYDNAVNNX

SEQ ID NO: 3 - DNA, 651 bp, Artificial Sequence
  Description of Artificial Sequence: synthetic nucleic acid sequence
atgaatcgtattgcccatagttatggtttacatgatacatacagttttgtgacatcaactgcaattattttctcattaaatgatcgtactagtacgaggttgattcgtattcgcgaacgtacaaccgatcttgagaaaattgctttaaccaatagcctatctcgtaaaatttcgagtaagcaacttacaattgacgaagcaaaaagtgagttactgcaacttaaacgtgcgtctcttcagtattctttcttaacaaatctcattgctgcctttgtagcttgtggttttttcttattcatgtttggtggcgtagcttccgacgcttggattgcatgcctagcgggtggcatagcttttttaacgtttagtttcgtgcaaaaatatatacaaattaaattcttttcagagtttgtagcatctgctgttgttattagtattgcagcaatattcactaaactaggtatagctaaaaatcaagacattattactattgcaagtgtcatgcctctcgttcccggtattttgattactaacgctattcgtgacttacttgccggagagttacttgctggtatgtcacgtggtgttgaagctgctttaactgcatttgctattggtgcaggagtagctattgtattactattattataa

SEQ ID NO: 4 - protein, 216 aa, Artificial Sequence
  Description of Artificial Sequence: synthetic amino acid sequence
MNRIAHSYGLHDTYSFVTSTAIIFSLNDRTSTRLIRIRERTTDLEKIALTNSLSRKISSKQLTIDEAKSELLQLKRASLQYSFLTNLIAAFVACGFFLFMFGGVASDAWIACLAGGIAFLTFSFVQKYIQIKFFSEFVASAVVISIAAIFTKLGIAKNQDIITIASVMPLVPGILITNAIRDLLAGELLAGMSRGVEAALTAFAIGAGVAIVLLLL

SEQ ID NO: 5 - DNA, 495 bp, Artificial Sequence
  Description of Artificial Sequence: synthetic nucleic acid sequence
atgtttatttatctgtttcactttatcattagtttcattgccacagtccttttttcaattatatttaatgcacctaaaaaattgctattagcttgtggatttgttggagctgttgcttggacaatatatcagatgacagtaggtatggatttaggtaaagttggcgcttcatttttaggaagtctaatattaggattaatgagtcatacaatgagtagacggtacaagcaacctgttattatatttatcgtccccggcattatacctctcgttccaggtggcgcagcatatgaagctacaagatttttagtatcaaataattatacgaatgcagttaatacttttttagaggtaacattaatttctggtgcaattgcattcggtatacttgtatctgaaatagtctattacatttattcacgcatcaagcaatcttatggtaaaatcaagggtaaaacttataaaaaatcctataatatgaataatagagtataa

SEQ ID NO: 6 - protein, 164 aa, Artificial Sequence
  Description of Artificial Sequence: synthetic amino acid sequence
MFIYLFHFIISFIATVLFSIIFNAPKKLLLACGFVGAVAWTIYQMTVGMDLGKVGASFLGSLILGLMSHTMSRRYKQPVIIFIVPGIIPLVPGGAAYEATRFLVSNNYTNAVNTFLEVTLISGAIAFGILVSEIVYYIYSRIKQSYGKIKGKTYKKSYNMNNRV

SEQ ID NO: 7 - DNA, 1086 bp, Artificial Sequence
  Description of Artificial Sequence: synthetic nucleic acid sequence
atggatgaacatggttacttatttgctacactcgaaagcaatattaattataatgtacctactgtcggttttttagcacatgtagacacttcaccagatttcaatgcttctcatgtaaatccgcaaatcattgaagcctataatgggcaacctatcaaacttggtgaatctcagcgtatcttagatcctgatgtttttcctgaattaaataaagttgtgggtcatacactaatggtgacagatggtacatctctactaggcgccgatgataaagcaggtgttgtagaaataatggaagggataaagtatttaattgatcatcctgacattaaacacggtacaattcgagttggctttacacccgatgaagaaattggacgaggcccgcatcaatttgatgttagtcgatttaatgcagattttgcatatacaatggatggcagtcaattaggagaactacaattcgaaagtttcaatgcggcagaggtaactgtcacttgccatggtgttaacgttcatccaggttcagctaaaaatgccatggttaatgcaattagtttaggtcaacagtttaatagtttacttccctcacatgaagtgcctgaaagaactgaaggatacgaagggttctatcatttaatgaattttacaggtaatgttgaaaaagcaactctacaatatattattcgcgaccatgacaaagaacagtttgagctacgtaaaaaacgcatgatggaaattcgtgatgatattaatgttcattataatcattttccaattaaagtagatgtgcatgaccaatattttaacatggcagaaaaaattgaacctttgaaacacatcattgatatacctaaacgtgtctttgaggctttagacatcgtacctaacactgaacctattcgaggtggtacagatggatcacaattatcttttatggggttacctacacctaatatttttactggttgtggcaatttccacggtccttttgaatacgcttctatcgatgtaatggaaaaggctgttcatgttgtcgttggtattgctcaagaagtagcaaacagccatcaatcttataaataa

SEQ ID NO: 8 - protein, 361 aa, Artificial Sequence
  Description of Artificial Sequence: synthetic amino acid sequence
MDEHGYLFATLESNINYNVPTVGFLAHVDTSPDFNASHVNPQIIEAYNGQPIKLGESQRILDPDVFPELNKVVGHTLMVTDGTSLLGADDKAGVVEIMEGIKYLIDHPDIKHGTIRVGFTPDEEIGRGPHQFDVSRFNADFAYTMDGSQLGELQFESFNAAEVTVTCHGVNVHPGSAKNAMVNAISLGQQFNSLLPSHEVPERTEGYEGFYHLMNFTGNVEKATLQYIIRDHDKEQFELRKKRMMEIRDDINVHYNHFPIKVDVHDQYFNMAEKIEPLKHIIDIPKRVFEALDIVPNTEPIRGGTDGSQLSFMGLPTPNIFTGCGNFHGPFEYASIDVMEKAVHVVVGIAQEVANSHQSYK

SEQ ID NO: 9 - DNA, 1005 bp, Artificial Sequence
  Description of Artificial Sequence: synthetic nucleic acid sequence
atgacaaaagtatattacgacgaaacagtaactcaggatgcattacaaggtaaaaaaattgctgtcattggttatggctcacaaggacatgcacatgcacaaaatttaaaggacaatggttatgatgtagtcattggcctgcgtccaggacgatcatttaataaagctaaagaagatggatttgatgtttatacggtaagtgaagcaacacaacaagcagatgtagtgatggtactattgcctgatgaaattcaaggtgaagtatataacaaggaaattaaaccatatttagaaaaaggaaatgctttagcattcgcacacggttttaatatccatttcagtgttatcgaaccacctagtgatgtcgatgtctttttagtagcacctaaaggacctggtcatttagttagacgtacatttgttgaaggaagtgccgtaccagcattatttggtgttcaacaagatgctacaggccaagctagaaacattgctttaagctacgcaaaaggcattggtgctactcgtgccggggtcattgaaacgacatttaaagaagaaactgaaacagatttattcggtgaacaagctgtactttgtggaggagtttccaaattaattcagagtggattcgaaacacttgtggaagcaggttaccaacctgaattagcttattttgaagtcttacacgaaatgaaattaattgttgatttaatgtatgaaggcggaatggaaaatgtccgttattctatctctaacactgctgaatttggcgactatgtttctggaccaagagtaattacacctaatgttaaagaaaatatgaaaaaagtacttgaagatattcaaaatggtaactttagccgtagatttgttgaagataacaaaaatggctttaaagaattctatcaattacgtgaagatcaacatggtcatcaaattgaacaagttggacgtgaattaagagaaatgatgccattcattaaatctaaaagtattgaaaaataa

SEQ ID NO: 10 - protein, 334 aa, Artificial Sequence
  Description of Artificial Sequence: synthetic amino acid sequence
MTKVYYDETVTQDALQGKKIAVIGYGSQGHAHAQNLKDNGYDVVIGLRPGRSFNKAKEDGFDVYTVSEATQQADVVMVLLPDEIQGEVYNKEIKPYLEKGNALAFAHGFNIHFSVIEPPSDVDVFLVAPKGPGHLVRRTFVEGSAVPALFGVQQDATGQARNIALSYAKGIGATRAGVIETTFKEETETDLFGEQAVLCGGVSKLIQSGFETLVEAGYQPELAYFEVLHEMKLIVDLMYEGGMENVRYSISNTAEFGDYVSGPRVITPNVKENMKKVLEDIQNGNFSRRFVEDNKNGFKEFYQLREDQHGHQIEQVGRELREMMPFIKSKSIEK

SEQ ID NO: 11 - DNA, 1545 bp, Artificial Sequence
  Description of Artificial Sequence: synthetic nucleic acid sequence
gtgtttttaatggaagaacatattcaaatttttgatacaacacttagagatggtgaacaaacgccaggagtcaattttacttttgatgaaagattaaaaattgccaagcaactagaaaaatggggagtagatgtactagaagcaggttttcctgcttctagtactggtagctttaaatcagtagaagctatagctaaaactttgactacaacagcagtgtgtggtttagctagatgtaaaaaatctgatattgatgctgtatatgaagccactaaagaagctgtaaaacctcaagtacatgtattcattgcaacctcccctattcatttagaacataaattaaaaatgactcaagatgaagttttaacatcaataaaagaacacgtttcttatgcaaaacaattttttgaagtcgtacaattctctccagaggatgcaacaagaactgaaattccatttttaattgaatgtgttcaaactgcgattaacgcaggagccacaattatcaacatccctgatacagttggatttagttatcctacagagtatggcgaaatttttaaacaattaacacaggccgttaagtcaaattctaaaattatctttagtgcacattgtcatgatgatctcggaatggcagttgctaatagtttagcagctattgaaggtggagctagacgtattgaaggtaccgtgaacggtattggtgaaagagcaggaaatgcctcacttgaagaagtcgctttggctttatatgtaaggaaggaccactatggtcttgaatctcaaattaaccttgaagaaactaagaaaacatctgacttaatttcaagatatgctggtatccgtgtacctagaaataaagctatagtcggtcaaaatgcatttagtcatgaatccggaattcaccaagacggtgtccttaaacatcgtgaaacctatgaaatcatgacacctcaacttgtaggtgtgaatacaacagaattgccactaggtaaattgtctggtaaacatgcatttgccgaaaagcttaaagctctgggatatgaaattaaattggaagatcaagttacattatttaaacaatttaaagaaattgccgataagaaaaaaaatgtatccgatagagatattcatgcgattatacatggctccgaacatgaacacaatgctatttttcaacttgataacttacaacttcaatacgtatctaaaggtctacaaagtgcagtagtagttataaaggaaagaaacggacaagttaaacaagattcaagtattggaacgggttcaattgttgcaatttataatgctgttgaccgaattttcaagaaagacgcagaattaattgattatcgtattgattctgtaacagaaggtactgatgctcaagcagaagtacatgtacgaatcattattaatcatattgaagtgacaggcataggtatagaccacgatatattaaaagcttcatgtaaagcatatatcgatgctcatgctaaatatatttcagaatatgagttgaaagaaggtatacgtacatga

SEQ ID NO: 12 - protein, 514 aa, Artificial Sequence
  Description of Artificial Sequence: synthetic amino acid sequence
VFLMEEHIQIFDTTLRDGEQTPGVNFTFDERLKIAKQLEKWGVDVLEAGFPASSTGSFKSVEAIAKTLTTTAVCGLARCKKSDIDAVYEATKEAVKPQVHVFIATSPIHLEHKLKMTQDEVLTSIKEHVSYAKQFFEVVQFSPEDATRTEIPFLIECVQTAINAGATIINIPDTVGFSYPTEYGEIFKQLTQAVKSNSKIIFSAHCHDDLGMAVANSLAAIEGGARRIEGTVNGIGERAGNASLEEVALALYVRKDHYGLESQINLEETKKTSDLISRYAGIRVPRNKAIVGQNAFSHESGIHQDGVLKHRETYEIMTPQLVGVNTTELPLGKLSGKHAFAEKLKALGYEIKLEDQVTLFKQFKEIADKKKNVSDRDIHAIIHGSEHEHNAIFQLDNLQLQYVSKGLQSAVVVIKERNGQVKQDSSIGTGSIVAIYNAVDRIFKKDAELIDYRIDSVTEGTDAQAEVHVRIIINHIEVTGIGIDHDILKASCKAYIDAHAKYISEYELKEGIRT

SEQ ID NO: 13 - DNA, 549 bp, Artificial Sequence
  Description of Artificial Sequence: synthetic nucleic acid sequence
gtgagaatcgcttttaatcttgcaaatcgtagacgtaaaaaattaacttctgttgataaggaaaacgttctatcctctagtaagttatggcgacaaatagtaaacgatgtaaaaaaggattatccagaagtagaagttaatcatatgctagttgatgcttgtagcatgcatctgatcactcaacctacgcaatttgatgtgattgtaacagagaatcttttcggagatattttaagtgatgaagcatctgttataccagggtctctaggtctttctccatcagctagttttggtcaaacaggtacacgtctttatgaaccaattcatggttcagcaccagatatagctaatgaagataaagcgaatccatttggtatggttctatctttagcactttgcttaagagaaagtttaaatcaaaatgatgctgctaacgaacttgagtcaattgtttactcgtttattcaatctaataagacaactgcagatttaggtggacaatatcgaacttcagaaatttttaaattgcttaaagaaaaatatctataa

SEQ ID NO: 14 - protein, 182 aa, Artificial Sequence
  Description of Artificial Sequence: synthetic amino acid sequence
VRIAFNLANRRRKKLTSVDKENVLSSSKLWRQIVNDVKKDYPEVEVNHMLVDACSMHLITQPTQFDVIVTENLFGDILSDEASVIPGSLGLSPSASFGQTGTRLYEPIHGSAPDIANEDKANPFGMVLSLALCLRESLNQNDAANELESIVYSFIQSNKTTADLGGQYRTSEIFKLLKEKYL

SEQ ID NO: 15 - DNA, 363 bp, Artificial Sequence
  Description of Artificial Sequence: synthetic nucleic acid sequence
atgggtcaaacactgtttgataaagtatggaaaaaacatgtgcttcatggaaaagaaggtgaaccacaattattatacattgatttacatctcattcatgaagtcacttctcctcaagcgtttgaaggacttagaatacaaaatcgtaaactcagaagacctgatctaacctttgcaactttagatcataacgttcccacaattgatatttttaatataaaagatgaaattgctaataaacaaattacaactttacaacaaaatgctaaggactttggtgtacatatttttgatatgttactcataattgtcttaagtggacttaacgtatatcttatcattcaaacattccaagaattatga

SEQ ID NO: 16 - protein, 120 aa, Artificial Sequence
  Description of Artificial Sequence: synthetic amino acid sequence
MGQTLFDKVWKKHVLHGKEGEPQLLYIDLHLIHEVTSPQAFEGLRIQNRKLRRPDLTFATLDHNVPTIDIFNIKDEIANKQITTLQQNAKDFGVHIFDMLLIIVLSGLNVYLIIQTFQEL

SEQ ID NO: 17 - DNA, 1077 bp, Artificial Sequence
  Description of Artificial Sequence: synthetic nucleic acid sequence
atgtcagaaaaagtaaaattcgaaaaaagagagtctttaaaagaaaaacctgatacagcaaacttaggatttggacaatatttcacagactatatgttaagtgttgattatgacgctgatcaaggatggcatgatatgaagattgtgccgtacgcaccatttgaaatttcaccagcagcgcaagggttacattatggtcaggcagtttttgaaggccttaaagcctataaacataatggagaagttgtattattccgcccagatcaaaacttcaaacgtattaataattctttagcacgtttagaaatgccagaagttgatgaagaagcattattagaagggttgaagcagcttatcgacgttgaacgagattgggtacctgaaggcgaaggtcaatcgttatatattcgtccttttgtatttgctactgaaggtgttttgggtgtacgttcttcacatcaatataaattactaattattttatctccgtcaggcgcttattatggtggtgacacattaaagtcaactaaaatttatgtcgaagatgaatatgtacgtgcagtacgtggaggtgtaggtttcgctaaagttgcaggtaactatgctgccagcttactcgcacaaacaaacgctaataaattaggttatgaccaagtattgtggcttgatggtgttgaacaaaaatatgttgaagaagttggtagtatgaatattttcttcgtagaaaatggaaaagtagttacgccagcattaaacggtagtatcttgcctggtatcactagaaagtcaattattcaattagctgaagatttaggttatgaagttgaagagagaagagtttctatagaagagctgtttaacgcatatgataaaggtgaacttacagaagtatttggttcaggtacagcagctgttatctctcctgtaggtacacttcgctatgaagatagagaaattgttattaataacaatgaacctggtaaaatcactcaaaaattatatgacacatatactggtattcaaagtggcaaattagaagataaatacggatggagagtagaagttcctaagtattaa

SEQ ID NO: 18 - protein, 358 aa, Artificial Sequence
  Description of Artificial Sequence: synthetic amino acid sequence
MSEKVKFEKRESLKEKPDTANLGFGQYFTDYMLSVDYDADQGWHDMKIVPYAPFEISPAAQGLHYGQAVFEGLKAYKHNGEVVLFRPDQNFKRINNSLARLEMPEVDEEALLEGLKQLIDVERDWVPEGEGQSLYIRPFVFATEGVLGVRSSHQYKLLIILSPSGAYYGGDTLKSTKIYVEDEYVRAVRGGVGFAKVAGNYAASLLAQTNANKLGYDQVLWLDGVEQKYVEEVGSMNIFFVENGKVVTPALNGSILPGITRKSIIQLAEDLGYEVEERRVSIEELFNAYDKGELTEVFGSGTAAVISPVGTLRYEDREIVINNNEPGKITQKLYDTYTGIQSGKLEDKYGWRVEVPKY

SEQ ID NO: 19 - DNA, 717 bp, Artificial Sequence
  Description of Artificial Sequence: synthetic nucleic acid sequence
atgatttatgcgggtatattagcaggtggtattggttctagaatgggaaatgttccattacccaaacaatttttatcattacaaggaaaacctattattattcatacagtagaaaaatttttaatgtataaggactttgatgaaatcatcattgccacgcctcaaaagtggatcaattatatgctcgatttgctaaacaattatcaattagacgataagaaaataaaagtaatacaaggcggagacgaccgaaatcactctataatgaatattatagaaagcattgagcaacataaaaaattaaatgatgaagatataatcgttacccatgatgcagttaggccatttctaacaaatcgaattattagagagaatgtggaatatgccagtcaatatggtgcagtagatacggttgttaatgctgttgatactatcatttcttcaaatgatgcacaatttatttctgggattccaataagaagtgagatgtatcaaggacagacgcctcaaacttttaaaataaaagagttaaaggatagctatttatcgttaactcaatctcaaaaggaaatattaactgacgcgtgtaaaatactcgtagaattgggtaagccagtaaaattagtcaaaggagagttatttaacataaaaataacaacaccatatgatttaaaagttgcgaattcaattattactggagctgttgataatgattaa

SEQ ID NO: 20 - protein, 238 aa, Artificial Sequence
  Description of Artificial Sequence: synthetic amino acid sequence
MIYAGILAGGIGSRMGNVPLPKQFLSLQGKPIIIHTVEKFLMYKDFDEIIIATPQKWINYMLDLLNNYQLDDKKIKVIQGGDDRNHSIMNIIESIEQHKKLNDEDIIVTHDAVRPFLTNRIIRENVEYASQYGAVDTVVNAVDTIISSNDAQFISGIPIRSEMYQGQTPQTFKIKELKDSYLSLTQSQKEILTDACKILVELGKPVKLVKGELFNIKITTPYDLKVANSIITGAVDND

SEQ ID NO: 21 - DNA, 660 bp, Artificial Sequence
  Description of Artificial Sequence: synthetic nucleic acid sequence
atgaaacctgatagagtagtcactttaccacaagaaattgatttgagtgtagcgtcgtatactgaattagttacagttagtgttcatgcaatagatcgttttcaatcaaaagcaataccacaatttgaatcattggggatatggggagacggtaatttagggtatatcactgcagttttactaaaaaaactatatcctactacaaaaataatagtttttggaaaaacattatataaattaagccgtttttcatttgtagatgaaattattcaaattgacaatattcctcaacatatcaaaattgatcatgcatttgaatgcgtgggtggtaaaggaagtcagcaggctattgaacaaattattaatattattaatcctgaagggagtatcgctttattaggagtgagcgaactgcctatacaagtgaatacaagaatggttttagaaaaaggtttaactataattggtagtagcagaagtggtttaaaggattttgaaaaaactattgaattgtatcgtaaatatcctgaagttcttaatcaattagcattacttaaaggtaaagaatttgaaataaataccatagaagatctcattacagcgttcgaatatgatatttctaacgcatggggaaaaacagttttaaaatggaatatttaa

SEQ ID NO: 22 - protein, 219 aa, Artificial Sequence
  Description of Artificial Sequence: synthetic amino acid sequence
MKPDRVVTLPQEIDLSVASYTELVTVSVHAIDRFQSKAIPQFESLGIWGDGNLGYITAVLLKKLYPTTKIIVFGKTLYKLSRFSFVDEIIQIDNIPQHIKIDHAFECVGGKGSQQAIEQIINIINPEGSIALLGVSELPIQVNTRMVLEKGLTIIGSSRSGLKDFEKTIELYRKYPEVLNQLALLKGKEFEINTIEDLITAFEYDISNAWGKTVLKWNI

SEQ ID NO: 23 - DNA, 1449 bp, Artificial Sequence
  Description of Artificial Sequence: synthetic nucleic acid sequence
atgacaaagcaaaatatatttatagatgacatttattgggaacgtgtccaactcttcgtcaaaggacattttgaaggagtaaaacctacaagaaatttccttcttagaaatctaacagaaacaaaactattaaatgccaatcatgttaatattcaagggtcaacttttgaggcaagatttaatattgctattttagaaaaaggtaattttttaggtacaggcaattatatattaatcaaccgacaagaagatgaatatgtctgccaaattaaccccaaatttttgaatgataaaaaaaatcagatgactttagaggagttaagagattacaactcacttgagacccaatcgttacaaaaaagttatttattaaaaaagtatggtaaaagtttccaaagatataataacaaagagattaaatcttacgtcattgttccggcaatatcccaagaaattaatgagtttatttttaaagttcaatataaatctgaaataaagaaaataagtaaacttaagcaattatcatacatattacataaagctttgaggaaaattagcttcaatgtgagagataaaatatatttgtcggtatttaacatttccaaaacagtatataagaataataaaaatcatgttttgtttacatcagattctagagcaaatatgtcaggaaattttaaatttatatacgaagaaatgcttaaacaacaattggacaaaaaacttgtcattcattctatttttaaacctaatatagcaaataggagatcgtttattgataaattaaaatttccatattttttaggaaaatctaaatatatcttggttgatgattatcatccgatgatatataaacttcaatttagagaaaaccaagaaatagttcaagtatggcatgctgtgggtgcttttaagactgtaggatttagtagaactgggaaaaaaggaggacctttcatagactctattggacataggaattatagtaaagcttatgtttcgtcaaataatgatattctttactatgctgaagcttttggaattgaagaacatagggttattccaacaggtgttccacgtacggatgttttgttcgatgaatcttataaaacacgcattaaacaaagtttagaaacaaaattaccaattataaaaaataaaaaagtcattctttttgcacctacatttagaggaaatggacatcgcacagcacactatcctttctttaaaattaattttgcaagattagctagttattgtgaagaacatcaagctactgttctgtttaaaatgcatccttttgttagaaataaattaaatatcccagcaatttatagtaaatattttttagatatttcaaattaccgcgaagtaaatgatgtattgttcattacggatattttaatctctgattattcttctttaatctatgaattttccagtttttaa

SEQ ID NO: 24 - protein, 482 aa, Artificial Sequence
  Description of Artificial Sequence: synthetic amino acid sequence
MTKQNIFIDDIYWERVQLFVKGHFEGVKPTRNFLLRNLTETKLLNANHVNIQGSTFEARFNIAILEKGNFLGTGNYILINRQEDEYVCQINPKFLNDKKNQMTLEELRDYNSLETQSLQKSYLLKKYGKSFQRYNNKEIKSYVIVPAISQEINEFIFKVQYKSEIKKISKLKQLSYILHKALRKISFNVRDKIYLSVFNISKTVYKNNKNHVLFTSDSRANMSGNFKFIYEEMLKQQLDKKLVIHSIFKPNIANRRSFIDKLKFPYFLGKSKYILVDDYHPMIYKLQFRENQEIVQVWHAVGAFKTVGFSRTGKKGGPFIDSIGHRNYSKAYVSSNNDILYYAEAFGIEEHRVIPTGVPRTDVLFDESYKTRIKQSLETKLPIIKNKKVILFAPTFRGNGHRTAHYPFFKINFARLASYCEEHQATVLFKMHPFVRNKLNIPAIYSKYFLDISNYREVNDVLFITDILISDYSSLIYEFSSF

SEQ ID NO: 25 - DNA, 1188 bp, Artificial Sequence
  Description of Artificial Sequence: synthetic nucleic acid sequence
atggaagaagtgatacatgtgtttgattggtttcaattagcaagtaataaagaaaagagaatggtgcaattacgacgatatttgcatcaatacccagaactttcttttgaggaaaaacgtacgcatgattttattgtaaatcaattgagccaattagcatgcaccatagaaacaccagttggacgtaatggtataaaagcaacttttaaaggatctgattcaaatggaccaacgattgcattacgagcagatttcgatgcactacctgttcaagaattaaatgatgtaccctatcgttcaaaaaataaagggtgcatgcatgcttgtggacatgacggacatacagctattttgcttggagtagctgaaattgttcatgagcatcgtcatttattgaaaggtaatgttgtttttatattccaatatggtgaggaaattatgccaggtggttctcaagagatgattgatgatggctgtctacagaatgtcgataaaatatatggcacacacttatggagtggttatccatctgggacaatctattctagacctggagcaataatggcttcaccagatgaatttagtgtgactatatatggaaaaggtggtcacggtgcaaaaccacacgaaacaatagaccctattgtcattatggctgagtttattttaagtgcccaaaaaataatttctcgaacaattgatccagtaaaggaagctgttcttactttcggaatgattcaagcaggatcaacagatagtgttattccagatacagctttttgtaaaggtactgtacgtacttttgacacaaaattacaaagtcatgttcaaaataaaatggataagctcttacaaggtttatctttatcaaacgatattacatatgaattggaatatattaaaggttatttaccagtacacaatcatcaacaatcatatgatgtagtcaaacaagcagctaatgatttacatttaagatttaatgagtcagacttaatgatgattggtgaggacttttcacattaccttaaagtacgacctggtgcattcttcttaactggttgtggtaataaagacaaaggcattactgcacctcatcataatcctcattttgacattgatgaatcttcattaaaatatgcagctagtgaatttttaaaaatattagaaattgaaaatgttttttaa

SEQ ID NO: 26 - protein, 395 aa, Artificial Sequence
  Description of Artificial Sequence: synthetic amino acid sequence
MEEVIHVFDWFQLASNKEKRMVQLRRYLHQYPELSFEEKRTHDFIVNQLSQLACTIETPVGRNGIKATFKGSDSNGPTIALRADFDALPVQELNDVPYRSKNKGCMHACGHDGHTAILLGVAEIVHEHRHLLKGNVVFIFQYGEEIMPGGSQEMIDDGCLQNVDKIYGTHLWSGYPSGTIYSRPGAIMASPDEFSVTIYGKGGHGAKPHETIDPIVIMAEFILSAQKIISRTIDPVKEAVLTFGMIQAGSTDSVIPDTAFCKGTVRTFDTKLQSHVQNKMDKLLQGLSLSNDITYELEYIKGYLPVHNHQQSYDVVKQAANDLHLRFNESDLMMIGEDFSHYLKVRPGAFFLTGCGNKDKGITAPHHNPHFDIDESSLKYAASEFLKILEIENVF

SEQ ID NO: 27 - DNA, 1746 bp, Artificial Sequence
  Description of Artificial Sequence: synthetic nucleic acid sequence
atgggtggtattgctatacataaaggtgatattgcagaaatgagaacaggtgaagggaaaacattgactgcaaccatgccgacgtatttgaatgctttagctggtagaggtgtacatgttattacagtcaatgaatatctatcaagttcacaaagtgaagaaatggctgaactatataactatcttggcttaactgtaggtttgaacttaaatagtaagtcaactgaagaaaaacgtgaggcttacgcacaagatatcacttatagtacgaataatgaacttgggtttgattatcttagagataatatggtgaactatgctgaagagagagtaatgcgtcctctacattttgcaattattgatgaggtcgattccatattgatcgacgaagcaagaacacctttaattatttctggtgaagcggaaaaatctacttctttatatactcaagcaaatgtttttgcaaaaatgcttaaagcggaagatgattataattatgatgaaaaaaccaaagctgtacatcttacagaacaaggtgcagataaagctgaacgtatgttcaaagtagataatctttatgatgttcaaaatgtggaagtgattagtcatattaatacagctttaagagctcatgttactttgcaacgcgatgttgattacatggtcgttgacggtgaagtattaattgttgaccaatttactggacgtacaatgcctggacgtcgtttttctgaaggtttacaccaagcaattgaggctaaagaaggtgtagcaattcaaaatgagtctaaaacgatggcatccattactttccaaaactatttcagaatgtataataagttagcggggatgactggtacagcgaaaaccgaagaggaagaatttcgtaatatctataatatgacagttacccaaattccaacaaacaaacctgttcaacgtaaagataattcagacttaatttatattagtcaaaaaggaaagtttgatgcggtagttgaagatgttgtagaaaaacataaaaaaggacaacccgtcttactaggtactgttgctgttgagacttctgaatatatttcaaatttactaaaaaaacgtggtgtcagacatgacgtattaaacgctaaaaatcatgaacgcgaagctgaaatcgtttcaaacgcggggcaaaaaggtgcagttacaattgccacaaatatggctggacgtggaacagatattaaacttggtgatggtgttgaagagttaggtggacttgctgttattggtactgagcgtcatgaatcaagacgtattgatgatcaattacgtggacgttcaggacgccaaggtgatagaggagatagtcgtttttacctatctttacaagatgaattaatggtacgttttggttcagaacgcttacagaaaatgatgaaccgtttaggaatggatgattcaacgccaatcgagtcgaaaatggtatctcgagctgtagaatcagctcaaaaacgagtagaaggtaataactttgacgcgcgtaaacgtattctagaatacgatgaagttttacgtaagcaacgtgaaattatttataatgagcgtaatgaaatcattgatagtgaagaaagttctcaagtcgttaacgcgatgttacgttctacattgcaacgtgcgattaatcattttattaatgaagaagacgataatcctgactacacgccatttatcaattacgttaatgatgtgttcttgctgaattattaa

SEQ ID NO: 28 - protein, 581 aa, Artificial Sequence
  Description of Artificial Sequence: synthetic amino acid sequence
MGGIAIHKGDIAEMRTGEGKTLTATMPTYLNALAGRGVHVITVNEYLSSSQSEEMAELYNYLGLTVGLNLNSKSTEEKREAYAQDITYSTNNELGFDYLRDNMVNYAEERVMRPLHFAIIDEVDSILIDEARTPLIISGEAEKSTSLYTQANVFAKMLKAEDDYNYDEKTKAVHLTEQGADKAERMFKVDNLYDVQNVEVISHINTALRAHVTLQRDVDYMVVDGEVLIVDQFTGRTMPGRRFSEGLHQAIEAKEGVAIQNESKTMASITFQNYFRMYNKLAGMTGTAKTEEEEFRNIYNMTVTQIPTNKPVQRKDNSDLIYISQKGKFDAVVEDVVEKHKKGQPVLLGTVAVETSEYISNLLKKRGVRHDVLNAKNHEREAEIVSNAGQKGAVTIATNMAGRGTDIKLGDGVEELGGLAVIGTERHESRRIDDQLRGRSGRQGDRGDSRFYLSLQDELMVRFGSERLQKMMNRLGMDDSTPIESKMVSRAVESAQKRVEGNNFDARKRILEYDEVLRKQREIIYNERNEIIDSEESSQVVNAMLRSTLQRAINHFINEEDDNPDYTPFINYVNDVFLLNY

SEQ ID NO: 29 - DNA, 1506 bp, Artificial Sequence
  Description of Artificial Sequence: synthetic nucleic acid sequence
atgatatattctatcggtaagaatttaggtaataaattaacaggtatagaacaagctatgatcaatagattaaagctatttaaagataatttagtcccaaataaactcatattcacatcttggtcaccacgtttatatatgcatgcacattcgttaaacatcgattcaaaagatattttcagtctttacgattttctacaagatagtattaactttgagaaaaaacatattgattggataaattattggcaaaatatatgtaattataccttaaaattcgttgaaaatacgaatgatattaaaatatacgataacgacacatataaaatgtatgtgcattttgttgattcaaattatcaaactttagactatattaaccattttgatatacaacaacgtaaaattcgaagagatttttacgatacaagaggctttttaagttgtagtagaattttaacctctcaacaaaaagtcgtgatggaacaattttttacacctacacaaaaagttaaatttcaaaaatattacaaccctgagcacgaacatcctacggtacaatctatcatttataatacttcacgagacgttcgttttttcaacgatgaaaatgaacttttagcgtttgcaattaatgcgctatatcatttaggagacgtatttttatgtgataaaaacatcgttacagggccaatcattgatcaaactgatactaaaataccagttctcgccgttttccacagtacccacgtaaaaaatatcaatgatatatatcattctgaaatcaaacaagcgtataaacctgttttagataacttatcccgatattcaggaatcatagtatctactgaacaacaaaaaacagatttatctgtaaaaattaataacgttattcccatttacgttatacctgcaggttatattgatacaaatgaatctcatcatagtagtgacaataaaccattgcctaacaaaatgatttctatcggccgttattctcctgaaaagcaattagatcatcaaatagaactaatgtctaagctagttccagcatttccaaatttacagttacatttatttgggtttggtaaagaagaaacacattatcgtaaattaatagctcaatatcatttagaaaatcacgtgtttttacgtggcttcatttatgatttaaatcaagaaatagagaccgcctatttatctttattgacaagtaaaatggaagggttcaatttaggtgtacttgaaacgattgctaaaggcgtacctacagtaagttatgataccaaatacggaccttctgagttaattgttaatcataaaaatggctttttaattgaacaagataataaagaacaactctatcacagcgttaaaaagttattactcgattctaacttaagagaacaattttctaaggaaagtattaaacatgcccaaatatttaatgacaaaaatgtttttgatacatggctcactgttttcagaacgttaaaagttaatttataa

SEQ ID NO: 30 - protein, 501 aa, Artificial Sequence
  Description of Artificial Sequence: synthetic amino acid sequence
MIYSIGKNLGNKLTGIEQAMINRLKLFKDNLVPNKLIFTSWSPRLYMHAHSLNIDSKDIFSLYDFLQDSINFEKKHIDWINYWQNICNYTLKFVENTNDIKIYDNDTYKMYVHFVDSNYQTLDYINHFDIQQRKIRRDFYDTRGFLSCSRILTSQQKVVMEQFFTPTQKVKFQKYYNPEHEHPTVQSIIYNTSRDVRFFNDENELLAFAINALYHLGDVFLCDKNIVTGPIIDQTDTKIPVLAVFHSTHVKNINDIYHSEIKQAYKPVLDNLSRYSGIIVSTEQQKTDLSVKINNVIPIYVIPAGYIDTNESHHSSDNKPLPNKMISIGRYSPEKQLDHQIELMSKLVPAFPNLQLHLFGFGKEETHYRKLIAQYHLENHVFLRGFIYDLNQEIETAYLSLLTSKMEGFNLGVLETIAKGVPTVSYDTKYGPSELIVNHKNGFLIEQDNKEQLYHSVKKLLLDSNLREQFSKESIKHAQIFNDKNVFDTWLTVFRTLKVNL

SEQ ID NO: 31 - DNA, 756 bp, Artificial Sequence
  Description of Artificial Sequence: synthetic nucleic acid sequence
atgaatctgagtcactgtctgcgtccgaatcactatctgcgtcggagtcgctatctgaatcggaatcactatctgcgtctgagtcgctatctgaatcggaatcactgtcggagtctgagtcactgtctgaatccgagtcactgtctgaatcggaatccgaatcgctgtctgaatccgagtcactgtctgaatctgagtcactgtctgcgtccgaatcactatcagaatccgagtcgctgtctgcgtccgaatcactgtctgaatctgagtcactgtctgcgtccgaatcactgtcagaatccgagtcgctgtctgcatccgaatcactatctgaatccgagtcgctgtctgcatccgaatcactatctgaatccgagtcgctatctgcatccgaatcactatctgcgtctgagtcactgtctgcgtccgaatcactatctgcgtctgagtcactgtctgaatcggaatccgaatcactatcagaatccgagtcgctgtctgagtcagaatcactatctgaatctgagtcactgtctgcgtcagaatcactatctgcgtctgagtcactgtctgaatcggaatccgaatcactatcagaatccgagtcgctgtctgagtcagaatcactatctgaatctgagttactgtctgcgtcagaatcgctgtctgcgtccgagtcactgtcggagtctgaatcactatctgcgtctgagtcactgtctgaatcatcgtcaaaataaccattatctatactaa

SEQ ID NO: 32 - protein, 251 aa, Artificial Sequence
  Description of Artificial Sequence: synthetic amino acid sequence
MNLSHCLRPNHYLRRSRYLNRNHYLRLSRYLNRNHCRSLSHCLNPSHCLNRNPNRCLNPSHCLNLSHCLRPNHYQNPSRCLRPNHCLNLSHCLRPNHCQNPSRCLHPNHYLNPSRCLHPNHYLNPSRYLHPNHYLRLSHCLRPNHYLRLSHCLNRNPNHYQNPSRCLSQNHYLNLSHCLRQNHYLRLSHCLNRNPNHYQNPSRCLSQNHYLNLSYCLRQNRCLRPSHCRSLNHYLRLSHCLNHRQNNHYLY

SEQ ID NO: 33 - DNA, 441 bp, Artificial Sequence
  Description of Artificial Sequence: synthetic nucleic acid sequence
gtgacggataccaatgcgatggtagatagcttcaatcctgatttaaatagttctaatgtaaaagatgtgacaagtcaatttacacctaaagtaagtgcagatggtactagagttgatatcaattttgctagaagtatggcaaatggtaaaaagtatattgtaactcaagcagtgagaccaacgggaactggaaatgtttataccgaatattggttaacaagagatggtactaccaatacaaatgatttttatcgtggaacgaagtctacaacggtgacttatctcaatggttcttcaacagcacagggggataatcctacatatagtctaggtgactatgtatggttagataaaaataaaaacggtgttcaagatgatgatgagaaaggtttagcactgagagatcccctcataatttccccaaagcgtaaccatgtgtga

SEQ ID NO: 34 - protein, 146 aa, Artificial Sequence
  Description of Artificial Sequence: synthetic amino acid sequence
VTDTNAMVDSFNPDLNSSNVKDVTSQFTPKVSADGTRVDINFARSMANGKKYIVTQAVRPTGTGNVYTEYWLTRDGTTNTNDFYRGTKSTTVTYLNGSSTAQGDNPTYSLGDYVWLDKNKNGVQDDDEKGLALRDPLIISPKRNHV

SEQ ID NO: 35 - DNA, 1485 bp, Artificial Sequence
  Description of Artificial Sequence: synthetic nucleic acid sequence
atggttattttgacgatgattcagacagtgactcagacgcagatagtgattcagactccgacagtgactcggacgcagacagcgattctgacgcagacagtaactcagattcagatagtgattctgactcagacagcgactcggattctgatagtgattcggattccgattcagacagtgactcagacgcagatagtgattctgacgcagacagtgactcagattcagatagtgattctgactcagacagcgactcggattctgatagtgattcggattccgattcagacagtgactcagacgcagatagtgattcggacgcagacagtgactcagacgcagatagtgattcggatgcagatagcgactcggattcagatagtgattcggatgcagacagcgactcggattcagatagtgattcggatgcagacagcgactcggattctgacagtgattcggacgcagacagtgactcagattcagacagtgattcggacgcagacagcgactcggattctgatagtgattcggacgcagacagtgactcagattcagacagtgactcggattcagacagcgattcggattccgattcagacagtgactcggattcagacagtgactcagactccgacagtgattccgattcagatagcgactcagacgcagatagtgattccgattcagatagcgactccgacgcagatagtgattcggacgcagacagtgactcagattcatacagtgactcagattcagacagtgattcggacgcagacagtgactccgactccgacagcgattcagactcagatagtgactcagacgcagacagtgactcggactcagatagtgattcagatgcagaaagcgattcagactcagatagcgactccgattcagacagcgactccgactcagacagtgattccgattcagacagcgattcggactcagatagtgactcagacgcagatagtgattccgattcagatagcgactccgattctgatagtgactccgattcagatagcgactccgattcagatagtgattcggacgcagacagtgactcgtactcagatagtgactccgattcagacagtgattcggattccgatagcgattcggattccgatagtgactcggattcagacagtgattcggactcagacagcgactccgattcagatagtgattccgactcagacagcgattcggattccgatagtgactcggattcagacagtgattcggactcagacagcgattccgattccgatagtgactcggattcagacagtgattcgggctcagacagcgattccgattcagacagtgactcggactcagatagtgactccgattcagacagcgactcggattctgataaaaatgcaaaagataaattacctgatacaggagcaaatgaagatcatgattctaaaggcacattacttggaactttatttgcaggtttag

SEQ ID NO: 36 - protein, 494 aa, Artificial Sequence
  Description of Artificial Sequence: synthetic amino acid sequence
MVILTMIQTVTQTQIVIQTPTVTRTQTAILTQTVTQIQIVILTQTATRILIVIRIPIQTVTQTQIVILTQTVTQIQIVILTQTATRILIVIRIPIQTVTQTQIVIRTQTVTQTQIVIRMQIATRIQIVIRMQTATRIQIVIRMQTATRILTVIRTQTVTQIQTVIRTQTATRILIVIRTQTVTQIQTVTRIQTAIRIPIQTVTRIQTVTQTPTVIPIQIATQTQIVIPIQIATPTQIVIRTQTVTQIHTVTQIQTVIRTQTVTPTPTAIQTQIVTQTQTVTRTQIVIQMQKAIQTQIATPIQTATPTQTVIPIQTAIRTQIVTQTQIVIPIQIATPILIVTPIQIATPIQIVIRTQTVTRTQIVTPIQTVIRIPIAIRIPIVTRIQTVIRTQTATPIQIVIPTQTAIRIPIVTRIQTVIRTQTAIPIPIVTRIQTVIRAQTAIPIQTVTRTQIVTPIQTATRILIKMQKINYLIQEQMKIMILKAHYLELYLQV

SEQ ID NO: 37 - DNA, 1635 bp, Artificial Sequence
  Description of Artificial Sequence: synthetic nucleic acid sequence
atgagtatggaaaatcatatagaaagattgattaatcatgttgaaaaaacaatagaaataaaagaatatgcttttttaagccttggaaaatctaatataaaagccaaagttaaattattaaaaaagcctaattaccttagaagggatattactaaagaaattcaaaagtttagacagaaaacaggagcgtttccttcatgggtaaaaatagacattgttactgaagaagaagttactttatttaaagatgttaaagatgaattaacgcaaactagaagaaattatattgattttggtatagctttagatcaatactggaatttatcatttttacctgaagaaataaacactaatgcatttattaaaccagtgaaaacagatgggaaaacgaagcttattctatctgaacaaaatataaataactatttaagaaagtatacgaaccataagaaaaagtttgcttatgatttttatgaaaacaaagaagtcattaagttcaaaactaaaggttttatcttagacgaacaaaagatatatgaattacacgatgaaggttataaaaaaggattaagaaaggtcgattatttacataaagaaatagaccaattaattgaaagtggtacatatttcctaggaaatatgctatcagatactggaagatatcaatatggttattttccacattttgataaagaaatcaatttctataatatattaagacatgcttcttcaacttatgcattaatagagggtttagattatttaggagaagatttaactatagtcgaaaaggcaattaactacgttattgagaattatttctatgataatgaaggtgttggatatatctttgatgatacaaaagatattaacgaaataaaattaggacaaaatgctgcctttatatttgcggtttgtgaatatttaaagcataaccccaataagcaatacttatgcgtggcacaaaaagttgctcgaggaattttatcaatgattaatcaagatacatacgaaacaactcatattttaaattatccggatttaactgtgaaagaatcatttagaattatttattatgatggtgaagcagctttagcattattacgcttatatcaccaagatcataatgataaatggttggaagttgtgaagaagttaatggatcgatttattgaaaaagagtattggcaataccatgatcattggcttgggtattgcacgaacgagttagttcaattgtgtccgcaagataaatattttgaatttgggattaagaatgtgaacacctatttggaatatattgaacaacgtgaaacaacattcccaacatttttagaaatgttaatggcaacctataagcttattcaaaaagcaaaagctacacatcgtcaagagcttgtgactcagttgattgatgaagaaaaattaatcaatgtgattcatacaagagcagaatatcaacgagtaggatttttctatcctgaaattgcaatgtacttcaaaaatccaaagcgaattcttggtagtttcttcataaaacaccatgggtatcgagttcggattgatgatatcgaacattatatatcaggctatgttcaatatcaaaaggcacagattaaagatgaaatattatag

SEQ ID NO: 38 - protein, 544 aa, Artificial Sequence
  Description of Artificial Sequence: synthetic amino acid sequence
MSMENHIERLINHVEKTIEIKEYAFLSLGKSNIKAKVKLLKKPNYLRRDITKEIQKFRQKTGAFPSWVKIDIVTEEEVTLFKDVKDELTQTRRNYIDFGIALDQYWNLSFLPEEINTNAFIKPVKTDGKTKLILSEQNINNYLRKYTNHKKKFAYDFYENKEVIKFKTKGFILDEQKIYELHDEGYKKGLRKVDYLHKEIDQLIESGTYFLGNMLSDTGRYQYGYFPHFDKEINFYNILRHASSTYALIEGLDYLGEDLTIVEKAINYVIENYFYDNEGVGYIFDDTKDINEIKLGQNAAFIFAVCEYLKHNPNKQYLCVAQKVARGILSMINQDTYETTHILNYPDLTVKESFRIIYYDGEAALALLRLYHQDHNDKWLEVVKKLMDRFIEKEYWQYHDHWLGYCTNELVQLCPQDKYFEFGIKNVNTYLEYIEQRETTFPTFLEMLMATYKLIQKAKATHRQELVTQLIDEEKLINVIHTRAEYQRVGFFYPEIAMYFKNPKRILGSFFIKHHGYRVRIDDIEHYISGYVQYQKAQIKDEIL

SEQ ID NO: 39 - DNA, 471 bp, Artificial Sequence
  Description of Artificial Sequence: synthetic nucleic acid sequence
atgtttagttatcaaataaataaaaatattaaattaaaaatattagaagaacgagaagccgaacagttatttaaattagtagatagcaatcgtgactatttagctgaatttctgccttttgttgaacatacgaagaaagttgaagatagtaaacactttatccattcggcgttgcaacaatttatcgatggtaatggatttcattgtggaatatggagtaataaagaattgattggagtcataggattgcattacttagatttagttaataaaacaacttcaattggttattatttagctgaagactttcaaaagaaaggtattatgactaaatgtactaaagcgttaattcgctatgtatatgaagtgtatgatattaatcgtatagaaatacgaatgtctactaaaaataagaaaagcagagctataccaattagacttgggttcacgcaaaggtatattgagaagtaa

SEQ ID NO: 40 - protein, 156 aa, Artificial Sequence
  Description of Artificial Sequence: synthetic amino acid sequence
MFSYQINKNIKLKILEEREAEQLFKLVDSNRDYLAEFLPFVEHTKKVEDSKHFIHSALQQFIDGNGFHCGIWSNKELIGVIGLHYLDLVNKTTSIGYYLAEDFQKKGIMTKCTKALIRYVYEVYDINRIEIRMSTKNKKSRAIPIRLGFTQRYIEK

SEQ ID NO: 41 - DNA, 925 bp, Artificial Sequence
  Description of Artificial Sequence: synthetic nucleic acid sequence
atgctaattaataatgaagataaaaggacttaccttcattacaaaagaaaagttttaacacaaaatcttgttgataaacatatgcaacgttttacccctattacatatacacttatcttaattaatattgtgatatggttatgtatgattttatacttaaatcgattttctgatgttaaactattagaagtaggtggacttgttcattttaatgttgttcacggagaatggtatagacttatttcgtcaatgtttttacattttaatttcgaacacattttaatgaatatgctctctctatttatttttggtaaaattgtcgaatcaatcattggatcatggcgaatgctaataatttatataatatccggattatatggaaattttgtttctctatcatttaatacgactacaatttcagtcggtgctagtggagcaatatttggtctaattggttctatttttgtgattatgtatttaagcaagaattttaataaaaaaatgattggccagttattaattgctttggttgttttaatcgttttttcactttttatgtctaatattaatataatggcacatttaggtggatttatcagtggtgtattaattacattaataggctattatttcaaaacacaacgctctttattttggtcatttttgattgtatttttacttatattcatcattttacaaattagaatatttactataagtgaggataatatctatgataaattaattcgggatgaaatgattaaaggtaattatagcgaagcaaaaaatgttgtaaaacaaacacttaataataattacgccgatgatgaaacatattaccttagtggtttgattactgcaactaagagttcgcaagcagaggccgtatcagaatgggaaagaggtttaagaaaatttccaaatt

SEQ ID NO: 42 - protein, 309 aa, Artificial Sequence
  Description of Artificial Sequence: synthetic amino acid sequence
  MOD_RES (309): variable amino acid
MLINNEDKRTYLHYKRKVLTQNLVDKHMQRFTPITYTLILINIVIWLCMILYLNRFSDVKLLEVGGLVHFNVVHGEWYRLISSMFLHFNFEHILMNMLSLFIFGKIVESIIGSWRMLIIYIISGLYGNFVSLSFNTTTISVGASGAIFGLIGSIFVIMYLSKNFNKKMIGQLLIALVVLIVFSLFMSNINIMAHLGGFISGVLITLIGYYFKTQRSLFWSFLIVFLLIFIILQIRIFTISEDNIYDKLIRDEMIKGNYSEAKNVVKQTLNNNYADDETYYLSGLITATKSSQAEAVSEWERGLRKFPNX

SEQ ID NO: 43 - DNA, 1197 bp, Artificial Sequence
  Description of Artificial Sequence: synthetic nucleic acid sequence
atggttaaatttatacactgtgctgatttgcatttggacagtcctttcaaatctaaaagttatcttagtccaaatatttttgaagatgtccaaaagagtgcatatgaaagttttaaaaacatagtcgacttagctttaaaacaggaagtcgattttattattatagcaggtgatttatttgatagtgagaatcgtacattgcgtgctgaagtctttttaaatgaacaatttgaaagattaagaaaagaacaaatatttgtttatatttgccatggcaaccacgatcctcttacttctaaaataacaagtcagtggcctaataacgtatccgtattttcaaatcaagtagagacatatcaagctatcactaaatcaggagaaacaatttatattcatggattcagctatcaaaatgatgcgagttatgaaaataaaatagacgcatacccatcaagtcaaggtcagaagggcatacatattggtgtattacatggaacttatagtaaatcttcggtgaaagaccgttatactgaatttaggttagaagacttaaatcaacgtttataccactactgggcattaggacatatacaccaacgtgaacagttaagtgacatgccagtcattaactatccaggtaatatccaaggaagacatttcaatgaattaggagaaaaaggttgtctattggtcgaaggtgatcatcttaaactcactacacaattttatcctactcaatttattaaatttgaagaagctacaattgaaactgatcatacatctaaacaaggactttatgatgttattcaatcttttaaagataaagtaagaactgaagggaaatcattttatagattgaacgtacgcattaatagtgaagacattattgcaccacaagatttaattcaattaaaagaaatgattactgagttcgaagaaaacgaaaatcaatttgtttttattgaagatttaaatcttcaatatgttcaaaatgacgaaatgccaatagttaaagagttttcaccagaattacttgatgatgcgtcactttttgattcggcaatgactgatttatatcttaatccaagggcttctaagtttttagatgactataatgaatttgataaagttgagttagtcaatcatgcagaaagacttttaaaggatgaaatgagaggtgaacaaaatgataattaa

SEQ ID NO: 44 - protein, 398 aa, Artificial Sequence
  Description of Artificial Sequence: synthetic amino acid sequence
MVKFIHCADLHLDSPFKSKSYLSPNIFEDVQKSAYESFKNIVDLALKQEVDFIIIAGDLFDSENRTLRAEVFLNEQFERLRKEQIFVYICHGNHDPLTSKITSQWPNNVSVFSNQVETYQAITKSGETIYIHGFSYQNDASYENKIDAYPSSQGQKGIHIGVLHGTYSKSSVKDRYTEFRLEDLNQRLYHYWALGHIHQREQLSDMPVINYPGNIQGRHFNELGEKGCLLVEGDHLKLTTQFYPTQFIKFEEATIETDHTSKQGLYDVIQSFKDKVRTEGKSFYRLNVRINSEDIIAPQDLIQLKEMITEFEENENQFVFIEDLNLQYVQNDEMPIVKEFSPELLDDASLFDSAMTDLYLNPRASKFLDDYNEFDKVELVNHAERLLKDEMRGEQNDN

SEQ ID NO: 45 - DNA, 882 bp, Artificial Sequence
  Description of Artificial Sequence: synthetic nucleic acid sequence
atgcatgagcaaaaacaaaaagaggttgctctacacgatcaaacacaagaatggaaaaggttagaacagtcgcttaatatagagcctataaattttcctgaaaaagggatagatagatacgaaactgctaaatctcacaaacaatcacttgaacgagataaaagtttgcgagaagaaagattaagcatattaaataaagaggcggagtccatcaatccagtagaccaaaagtatattgattcgtttaatagcctttatcaacaagagactgaaattaaacaaaaagaatttgagttacgttcaatagagaaagatattgctgataagcaacgtgaactagaagctcttcaatctataggtatcgtatttggcattgtattacacctcatatatggtgcagagtctaaaactctcgaacaatcaacagactggtttagtattgttggagatggttatgttgcactattacaaatgattgtcatgccactaatattcatttcaattgttgccgcttttagcaaaatacaaattggtgaaaaattcgctaagatcggttcttatatttttatgtttttaattggtactgtagccattgcagctatcgttggaattttttacgctttgatctttggtttagatgcatcgtctattgatttaggtagtgcagaacattcacgtggtacagaaatttcaaaacaagccaaagatttaactgcaaacactttaccacaacaaattctcgaagtattcccaagcaatccatttttagatttcacaggacaacgtacaacttcgacaattgcagttgttatttttgcaacgtttgtgggctttgcttatcttagagttgcaagaaaacagccggaacatggaagcttactt

SEQ ID NO: 46 - protein, 294 aa, Artificial Sequence
  Description of Artificial Sequence: synthetic amino acid sequence
MHEQKQKEVALHDQTQEWKRLEQSLNIEPINFPEKGIDRYETAKSHKQSLERDKSLREERLSILNKEAESINPVDQKYIDSFNSLYQQETEIKQKEFELRSIEKDIADKQRELEALQSIGIVFGIVLHLIYGAESKTLEQSTDWFSIVGDGYVALLQMIVMPLIFISIVAAFSKIQIGEKFAKIGSYIFMFLIGTVAIAAIVGIFYALIFGLDASSIDLGSAEHSRGTEISKQAKDLTANTLPQQILEVFPSNPFLDFTGQRTTSTIAVVIFATFVGFAYLRVARKQPEHGSLL

SEQ ID NO: 47 - DNA, 384 bp, Artificial Sequence
  Description of Artificial Sequence: synthetic nucleic acid sequence
gtgaaacagatacttcaacaccttgctgcaaaacatggtattaattttcatgagatggcatttaaagaagaaaaaaaatgcccaacgtgtcagatgacacttaaggatattgcacatgttggtaagcttgggtgtgctgattgttatgctacgtttaaagaagacatcattgatatagttcaacgtgttcaaggtggtcaatttgaacatgtaggaaaaacaccacaatcatcgtataagaaacttgcaataaaaaagcaaattgaagaaaaatcaaaatatctaaataaattgatagatggtcaagagtttgaagaggcagcgattgttcgtgatgaaattaaagctttaaaaagtgagagcgaggtgtctcatgatgagtaa

SEQ ID NO: 48 - protein, 127 aa, Artificial Sequence
  Description of Artificial Sequence: synthetic amino acid sequence
VKQILQHLAAKHGINFHEMAFKEEKKCPTCQMTLKDIAHVGKLGCADCYATFKEDIIDIVQRVQGGQFEHVGKTPQSSYKKLAIKKQIEEKSKYLNKLIDGQEFEEAAIVRDEIKALKSESEVSHDE

SEQ ID NO: 49 - DNA, 2454 bp, Artificial Sequence
  Description of Artificial Sequence: synthetic nucleic acid sequence
atgttatttggtagattgacagagcgtgcacaacgtgtgttggcacatgcacaagaggaagcaattcgtttgaaccattctaatattggaacagaacatcttttgcttggtttaatgaaagagccagaaggtatagcagcaaaggtattagtaagttttaatattactgaagataaagtcatcgaagaagttgaaaaacttatcggtcacggtcaagagcaaatgggcacactacattatacaccgagagcaaaaaaagtaattgaactgtctatggatgaagctcgaaagctacatcataactttgtaggaacagagcatatactattaggtttaattagagaaaatgaaggtgttgcagcacgtgtatttgcaaacctagatttaaatattactaaagcacgtgcccaagttgtaaaagctttaggaagtccagaaatgagtaataaaaatgcgcaagctaataagtctaataacacgcctactttagatggattagctagagatttaactgttattgctaaagatggaacgttagatccagtcgtaggacgagataaagaaattactcgtgtaattgaagttttaagtcgtcgtactaaaaataatcctgtgctaattggtgaacccggtgttggtaaaacagcaattgctgaagggcttgcgcaagcaattgttaaaaatgaagtaccagaaactttaaaagacaaacgtgtaatgtcattagatatgggtacagtcgtagctggcactaaatatcgtggtgaatttgaagaaagattgaaaaaagttatggaggaaatccatcaagctggtaatgttattctatttatcgatgaacttcatactttagttggcgctggtggcgcagaaggagcaattgatgcatctaatattttaaaacctgctttagctcgtggagaattgcaatgtataggtgccacaacattagatgaatatcgtaaaaatatagaaaaagacgctgcattagaacgtcgttttcaaccaattcaagtggatgaacctacagttgaagacacgattgaaatcttaaaaggattacgtgaccgttatgaggctcatcacagaattaatatctcagatgaagctttagaagcggctgctaaattgagtgatcgctatgtttcagatcgtttcttgccagataaagccattgacttaattgatgaggcaagttcaaaagttagacttaaaagtcatacaacgccaagtaatttaaaagagattgaacaagaaattgataaagtaaaaaatgaaaaagatgctgcagttcatgctcaagaatttgaaaatgccgctaatttaagagataagcaatctaaacttgaaaagcaatatgaagatgctaaaaatgaatggaaaaatgcacaaggtggtttagatactgccttatctgaagaaaatatcgctgaagtaatagctggttggacaggtattcctttaactaaaattaatgaaactgaatcagatcgtttattgaatcttgaagatacacttcataaacgtgtcattggacaaaacgatgctgtcaattcaattagtaaagctgttagaagagctcgtgctggtcttaaagatccaaaacgtccaatcggtagttttattttcttaggacctacaggtgtgggtaaaactgaattggctcgtgctttagctgaatctatgtttggtgaagacgatgcaatgattcgcgtagatatgagtgaatttatggagaaacatgctgtcagtcgattagttggtgcacctccaggatatgtaggacatgatgacggcggtcaattgactgaaaaagttagacgtaaaccatactctgtgattttatttgatgaaattgagaaagcacatcctgacgtatttaatattcttctacaagttttagatgatggtcatttaacagatactaaaggtcgtactgtggacttccgtaatactgtgattattatgacttctaatgtgggagctcaagaattacaggaccaacgctttgctggttttggaggtgcttcagaaggtagtgactacgaaactgtcagaaaaacaatgatgaaagaattaaaaaattcattccgaccagaattcttaaaccgtgttgatgacattattgtcttccacaaacttacaaaagatgaattaaaagaaattgttacaatgatggtaaataaacttactcaccgtctttcagagcaaaatattaatattgttgttactgataaagcgaaagaaaaaattgcagaagaaggatatgatcctgaatatggtgctagaccactcattagagcaattcaaaaaacggttgaagataatttaagcgaattgattttagatggaaataaaattgaaggtaaagaagtaacaattgatcatgatggtaaagaatttaagtatgatatttatgaaattacagctaaaaaagaaacaacagaatcataa

SEQ ID NO: 50 - protein, 817 aa, Artificial Sequence
  Description of Artificial Sequence: synthetic amino acid sequence
MLFGRLTERAQRVLAHAQEEAIRLNHSNIGTEHLLLGLMKEPEGIAAKVLVSFNITEDKVIEEVEKLIGHGQEQMGTLHYTPRAKKVIELSMDEARKLHHNFVGTEHILLGLIRENEGVAARVFANLDLNITKARAQVVKALGSPEMSNKNAQANKSNNTPTLDGLARDLTVIAKDGTLDPVVGRDKEITRVIEVLSRRTKNNPVLIGEPGVGKTAIAEGLAQAIVKNEVPETLKDKRVMSLDMGTVVAGTKYRGEFEERLKKVMEEIHQAGNVILFIDELHTLVGAGGAEGAIDASNILKPALARGELQCIGATTLDEYRKNIEKDAALERRFQPIQVDEPTVEDTIEILKGLRDRYEAHHRINISDEALEAAAKLSDRYVSDRFLPDKAIDLIDEASSKVRLKSHTTPSNLKEIEQEIDKVKNEKDAAVHAQEFENAANLRDKQSKLEKQYEDAKNEWKNAQGGLDTALSEENIAEVIAGWTGIPLTKINETESDRLLNLEDTLHKRVIGQNDAVNSISKAVRRARAGLKDPKRPIGSFIFLGPTGVGKTELARALAESMFGEDDAMIRVDMSEFMEKHAVSRLVGAPPGYVGHDDGGQLTEKVRRKPYSVILFDEIEKAHPDVFNILLQVLDDGHLTDTKGRTVDFRNTVIIMTSNVGAQELQDQRFAGFGGASEGSDYETVRKTMMKELKNSFRPEFLNRVDDIIVFHKLTKDELKEIVTMMVNKLTHRLSEQNINIVVTDKAKEKIAEEGYDPEYGARPLIRAIQKTVEDNLSELILDGNKIEGKEVTIDHDGKEFKYDIYEITAKKETTES

SEQ ID NO: 51 - DNA, 396 bp, Artificial Sequence
  Description of Artificial Sequence: synthetic nucleic acid sequence
atgattgaatgtaacaaattacctttcattacttatgaccacctttcttttcttcaaagtaatgatgtttctttaaatattcttcagctatcactgcaggttccttaccttttccatccgcttcataatttaacttctgcatttcttctgttgagattttaccttctaatttttttagtgccttatcgatttctggattatcctttattaattgttcatttgcaagtggactaccgtcataaggcgggaagaatttgcgatcatcttccaatattttcaaatcataagctgcaatacgtccatctgttgaatacccaactgctacatctaatttattattttttaatgcatcatatactaaaccaatttgcattggacgtgcactatcaaatttaa

SEQ ID NO: 52 - protein, 131 aa, Artificial Sequence
  Description of Artificial Sequence: synthetic amino acid sequence
MIECNKLPFITYDHLSFLQSNDVSLNILQLSLQVPYLFHPLHNLTSAFLLLRFYLLIFLVPYRFLDYPLLIVHLQVDYRHKAGRICDHLPIFSNHKLQYVHLLNTQLLHLIYYFLMHHILNQFALDVHYQI

SEQ ID NO: 53 - DNA, 432 bp, Artificial Sequence
  Description of Artificial Sequence: synthetic nucleic acid sequence
atgttcaaaaatatattattaccctatgatttcgaaaatgattttagtgctatccctgactatttagaaaaagtcaccgatgaagattcagttgttgtaatttatcacgttgtaacagaaaatgatcttgcaattagtgtcaagtattataataagcataaagaagatattattagagaaaaagagaaaaaactcactccatttttacgtgaattagaaaaaagagatattcaatataaaatagatgtagattttgggcatattaaagatacaatcttagaaaaaattacttctggagatataaataatggtgaatttgatttagtaattatgagtaatcatagagtcgatttgaatattaaacatgttttaggagatgttacacataagattgctaaaagaagttctgtcccagtactaattgttaaataa

SEQ ID NO: 54 - protein, 143 aa, Artificial Sequence
  Description of Artificial Sequence: synthetic amino acid sequence
MFKNILLPYDFENDFSAIPDYLEKVTDEDSVVVIYHVVTENDLAISVKYYNKHKEDIIREKEKKLTPFLRELEKRDIQYKIDVDFGHIKDTILEKITSGDINNGEFDLVIMSNHRVDLNIKHVLGDVTHKIAKRSSVPVLIVK

SEQ ID NO: 55 - DNA, 372 bp, Artificial Sequence
  Description of Artificial Sequence: synthetic nucleic acid sequence
gtggattacatggcaagacattttggagtttactatagcttgacaactatttctcgtgacttacaagaattagaaatttacaaaatccctgttgaaaataaaaagtatatttacaagaaaataaatcaaacaaatcaattaagtgcaaaaaaacaattagaaatatttagtgatgagattattgaatttataacgctaaataactatgtcttaataaaaacatctcctggctttgctcaaagtataagttattacatagatcaattacaaatgaaagaaatattaggaattattggaggtaacgatactttgatgattttgacttcttcaaatgaaatagcagaatttgtttgttatcaattattcccttaa

SEQ ID NO: 56 - protein, 123 aa, Artificial Sequence
  Description of Artificial Sequence: synthetic amino acid sequence
VDYMARHFGVYYSLTTISRDLQELEIYKIPVENKKYIYKKINQTNQLSAKKQLEIFSDEIIEFITLNNYVLIKTSPGFAQSISYYIDQLQMKEILGIIGGNDTLMILTSSNEIAEFVCYQLFP

SEQ ID NO: 57 - DNA, 1185 bp, Artificial Sequence
  Description of Artificial Sequence: synthetic nucleic acid sequence
gtgttgttaaaaagaccaggaaaagaattagaaaatttagtacctgatcatttaagtggtttattattcgatgatattccctacttaaaagttgcacaagaagagcatgacaaatttgctcaaactttgagagatgaaggaatcgaagtagtttatttagaaaaacttgcagcagaatctattactgagccagaagtacgcgagaacttcataaacgacatattaacagaatctaaaaagacaatattaggtcatgaaactgaaattaaagaattcttttcaaagttatctgaccaagaacttgtaaataaaatcatggctggcgtacgtaaagaagaaattcaacttgaaacaacccatttagtagaatatatggatgatagatatccattttacttagatccaatgcccaacctttattttacaagagatccccaagcttcaattggtagaggaatgacaattaacagaatgtattggagagcacgacgtagagaatctatttttatgacatatatactgaaacatcatccaagatttaaagataaagatgtaccagtatggttagatcgtaactcaccatttaatattgaaggtggagatgaattagtattatcgaaagatgttttagctattggtatatcagaacgtacatcagctcaagcaatagaaaagttagcacgtaatattttcaaagatgcaaacacaagttttaaaaaaatcgtagctattgaaatacctaatacacgtacatttatgcacctagatacagtactaactatgattgactacgataagtttacagtacatgcagcaatatttaaagaagaaaataatatgaatatatttaccatagaacaaaatgatggtaaggacgatataaaaattactcgttctagcaagttacgtgaaacacttgctgaagttttagaagtagaaaaagtggactttattccaacaggtaatggcgacgttattgatggtgcacgtgaacaatggaatgatggctcaaacacattatgtattcgaccaggggttgtggtgacatacgatcgcaactatgtatcaaaccaacttttacgcgacaaaggaattaaagtgattgaaattactggtagtgaacttgtacgtggacgcggaggcccaagatgtatgagtcagccgttatttagagaagatatttaa

SEQ ID NO: 58 - protein, 394 aa, Artificial Sequence
  Description of Artificial Sequence: synthetic amino acid sequence
VLLKRPGKELENLVPDHLSGLLFDDIPYLKVAQEEHDKFAQTLRDEGIEVVYLEKLAAESITEPEVRENFINDILTESKKTILGHETEIKEFFSKLSDQELVNKIMAGVRKEEIQLETTHLVEYMDDRYPFYLDPMPNLYFTRDPQASIGRGMTINRMYWRARRRESIFMTYILKHHPRFKDKDVPVWLDRNSPFNIEGGDELVLSKDVLAIGISERTSAQAIEKLARNIFKDANTSFKKIVAIEIPNTRTFMHLDTVLTMIDYDKFTVHAAIFKEENNMNIFTIEQNDGKDDIKITRSSKLRETLAEVLEVEKVDFIPTGNGDVIDGAREQWNDGSNTLCIRPGVVVTYDRNYVSNQLLRDKGIKVIEITGSELVRGRGGPRCMSQPLFREDI

SEQ ID NO: 59 - DNA, 1422 bp, Artificial Sequence
  Description of Artificial Sequence: synthetic nucleic acid sequence
atggatgaaaataaattaggtaaaacttccttaattggtttagtcataggctctatgataggcggtggtgcattcaatatcatctcagatatgggtggccaagctggtggacttgcaataattatcggttggataataactgctattggtatgatttctcttgctttcgtatttcaaaatttaacaaatgagcgaccagatcttgatggaggaatttatagttatgctcaaacagggtttggagattttattggtttttcaagtgcttggggatattggtttgcagcatttctaggtaatgtggcttatgcaaccctattaatgtcagctgtgggtaactttttccctatatttaaaggaggtaacacacttccaagtattatcatagcatcaattttattatggggtgtacattttttaatacttagaggtgtagaaactgcagcgtttataaatagtattgttacagtagctaaattaatacctatatttctagttattatatgcatgatagttgtattcaacttcagtacttttaaatccggtttttatggtatgactagtggaagtgttggcgtttttagttggggagatacaatggcacaagtaaaaagtactatgttagtaactgtatgggtattcacagggattgaaggagccgttgtcttttctggacgtgcaaagtctaaaaaggatgtaggaactgctaccgttattggtttgatttctgtgctagtcatttatttcttaatgactgtactagcccaaggtgtcattcagcagaaccaaatttcaaaacttgctaatccatcaatggcacaagtattagaacatattgtaggtcattggggttcagtgttagttaatataggcttaattatctctgttttaggagcttggttaggatggacattactagctggtgaattaccattcattgtagctaaagatggacttttcccgaaatggtttgctaaagaaaataagaataaagctccggtcaacgctttaattattactaatatattagttcagttatttttaattagtatgttgtttacagatagtgcctatcagtttgcgttttcacttgcatcaagtgcaatcttaattccatatacactcagtgctttttaccaggttaaatatactattcaaaataaatctaaagctaatttaaaacaatggataataggaattattgcatctatttacacaatttggttggtttatgcagctggattagattatttactattaacgatgttgttatatatacctggattactcgtatacagctacgtacaaagggataataacaaacatttgacaaaattggattatacgttattcatattcatcattgtacttgcaataataggaatagttcgtttgattacaggtaatatttctgtattttaa

SEQ ID NO: 60 - protein, 473 aa, Artificial Sequence
  Description of Artificial Sequence: synthetic amino acid sequence
MDENKLGKTSLIGLVIGSMIGGGAFNIISDMGGQAGGLAIIIGWIITAIGMISLAFVFQNLTNERPDLDGGIYSYAQTGFGDFIGFSSAWGYWFAAFLGNVAYATLLMSAVGNFFPIFKGGNTLPSIIIASILLWGVHFLILRGVETAAFINSIVTVAKLIPIFLVIICMIVVFNFSTFKSGFYGMTSGSVGVFSWGDTMAQVKSTMLVTVWVFTGIEGAVVFSGRAKSKKDVGTATVIGLISVLVIYFLMTVLAQGVIQQNQISKLANPSMAQVLEHIVGHWGSVLVNIGLIISVLGAWLGWTLLAGELPFIVAKDGLFPKWFAKENKNKAPVNALIITNILVQLFLISMLFTDSAYQFAFSLASSAILIPYTLSAFYQVKYTIQNKSKANLKQWIIGIIASIYTIWLVYAAGLDYLLLTMLLYIPGLLVYSYVQRDNNKHLTKLDYTLFIFIIVLAIIGIVRLITGNISVF

SEQ ID NO: 61 - DNA, 690 bp, Artificial Sequence
  Description of Artificial Sequence: synthetic nucleic acid sequence
atgtatgaagaaaatatttatattaaaaattcagaatatgaatttgataataatcttaaacaattagcatcatacttaaatattcctgttagtattgttagaccttataaagaggatttaacactttatcaatataaaaaaggacaagtcatatatcattcaactgatcaaataaaatttgtatactttttagtaaatggttgtattttacatgaatcttctaatattactggtgacaattatttaagattaagtaaagacgaaaatatatttccaatgaacttcatatttaatgaaacccctgcaccatatgaaatatgtacagctttgacagattgtaaaatattaactttaccgaaagatttacttgagtatttatgtagaaagcataatgaaatatttgaaagtctcttcaagaaacttaatgagactattcaatttcaagtagaatatattatggcgttaagagctaattcagctaaagaaagaattgaaagaatactacaaattttatgcctttcaattggggatgataatggagaattctatgaattaaaacaaattatgactgttcaattaataagtaatttatctggacttaacagaaaaactactggtgaaataatcagagaattaaaaatagaaaatattatatatcaagataaaagaaattggattataaaaaaataa

SEQ ID NO: 62 - protein, 229 aa, Artificial Sequence
  Description of Artificial Sequence: synthetic amino acid sequence
MYEENIYIKNSEYEFDNNLKQLASYLNIPVSIVRPYKEDLTLYQYKKGQVIYHSTDQIKFVYFLVNGCILHESSNITGDNYLRLSKDENIFPMNFIFNETPAPYEICTALTDCKILTLPKDLLEYLCRKHNEIFESLFKKLNETIQFQVEYIMALRANSAKERIERILQILCLSIGDDNGEFYELKQIMTVQLISNLSGLNRKTTGEIIRELKIENIIYQDKRNWIIKK

SEQ ID NO: 63 - DNA, 870 bp, Artificial Sequence
  Description of Artificial Sequence: synthetic nucleic acid sequence
atgaataaaatattaattgaaaaggagatattcaaaatgaaaaatttaagaaatagaaactttttaactttgttagacttcacacaaaaagaaatggaatttttacttaatttatctgaagatcttaaacgcgcaaaatatgcaggaatagaacaacaaaaaatgaaaggtaaaaatatcgctctactttttgaaaaagattcaacacgcactcgatgtgcatttgaaacagcggcttatgatcaaggtgcacatgtaacataccttgggccaacaggttctcaaatgggtaaaaaagagtctaccaaagatactgctcgtgttttaggtggagctgtccctttaggtattttattatcaaaaacgcaacgcacagctaatgtggtattaacagttgctggcgtgcttcaaaccattcctactttggctgtgctagctatcatgattccaatatttggggtaggaaaaacaccagctattgttgcattatttatctatgtattattaccaattttaaataatacagtattaggtgttaaaaatatcgataaaaatgtcattcaagctggtcaaagtatgggaatgactaaatttcaattaatgaaagatgtagaaatgcctttagctttaccacttattattagtggtattcgtctatcaagtgtatacgtcattagttgggcaacactcgcaagttatgtaggtgcaggtggacttggggatcttgtatttaatggattaaatctctatcaaccacctatgattattagtgcagcgattgttgttactttattagcattagttattgactttatactttcattagttgaaaaatgggttgtacctaaaggattaaaagtatctagataa

SEQ ID NO: 64 - protein, 289 aa, Artificial Sequence
  Description of Artificial Sequence: synthetic amino acid sequence
MNKILIEKEIFKMKNLRNRNFLTLLDFTQKEMEFLLNLSEDLKRAKYAGIEQQKMKGKNIALLFEKDSTRTRCAFETAAYDQGAHVTYLGPTGSQMGKKESTKDTARVLGGAVPLGILLSKTQRTANVVLTVAGVLQTIPTLAVLAIMIPIFGVGKTPAIVALFIYVLLPILNNTVLGVKNIDKNVIQAGQSMGMTKFQLMKDVEMPLALPLIISGIRLSSVYVISWATLASYVGAGGLGDLVFNGLNLYQPPMIISAAIVVTLLALVIDFILSLVEKWVVPKGLKVSR

SEQ ID NO: 65 - DNA, 894 bp, Artificial Sequence
  Description of Artificial Sequence: synthetic nucleic acid sequence
gtgttatctggatgcagtttaccaggtttaggtgatggaaatgcaaaagatgatgtgaaaatcacaacgactgaaacaagtgaaactaagattataggtcatatggaaaaattattaattgaacatgaaactgatggaaaaatcaaaccgacgttgattgggaacctaggttctagcattattcaacataatgcgttacaacgtggtgatgcaaatatgtcagcggtacgttacacaggtactgaattgacgagtgtattagcagctaaacctactaaagatcctgataaggccatgtctgaaacacaacgcttatttaaaaagaaatatgatgaaaagtattatcattcacttgggtttgcgaatacatacgcattcatggtgacaaaagaaacggctaaaaagtatcacttagaaaaagtatcagatttagagaaatataaagatgaactacgtcttggaatggatacccaatggatgaaccgtgcaggtgatggatatccagcttttgttaaagattatggatttaaatttgatagtgcacgtccaatgcaaattggtttagtatatgatgcattaaaaaataataaattagatgtagcagttgggtattcaacagatggacgtattgcagcttatgatttgaaaatattggaagatgatcgcaaattcttcccgccttatgacggtagtccacttgcaaatgaacaattaataaaggataatccagaaatcgataaggcactaaaaaaattagaaggtaaaatctcaacagaagaaatgcagaagttaaattatgaagcggatggaaaaggtaaggaacctgcagtgatagctgaagaatatttaaagaaacatcattactttgaagaaaagaaaggtggtcataagtaa

SEQ ID NO: 66 - protein, 297 aa, Artificial Sequence
  Description of Artificial Sequence: synthetic amino acid sequence
VLSGCSLPGLGDGNAKDDVKITTTETSETKIIGHMEKLLIEHETDGKIKPTLIGNLGSSIIQHNALQRGDANMSAVRYTGTELTSVLAAKPTKDPDKAMSETQRLFKKKYDEKYYHSLGFANTYAFMVTKETAKKYHLEKVSDLEKYKDELRLGMDTQWMNRAGDGYPAFVKDYGFKFDSARPMQIGLVYDALKNNKLDVAVGYSTDGRIAAYDLKILEDDRKFFPPYDGSPLANEQLIKDNPEIDKALKKLEGKISTEEMQKLNYEADGKGKEPAVIAEEYLKKHHYFEEKKGGHK

SEQ ID NO: 67 - DNA, 609 bp, Artificial Sequence
  Description of Artificial Sequence: synthetic nucleic acid sequence
atgtcggtatatggtgtgttgtttgcatgtataattggaattcctattggtattttcatagccaagtataaacgtttatcgtggccggtaattacaattgcaaatattatacaaactgttccagcaatcgctatgttagccatacttatgttggctatgggattaggaccaacaactgttgttgtaactgtattcctatattcgttattacctattattaaaaatacttatactggtattgtagaagttgatgaaaatattaaagacgctggtaaaggtatgggaatgacggggaatcaaatattaagaatgatagagttaccattatctttatctgttattattggtggtgttagaattgcacttgttgttgctatcggaatagtagcgattgggtcatttatcggtgctccaacactaggtgatattattattcgtggtacaaattcaacagatggaacaacattcatcttagcaggtgccataccaattgctttaatagcaattatcatagatataggattacgttatctagaaaaacgtttagatcctactcgtaaaaacaaaaaagattcaatgcaaaaacatcaagtacaaaaattacgttaa

SEQ ID NO: 68 - protein, 202 aa, Artificial Sequence
  Description of Artificial Sequence: synthetic amino acid sequence
MSVYGVLFACIIGIPIGIFIAKYKRLSWPVITIANIIQTVPAIAMLAILMLAMGLGPTTVVVTVFLYSLLPIIKNTYTGIVEVDENIKDAGKGMGMTGNQILRMIELPLSLSVIIGGVRIALVVAIGIVAIGSFIGAPTLGDIIIRGTNSTDGTTFILAGAIPIALIAIIIDIGLRYLEKRLDPTRKNKKDSMQKHQVQKLR

SEQ ID NO: 69 - DNA, 1158 bp, Artificial Sequence
  Description of Artificial Sequence: synthetic nucleic acid sequence
atgaaaccacttagaagattgaccaaagtcgaactccctattgcaatgcctgttatcatggcaggaatacgcacagctatggtattaatcattggtactgctacactcgcagctttaataggcgctggtggtctaggagatttaatattattaggcattgatcgtaacaatagtgcactcattttaataggtgctattccagctgcacttctagctattatttttgattttattttaagatacatggaacgtttatcatataaaaaattgctcatttctttagggacaattgtaattgtgattatcatagctattgccatacctatggcagcgcaaaaaggtgataaaatcacattcgcaggcaagctaggttcagaaccgtcaattattacgaatatgtataaaatacttattgaagaagacacagatgatactgtagaagtcaaagatggcatgggtaaaacctcattcttatttaatgcgcttaagtcagatgaaattgatggttatttagaatttacaggtactgtattaggtgaattaacgaaagaagatttaaagtctaaaaaagaaaacgatgtatatcaacaagcaaagtctagtttagaaaaaaaatatgatatgacaatgcttaaaccgatgaaatataataatacgtatgcattagctgtaaaacgtgactttgcaaaaaaatatcaaattaagacaataggtgatttacgcaaggtagaagataaacttaaaccaggttttacattggaatttaatgatagaccagatggatacaaagctgttaaaaaaacgtatcatcttaatctttctaatgttaaaactatggaacctaaattacgttatactgcagttaaaaagggagatattaatctcatagacgcatactctactgatgcagaattaaaacaatataacatggtagtattaaaagatgatcaacatgtatttcctccataccaaggagcaccgctatttaaagaaaaatatttaaaagaccatcctgaagttaaaaaaccgctcaataaattggcgaatagaatcacagatgaagaaatgcaagaaatgaactataaggtaacagtgaagaaagaggatccttataaagtagcaagagaatacttagaaaaagaaaaattaataaaataa

SEQ ID NO: 70 - protein, 385 aa, Artificial Sequence
  Description of Artificial Sequence: synthetic amino acid sequence
MKPLRRLTKVELPIAMPVIMAGIRTAMVLIIGTATLAALIGAGGLGDLILLGIDRNNSALILIGAIPAALLAIIFDFILRYMERLSYKKLLISLGTIVIVIIIAIAIPMAAQKGDKITFAGKLGSEPSIITNMYKILIEEDTDDTVEVKDGMGKTSFLFNALKSDEIDGYLEFTGTVLGELTKEDLKSKKENDVYQQAKSSLEKKYDMTMLKPMKYNNTYALAVKRDFAKKYQIKTIGDLRKVEDKLKPGFTLEFNDRPDGYKAVKKTYHLNLSNVKTMEPKLRYTAVKKGDINLIDAYSTDAELKQYNMVVLKDDQHVFPPYQGAPLFKEKYLKDHPEVKKPLNKLANRITDEEMQEMNYKVTVKKEDPYKVAREYLEKEKLIK

SEQ ID NO: 71 - DNA, 735 bp, Artificial Sequence
  Description of Artificial Sequence: synthetic nucleic acid sequence
atgcaaattaaactaccaaaaccattcttttttgaagaagggaaacgtgcagtgttacttcttcacggctttacaggtaactctgctgatgtaagacaacttgggcgttatcttcaaaaaaagggctatacatcttatgctccacaatatgaaggacatgcagcgcccccagaagaaatattaaaatctagcccttttgtttggtttaaagatgttttagatggttatgattatttagtagatcaaggttacgaagaaatagcagtagctggtttatcattaggtggcgccttcgcattaaaactaagtttaaatcgtgatgtgaaggggattataactatgtgtgcacctatggagaataaaacagaaggttcgatttatgaaggctttcttgaatatgcacgtaactttaaaaaatatgaaggcaaagatcaacaaacgattgatcaagaaatggaacaatttcatccaactgaaaccctgagagaactgagtgacactctaaatggagttaaagaacatgtcgatgaagtaattgatccaatacttgtcgtacaagcagaacaagatacaatgattgatcctcaatcagcaaattatatatataatcatgtcgattctgatgaaaaagaaatcaaatggtatcaacattcaggtcatgtgattaccattgataaagggcattgtcaaaatcctcctgtaattttagcgtatctggaaaatcatcagcagtaa

SEQ ID NO: 72 - protein, 244 aa, Artificial Sequence
  Description of Artificial Sequence: synthetic amino acid sequence
MQIKLPKPFFFEEGKRAVLLLHGFTGNSADVRQLGRYLQKKGYTSYAPQYEGHAAPPEEILKSSPFVWFKDVLDGYDYLVDQGYEEIAVAGLSLGGAFALKLSLNRDVKGIITMCAPMENKTEGSIYEGFLEYARNFKKYEGKDQQTIDQEMEQFHPTETLRELSDTLNGVKEHVDEVIDPILVVQAEQDTMIDPQSANYIYNHVDSDEKEIKWYQHSGHVITIDKGHCQNPPVILAYLENHQQ

SEQ ID NO: 73 - DNA, 480 bp, Artificial Sequence
  Description of Artificial Sequence: synthetic nucleic acid sequence
gtgtcttcttcaataagtattttatacatattcgtaataattgacggttctgaacctagcttgcctgcgaatgtgattttatcacctttttgcgctgccataggtatggcaatagctatgataatcacaattacaattgtccctaaagaaatgagcaattttttatatgataaacgttccatgtatcttaaaataaaatcaaaaataatagctagaagtgcagctggaatagcacctattaaaatgagtgcactattgttacgatcaatgcctaataatattaaatctcctagaccaccagcgcctattaaagctgcgagtgtagcagtaccaatgattaataccatagctgtgcgtattcctgccatgataacaggcattgcaatagggagttcgactttggtcaatcttctaagtggtttcattccaatgcctttagccgcttcaataagagagggatcgacctccttaataccttaa

SEQ ID NO: 74 - protein, 159 aa, Artificial Sequence
  Description of Artificial Sequence: synthetic amino acid sequence
VSSSISILYIFVIIDGSEPSLPANVILSPFCAAIGMAIAMIITITIVPKEMSNFLYDKRSMYLKIKSKIIARSAAGIAPIKMSALLLRSMPNNIKSPRPPAPIKAASVAVPMINTIAVRIPAMITGIAIGSSTLVNLLSGFIPMPLAASIREGSTSLIP

SEQ ID NO: 75 - DNA, 306 bp, Artificial Sequence
  Description of Artificial Sequence: synthetic nucleic acid sequence
atgtcttctcatcctatccacattaatattttgatagattgtagagttaatttatctggaacacgtaaatcatcaaaaactacacctaaatgttctttatatttgaagtcgttctctgtcacctctttatcgaagaatttcagtgaaccattatctttatgtctatttcctacaagtgtattaatgagggtagacttacctgaaccatttttcccaattaaacccactacctcgccaggtttaacagagaatgtgatgtcagtaagctggaattctgaattcttatatgatttattgagttgctga

SEQ ID NO: 76 - protein, 101 aa, Artificial Sequence
  Description of Artificial Sequence: synthetic amino acid sequence
MSSHPIHINILIDCRVNLSGTRKSSKTTPKCSLYLKSFSVTSLSKNFSEPLSLCLFPTSVLMRVDLPEPFFPIKPTTSPGLTENVMSVSWNSEFLYDLLSC

SEQ ID NO: 77 - DNA, 753 bp, Artificial Sequence
  Description of Artificial Sequence: synthetic nucleic acid sequence
gtgaggcaaatgtcacagtatccactttggaatcaattaaatactttaaaagaggctcagtgggtcgatttaacacatactttcgacccaaatatccctcgttttagcgaatttgaaaaaggtgaagtctcaacgctattcaatgttaaagatcatgggttttatgtacaacgttggagtatcgtaactcaatatggaacacacattgatgctccaatccatttcgttgaaaatagaagatatttagaagaattagatttaaaagaacttgttttaccattaattgttttagattattctaaagaagctgcacaaaattcagattttatcgtatcacgtaaacatttagaagattgggaacaacaacacggtcgcattgaagcaggtacttttgtcgcattacgtactgattggtcaaaacgttggccagatatagaaaaatttgaaaataaagatgtagatggccatcaacatcttccaggttggggccttgatgcattaaaatttctcattgaagaacgtggtgttaaatccataggtcacgaaacatttgatactgatgcctcaattgatacagctaaaaatggtgatattgttggcgaaagatatatcttaggtcaagacacattccaagtcgaattacttaccaatttagatcaattacctaccagaggtgcaattatctatgcaatcagcccaaaaccaaaagatgcaccaggctttccagttcgtgcattcgcaataaaaccttaa

SEQ ID NO: 78 - protein, 250 aa, Artificial Sequence
  Description of Artificial Sequence: synthetic amino acid sequence
VRQMSQYPLWNQLNTLKEAQWVDLTHTFDPNIPRFSEFEKGEVSTLFNVKDHGFYVQRWSIVTQYGTHIDAPIHFVENRRYLEELDLKELVLPLIVLDYSKEAAQNSDFIVSRKHLEDWEQQHGRIEAGTFVALRTDWSKRWPDIEKFENKDVDGHQHLPGWGLDALKFLIEERGVKSIGHETFDTDASIDTAKNGDIVGERYILGQDTFQVELLTNLDQLPTRGAIIYAISPKPKDAPGFPVRAFAIKP

SEQ ID NO: 79 - DNA, 351 bp, Artificial Sequence
  Description of Artificial Sequence: synthetic nucleic acid sequence
gtgtatttatttatagtccaaaacgcgtcacttcactataaagctaaaattgacgcaaatatttcagatgatttagcagatacatatgaaaataaatcatacatcaaatcattgaaagtaagatttatttacacaatgcaattaattgtcgcttttattgcaattttaatacccgtcataggaaatgcatctgagaatcacatcgctctaataatgattcctttcattattacaatcatttcatccataatgattgggatattttatagaaaatttgatgctcgataccctaaattaggagagaaacgttacactgaaaaagcatttaatattatggacgaaggagagtga

SEQ ID NO: 80 - protein, 116 aa, Artificial Sequence
  Description of Artificial Sequence: synthetic amino acid sequence
VYLFIVQNASLHYKAKIDANISDDLADTYENKSYIKSLKVRFIYTMQLIVAFIAILIPVIGNASENHIALIMIPFIITIISSIMIGIFYRKFDARYPKLGEKRYTEKAFNIMDEGE

SEQ ID NO: 81 - DNA, 318 bp, Artificial Sequence
  Description of Artificial Sequence: synthetic nucleic acid sequence
atggaaaacttattagaagttcagcaactcaataaatcatataagaattcagaattccagcttactgacatcacattctctgttaaacctggcgaggtagtgggtttaattgggaaaaatggttcaggtaagtctaccctcattaatacacttgtaggaaatagacataaagataatggttcactgaaattcttcgataaagaggtgacagagaacgacttcaaatataaagaacatttaggtgtagtttttgatgatttacgtgttccagataaattaactctacaatctatcaaaatattaatgtggataggatga

SEQ ID NO: 82 - protein, 105 aa, Artificial Sequence
  Description of Artificial Sequence: synthetic amino acid sequence
MENLLEVQQLNKSYKNSEFQLTDITFSVKPGEVVGLIGKNGSGKSTLINTLVGNRHKDNGSLKFFDKEVTENDFKYKEHLGVVFDDLRVPDKLTLQSIKILMWIG

SEQ ID NO: 83 - DNA, 822 bp, Artificial Sequence
  Description of Artificial Sequence: synthetic nucleic acid sequence
atgttcaagaacaacaaaagtattgaagatacttatgcaacaaaacctattattcagaatatcgttggtcaggcacaaatcaaacaagtgatggcgaaacaaacacccatgagatatacgttgaaagctatcatggctggttttctattatcaatagttacagtttttatgttagcaattaaaacacaattcgcttcaacgcataatgacgggttaatcaatttgatgggagctattgcgtttagtttaggtctcgtattagttgtgttaaccaattctgaattattaactagtaattttatgtatctgactgttggttggtattataaagcaattagtgtaagtaaaatgatatggatttttattttctgttttataggtaatatcttaggtggatttattttatttttcctcatgaaatatgcacatgttatgacgccagaaatgacagatagtttaacagcattagtacataaaaaaacagtagaatcgacttggttaaatattttgattaaaggtatattttgtaatttctttattaatatcggtatttttatttcaatgcagtttaaagagggactagccaaagcattctttatagcttgtggagtgattgtctttgtatttatgggttacgaacacgttgtttttaacgctggattatatgcaggtatgatgttctttaatatggatggattatcttggttgggtgtgctaaaaaatattgtttttgcattccttggaaactatatcggtggaggtatctttattggattagtgtatgcatatttgaacggtaaacgtgacagcctccaaccatag

SEQ ID NO: 84 - protein, 273 aa, Artificial Sequence
  Description of Artificial Sequence: synthetic amino acid sequence
MFKNNKSIEDTYATKPIIQNIVGQAQIKQVMAKQTPMRYTLKAIMAGFLLSIVTVFMLAIKTQFASTHNDGLINLMGAIAFSLGLVLVVLTNSELLTSNFMYLTVGWYYKAISVSKMIWIFIFCFIGNILGGFILFFLMKYAHVMTPEMTDSLTALVHKKTVESTWLNILIKGIFCNFFINIGIFISMQFKEGLAKAFFIACGVIVFVFMGYEHVVFNAGLYAGMMFFNMDGLSWLGVLKNIVFAFLGNYIGGGIFIGLVYAYLNGKRDSLQP

SEQ ID NO: 85 - DNA, 546 bp, Artificial Sequence
  Description of Artificial Sequence: synthetic nucleic acid sequence
gtgaaaaatatgtcgaatattaatattagagtggcacatgaacaagatgctgaagaattacatagcatcatgcaaattgcttttacacctttaagagaactaggtattgattggccatcagttcacgctgatcttgaaatggtaaaggataatttaagacaaaatactacatttgtacttgaaaatgaaaaagaaattatttcaacgattacggtttgctatgcatggagtagtgtaaaacccatttcaggttatccgttcgtttggtggtttgcaacacgaccaacttatgatggacaagggtatgggagtcaacttttaaaatatgtagaggagacatttttacgcgatactttaaaagctgctgcggtaaccttaggaacatcagcacgtttgcacccttggttattaaacatttacgaaaagcggggttatgaaatatacgctaaacatgaaaatgatgatggtgatttaggagtcataatgcgtaaaattttaataccagaacaatttaatgatgacattttgggccgaccgccattttag

SEQ ID NO: 86 - protein, 181 aa, Artificial Sequence
  Description of Artificial Sequence: synthetic amino acid sequence
VKNMSNINIRVAHEQDAEELHSIMQIAFTPLRELGIDWPSVHADLEMVKDNLRQNTTFVLENEKEIISTITVCYAWSSVKPISGYPFVWWFATRPTYDGQGYGSQLLKYVEETFLRDTLKAAAVTLGTSARLHPWLLNIYEKRGYEIYAKHENDDGDLGVIMRKILIPEQFNDDILGRPPF

SEQ ID NO: 87 - DNA, 690 bp, Artificial Sequence
  Description of Artificial Sequence: synthetic nucleic acid sequence
atgagaaaaggaaatcagaatgaagctttagaagaatttatcggaactttattaaaagatgagcaatattattatgagttagcatttttagaaagtgaaacacaaaatcttgaaatcataatggagaagatgattaagcaaggaattacaaaatttcgtattgtacctttactcatttttagtgcaatgcattatatcagtgatattccacaaatacttaaagagatgaaagctcgatatccacaaattgatagtaaaatgagtgcgcctcttggtacacatccatatatgaaaacattagtagaaaatagaattgctgatgaaaaagtcagtgaaggttcaaccaaagcaactatagtaattgcccatggaaatggaagtggacgttttacgaaagcacatgatgaattaaaagcatttgttaaaacgcttgatagtcatcatcctgtttatgcaagagctttatatgggacattagcatttaaaaatgatttagataaaatctcagagcaatatgacgagttagtcattgtcccattatttttatttgatggtagattggtgaataaagtaaaacgtcttttaggtgaaatgacattgcatagtcaattacacattacgccatcgattaactttgatccaattttaagattaattattagagaaagacttgaagcgttagatatttaa

SEQ ID NO: 88 - protein, 229 aa, Artificial Sequence
  Description of Artificial Sequence: synthetic amino acid sequence
MRKGNQNEALEEFIGTLLKDEQYYYELAFLESETQNLEIIMEKMIKQGITKFRIVPLLIFSAMHYISDIPQILKEMKARYPQIDSKMSAPLGTHPYMKTLVENRIADEKVSEGSTKATIVIAHGNGSGRFTKAHDELKAFVKTLDSHHPVYARALYGTLAFKNDLDKISEQYDELVIVPLFLFDGRLVNKVKRLLGEMTLHSQLHITPSINFDPILRLIIRERLEALDI

SEQ ID NO: 89 - DNA, 2406 bp, Artificial Sequence
  Description of Artificial Sequence: synthetic nucleic acid sequence
atggcaaaacaaaaacttgtaatgattggtaatggtatggcaggtttaagaacgatagaagagattttagaacgttcacaatcacaatttgatattactattattgggaaagaaccttatccgaactataacagaattatgttatccaatattttacagaagaaaatgaccgtcgaagatacaattatgaatccttatgattggtatcaagagaataatattgaacttataaataatgatccagtggaaaaagttgataaagaaaacaaaatagttactacttctaaaggtattgaagtagagtatgacatttgtattttcgctactggatcaaaagcttttgtattacctataccaggttcaaatcttcctagtgtcattggatggcgaacaattgatgatacaaataaaatgattgaaattgcccaaacgaaaaaacgcgcagttgtcattggtggaggtcttctaggcttagagtgtgccagaggacttctagatcaaggaatggaagtgacagttcttcatttagctgattggctcatggaaatgcaattggatcgtaaagccggagaaatgcttaaagcggatttagaaaagcaaggtatgaagattgaacttcaagcaaattctaaagaaatcattggtgataaagatgttgaagctattaaattagctgacggtcgggtgattgaaacagatttagtagttatggctgttggtatcagaccttatactgaagttgctaaagatagtggattagatgtcaatagaggtattgttgtaaatgattatatgcaaacatctgattctcatatttatgcagtcggtgaatgtgccgaacatgatgggaaagtttatggattggtggcgccactttatgaacaaggcaaagtgctagcagattatttaactggtaaagaaacaaaaggttataaaggatctactactttcacttcacttaaagtatctggttgtgatttatatagtgcagggcaaattgttgaagatgaagatgtccatggtgtggaaatttttaatagtgtcgacaatatctacaaaaaagtgtatttaagtcagggtcaagtcgttggtgctgtcttgtatggtgatactgatgatggatcacgattttataatatgatgaaaaaacatgaaacgcttgaagattatacacttgtttctttattgcataaaggtgatgaagatgcggggacatctattgctgatatgtctgatgatgaaacgatttgtggatgtaatggtgttgataaaggaacaatcgtcaatgctattacaagtaaaggtttaacgtctgtagatgaagtgactaaagcaacaaaagcaggtaattcatgtggtaagtgtaaaggtcaaatcggtgagttattacaatatacattaggtgacgactttattgctgcaaaaccaacaggtatttgtccatgtactgatttaacaagagaccaaattgtaactcaaatcagggctaaaaatctcaaatcatcaaaagaagtacgacacgttcttgatttcaaagataaagatggttgtcctaaatgtcgacctgcaattaattattatttaaatatggtttatccttttgaacatcgagacgaaaaagattctcgcttcgctaatgaaagatatcatgcaaatatacaaaatgatggtactttctcagtgattcctcaaatgcgcggtggtgttacagatgctgaccaactcattcgattaggagaagttgctaaaaagtataacgtaccacttgttaaagtaacaggttcgcaacgtgtaggtttatatggattgaagaaagaagaattaccacaagtttggaaagatttaggaatgcgttctgcttctgcttatggtaaaaagacgcgttctgttaaaagttgcgttggtaaagagttttgtcgttttggtacacaatacacaactcgactaggaataagacttgaaaaaacatttgaatatattgatacacctcataaatttaaaatgggagtatcaggttgtccgagaagttgtgtagagtctggtgttaaagattttggcgtcatatctgttgaaaatggctaccaaatatttatcggaggtaatggtggtactgatgttactgtaggtaaattgttaacgacagttgaaaccgaagatgaagtgattcaattatgtggtgccctcatgcagtattacagagaaacaggtgtttacgctgaaagaacagcaccatggttagaacgtatgggctttgaaaatgtcaagaatgtcttattaaatcaagaaaagcaaaaagaactgtatttaagaattatggaagccaaaaaagctgttgagaatgaaccatgggaaactattgttgaaaataaagaagcacaaaaaatctttgaagttgagaaggtgtaa

SEQ ID NO: 90 - protein, 801 aa, Artificial Sequence
  Description of Artificial Sequence: synthetic amino acid sequence
MAKQKLVMIGNGMAGLRTIEEILERSQSQFDITIIGKEPYPNYNRIMLSNILQKKMTVEDTIMNPYDWYQENNIELINNDPVEKVDKENKIVTTSKGIEVEYDICIFATGSKAFVLPIPGSNLPSVIGWRTIDDTNKMIEIAQTKKRAVVIGGGLLGLECARGLLDQGMEVTVLHLADWLMEMQLDRKAGEMLKADLEKQGMKIELQANSKEIIGDKDVEAIKLADGRVIETDLVVMAVGIRPYTEVAKDSGLDVNRGIVVNDYMQTSDSHIYAVGECAEHDGKVYGLVAPLYEQGKVLADYLTGKETKGYKGSTTFTSLKVSGCDLYSAGQIVEDEDVHGVEIFNSVDNIYKKVYLSQGQVVGAVLYGDTDDGSRFYNMMKKHETLEDYTLVSLLHKGDEDAGTSIADMSDDETICGCNGVDKGTIVNAITSKGLTSVDEVTKATKAGNSCGKCKGQIGELLQYTLGDDFIAAKPTGICPCTDLTRDQIVTQIRAKNLKSSKEVRHVLDFKDKDGCPKCRPAINYYLNMVYPFEHRDEKDSRFANERYHANIQNDGTFSVIPQMRGGVTDADQLIRLGEVAKKYNVPLVKVTGSQRVGLYGLKKEELPQVWKDLGMRSASAYGKKTRSVKSCVGKEFCRFGTQYTTRLGIRLEKTFEYIDTPHKFKMGVSGCPRSCVESGVKDFGVISVENGYQIFIGGNGGTDVTVGKLLTTVETEDEVIQLCGALMQYYRETGVYAERTAPWLERMGFENVKNVLLNQEKQKELYLRIMEAKKAVENEPWETIVENKEAQKIFEVEKV

SEQ ID NO: 91 - DNA, 315 bp, Artificial Sequence
  Description of Artificial Sequence: synthetic nucleic acid sequence
atgaaagctaaagaaaagattaaagttacaacaatgaatgaaatgattcctcaaataggcaaaaaagtagttgtaaacgaaaaagaaataggtatttttctcacagataatggtgatttatatgccattggaaatatatgtccacataaagaaggaccgttgtctgaagggactgtaagtggtgattatgtttactgtccgttacacgatcaaaaaatagctttaaaaactggagaagtacaacaacctgatacaggatgtgtagagacatacgaagtagaagttattgatggagatatttacttatgtctataa

SEQ ID NO: 92 - protein, 104 aa, Artificial Sequence
  Description of Artificial Sequence: synthetic amino acid sequence
MKAKEKIKVTTMNEMIPQIGKKVVVNEKEIGIFLTDNGDLYAIGNICPHKEGPLSEGTVSGDYVYCPLHDQKIALKTGEVQQPDTGCVETYEVEVIDGDIYLCL

SEQ ID NO: 93 - DNA, 834 bp, Artificial Sequence
  Description of Artificial Sequence: synthetic nucleic acid sequence
gtgattttatttgatcgtctcgtaaatcctttcatcttacagtatgcttcttctcaaacaaaagtgatcaatgtgggaaagaaaccttattgtaaacacattcaacaagaggagattaatcaaaaaattgttgaagcagctaatcaatatcaatgtgtggtgagactaaagggaggagatcctgcgatttttggtagaattacagaagaagtacaaacattagaaaatcatcatattcattacgagattgtccctggtgtgacatcagcaagtgctgccgtagcaactatgaatatgggattaacgatgcgttctatcgcaccgagtgtgactttctcaactggtcattttaaagattcggttaatcacgatacggatattaggaacttgattaatggaggcactttagctatttatatgggtgtgaaaagattaggtcaaattattaaacaaattgaatcatatacgaatgaagactaccccattgcaatagtgtttaatgcttcctgctacaatgaaaagattgttataggtcatttaagtacgattgaagaacaattggtttctcaacaactagaaggtcatccaggcatatgcattttaggtaatatacttgatgacattaatcgtacgttattgaataataataagaatgacaagggaaatctatatttaatcaagggagataaagaacgtgcaattgcaaaggctgaaactttatatgatgaaggaatccaatgtctgattgattttgaccatagctaccacatttctcaacaaaacgtgtataacgaaatgattaaacacaagagtattaaaacaatatatgtataa

SEQ ID NO: 94 - protein, 277 aa, Artificial Sequence
  Description of Artificial Sequence: synthetic amino acid sequence
VILFDRLVNPFILQYASSQTKVINVGKKPYCKHIQQEEINQKIVEAANQYQCVVRLKGGDPAIFGRITEEVQTLENHHIHYEIVPGVTSASAAVATMNMGLTMRSIAPSVTFSTGHFKDSVNHDTDIRNLINGGTLAIYMGVKRLGQIIKQIESYTNEDYPIAIVFNASCYNEKIVIGHLSTIEEQLVSQQLEGHPGICILGNILDDINRTLLNNNKNDKGNLYLIKGDKERAIAKAETLYDEGIQCLIDFDHSYHISQQNVYNEMIKHKSIKTIYV

SEQ ID NO: 95 - DNA, 3684 bp, Artificial Sequence
  Description of Artificial Sequence: synthetic nucleic acid sequence
atgggaaaatttggattgaatttctttaaaccgacagaaaagtttaatggaaattggtcggtattagagcataaaagtcgagaatgggaaaagatgtatagagaaagatggagccacgacaaagttgtgagaacgacgcatggtgttaactgtactggatcatgttcatggaaagtatttgtcaaaaatggcgtaattacatgggaaaatcaacaaattgattatccaagttgtggacctgatatgccagaatttgagccaagaggttgtccgagaggtgcatcattttcttggtatgagtatagtccgttaagagttaaatatccttatattagaggtaaattattagatttatggaccgaagcgcttgaagaacaaaaaggaaaccgaattgcggcatgggcatccatcgtagaaaatgaagaaaaagccaaacaatataaagaagcaagaggtaaaggtggacacgtcagagcaaattggaaagatgccacagatatcattgcagctcaaattttatacaccataaaaaaagatggaccggatcgtattgctggatttactcctattcctgctatgtcgatgattagttatgcttcaggagcaagatttattaatttgttaggtggagaaatgttaagtttttacgattggtatgctgatttaccacctgcatctccacaaatttggggtgagcaaacagacgtgccagaatccagtgattggtacaacgcctcatacataatgatgtggggatcaaacgttccattaacacgtacacctgacgcacattttatgactgaagttagatataaaggggcgaaagttatttcagtagcacctgattatgctgagaatgttaagttcgccgatcattggcttgcaccacatccggggacagatgcagcggttgcacaagcaatgacacatgttattttacaggaatattatgaaaatcaaccgaatgatatgtttattaactatgctaagcaatattctgatatgccgtttgtcattatgttagatgaagatgagaatggctataaagcaggtagattcttgcgtgcttctgatttagggatgtcaggtgaaaataatgaatggaagccagttattcaagacaaattgagccaacaattacttgttcctaatggcacaatggggcaacgctgggaagaagggaaaaaatggaatttgaaacttgaaacagaggatggtacaccaattgatccaatgttatcaatggttgaaagtgactatcatgttgaaacgattcaatttccatattttgatagcagtggtgatggtatctttgagagacctattgcaacgagaactattcagttagctaacggagaagaagttaaaattgctacggtttatgatttaatgacgagtcaatatggtgttcaacgttttgaacacgaactagaagctacatcttatgatgacgcatcttctaaatatactcccgcttggcaagaacaaattacaggtatcaaaaaagaattagtgacgaaagtggcaaaagaatttgcacaaaatgctattgatactggtggacgctcaatgattattatgggggctggtatcaaccattggtttaactccgatactatttatcgttcaattcttaacttagtactattgtgtggttgtcaaggcgttaacggtggtggttgggcacactatgtaggacaagaaaaatgtcgaccaattgaaggatggaatactattgcattcgctaaagattggcaaggtcctccacgtttacaaaatggtacaagttggttctatttcgctacagatcaatggaagtatgaagaatcaaatgtagataaattaaaatcaccattagctgaaaatattaagcatcaacatccagctgattacaatgtaacagctgctcgtatgggctggttgccttcatatccacagtttaataaaaacagtctattatttggtgaagaggctaaagatgaaggtgatgattcaaatgaagccatcttacaaaaagcgattgaatcagttaaaaataaagatacacaatttgcgatagaagatccagatttaagaaaaaaccatcctaaaacattatttgtatggagatctaatttaatttctagttcagctaaaggacaagaatactttatgaagcacttgttaggtgcgcgctctggtttaatggcagagccaaatgaagatgataaaccagaggaaattaaatggcgcgaggatacagaagggaaacttgatttattagtatcacttgatttcagaatgactgcgacgccattatattcagatatcgttttacctgctgcaacttggtatgaaaaacatgatttatcttctacagacatgcatccatttattcatccatttaacccagcgattgacccattatgggaatcgcgttcggactgggatatttataaaactctaagtaaagctgtttcagaaatggcgaaagattatcttccaggtaaatttaaagatgtcgtaactacaccattaggacatgattcaaaacaagaaatttcaactgaatacggtattgtaaaagattggtctaaaggagaaattgaaggtgtgccaggtaaaacaatgcctaatttttctatcgtagagcgagactatacacaaatttacgataaattcgttactgttggtccaaaactagaaaaagggaaaataggtgctcatggtgtgagttatagcgttagtgaagagtacgaagaacttaaaagtatagttggaacttggaatgatgataatactatttcagttaaaaatgatagaccgagaatagatacagcgagaaaagtagcagatgtcattttgaatatatcctctgctacaaacggcaaattatcacaaaagtcatatgaagatttagaaaatcaaacaggtatggaacttaaagatatttctaaagaacgtgcttctgaaaagatatcattcttaaacattacttctcaaccaagagaagtgattccaactgcagtattccctggctctaataaagatggaagacgctactcaccgtttacaactaatgttgaacgtttagtgccatttagaacactaactggacgtcaaagttattatatagatcatgaggtattccaacagtttggcgaaagtttaccggtatataaacctactttacctccaatggtatttggtgctcgtgataaaaaagttaaaggtggacaagatacattagtgcttcgataccttacacctcatggaaaatggaatattcattcaacttatcaagataatgaacgcatgttgacgttgtttagaggtggaccagttgtatggatttcaaatgaagacgcagctgaccatggtattaatgataacgactggttagaagtatacaacagaaacggagttgttactgccagagctgtaacatctcatcgtatgcctagaggcacaatgtttatgtatcatgcacaagataaacatatagagacacctggttctgaaattactgatactcgtggaggttctcataatgcacctactcgtattcacttgaaacctactcaattagtaggaggatatgcacaaattagttatcactttaactattatggaccaattggaaatcaaagagatgagtatgtagctgttagaaaaatgaaggaggtcaattggcttgaagattaa

SEQ ID NO: 96 - protein, 1227 aa, Artificial Sequence
  Description of Artificial Sequence: synthetic amino acid sequence
MGKFGLNFFKPTEKFNGNWSVLEHKSREWEKMYRERWSHDKVVRTTHGVNCTGSCSWKVFVKNGVITWENQQIDYPSCGPDMPEFEPRGCPRGASFSWYEYSPLRVKYPYIRGKLLDLWTEALEEQKGNRIAAWASIVENEEKAKQYKEARGKGGHVRANWKDATDIIAAQILYTIKKDGPDRIAGFTPIPAMSMISYASGARFINLLGGEMLSFYDWYADLPPASPQIWGEQTDVPESSDWYNASYIMMWGSNVPLTRTPDAHFMTEVRYKGAKVISVAPDYAENVKFADHWLAPHPGTDAAVAQAMTHVILQEYYENQPNDMFINYAKQYSDMPFVIMLDEDENGYKAGRFLRASDLGMSGENNEWKPVIQDKLSQQLLVPNGTMGQRWEEGKKWNLKLETEDGTPIDPMLSMVESDYHVETIQFPYFDSSGDGIFERPIATRTIQLANGEEVKIATVYDLMTSQYGVQRFEHELEATSYDDASSKYTPAWQEQITGIKKELVTKVAKEFAQNAIDTGGRSMIIMGAGINHWFNSDTIYRSILNLVLLCGCQGVNGGGWAHYVGQEKCRPIEGWNTIAFAKDWQGPPRLQNGTSWFYFATDQWKYEESNVDKLKSPLAENIKHQHPADYNVTAARMGWLPSYPQFNKNSLLFGEEAKDEGDDSNEAILQKAIESVKNKDTQFAIEDPDLRKNHPKTLFVWRSNLISSSAKGQEYFMKHLLGARSGLMAEPNEDDKPEEIKWREDTEGKLDLLVSLDFRMTATPLYSDIVLPAATWYEKHDLSSTDMHPFIHPFNPAIDPLWESRSDWDIYKTLSKAVSEMAKDYLPGKFKDVVTTPLGHDSKQEISTEYGIVKDWSKGEIEGVPGKTMPNFSIVERDYTQIYDKFVTVGPKLEKGKIGAHGVSYSVSEEYEELKSIVGTWNDDNTISVKNDRPRIDTARKVADVILNISSATNGKLSQKSYEDLENQTGMELKDISKERASEKISFLNITSQPREVIPTAVFPGSNKDGRRYSPFTTNVERLVPFRTLTGRQSYYIDHEVFQQFGESLPVYKPTLPPMVFGARDKKVKGGQDTLVLRYLTPHGKWNIHSTYQDNERMLTLFRGGPVVWISNEDAADHGINDNDWLEVYNRNGVVTARAVTSHRMPRGTMFMYHAQDKHIETPGSEITDTRGGSHNAPTRIHLKPTQLVGGYAQISYHFNYYGPIGNQRDEYVAVRKMKEVNWLED

SEQ ID NO: 97 - DNA, 1530 bp, Artificial Sequence
  Description of Artificial Sequence: synthetic nucleic acid sequence
atggtattgaatctagacaaatgtattggttgtcatacttgcagtgtgacatgtaaaaacacatggacaaatcgacctggtgcagaatatatgtggtttaataacgtagaaacaaaaccgggtgtaggatatccaaaaagatgggaagaccaaggacaatataaaggtggttgggtgctaaataaaaaaggaaagcttgaattaaaatctggtaacagatggtcaaaaattgctttaggtaaaatcttctataatccagacatgccactcattcaagattattatgaaccgtggacatataactatgaacacttaaccaatgctaaacaaggacagcactctcccgtggcgacagctcactctttaatttcaggtgatagattgaatcttaaatgggggccaaactgggaagatgatttagctggaggtcacattacaggaccagaggatccaaatattcagaaaatagaagaagatattaaattccaattcgatgagacatttatgatgtatttaccaagactatgtgaacactgtttaaatccaagttgcgtagcatcttgtccatcaggagctatgtataaacgagatgaggatggtatcgtactcgtcgatcaagaagcctgtcgaggttggagatactgtatgactggatgtccgtataaaaaagtatattttaactggaaaacgaataaagctgaaaaatgtacattttgtttcccacgaatcgaagctggtatgccaactgtttgttccgaaacttgtacaggacgtatgagatatttaggtgttttattatatgacgcagatcgcgttcaagaagcggcttcagctaaagatgaaaaagacttatacgaaaaacaattagacctattccttgatccatttgatgaggaagtcattgcacaagctgaaaaagatggaataaatcaagaatggattacagcagctcaaaactcaccagtgtataaattggcaatagaatataaaatggcctttccattgcatcctgaatttagaactatgccgatggtgtggtattgtccacctttaagtcctattatgagttatttcgaaggtgaaaatgcaggtcaaaatccagatatgattttcccagctattgaggaaatgcgtttacctattcaatacttagcaaatttattaactgctggcgacacaaaacctgttaaagagggcttacaaaaaatggcgatgatgagaagttatatgcgttctcaaataacaaaccaacctttcgatacttctaaattagaacgattaggacttactgaaagacagatgactgaaatgtatcgcttactaggtattgctaaatatgaagatcgttttgttgtgccttcttcccataaagaaacatatttagatacttataaagcgcaaggaagtcaaggttacggtggagagtactttggctctaattgtgaaggttgtggtgttgcagttcaatcaggtaaaactggacaagaaatttataatgaaaatttctatggagggatcttccgtgattaa

SEQ ID NO: 98 - protein, 509 aa, Artificial Sequence
  Description of Artificial Sequence: synthetic amino acid sequence
MVLNLDKCIGCHTCSVTCKNTWTNRPGAEYMWFNNVETKPGVGYPKRWEDQGQYKGGWVLNKKGKLELKSGNRWSKIALGKIFYNPDMPLIQDYYEPWTYNYEHLTNAKQGQHSPVATAHSLISGDRLNLKWGPNWEDDLAGGHITGPEDPNIQKIEEDIKFQFDETFMMYLPRLCEHCLNPSCVASCPSGAMYKRDEDGIVLVDQEACRGWRYCMTGCPYKKVYFNWKTNKAEKCTFCFPRIEAGMPTVCSETCTGRMRYLGVLLYDADRVQEAASAKDEKDLYEKQLDLFLDPFDEEVIAQAEKDGINQEWITAAQNSPVYKLAIEYKMAFPLHPEFRTMPMVWYCPPLSPIMSYFEGENAGQNPDMIFPAIEEMRLPIQYLANLLTAGDTKPVKEGLQKMAMMRSYMRSQITNQPFDTSKLERLGLTERQMTEMYRLLGIAKYEDRFVVPSSHKETYLDTYKAQGSQGYGGEYFGSNCEGCGVAVQSGKTGQEIYNENFYGGIFRD

SEQ ID NO: 99 - DNA, 516 bp, Artificial Sequence
  Description of Artificial Sequence: synthetic nucleic acid sequence
atgaattttccagaaaaaatgacatttcatccaaaaatatttgaagaaactatttctaagtctcaccccggctacgaagatttgcttgcatatagagaagtcatgatgaattatactttgtcagaaattaaagctatctatacagatacatttgattttagtaaaaaacacccactctatatgacatttaataaatttgacacgcaaaaggaacggggtcaaatgctagctaaattaaaggttttatacgaaatgtttggactaaaaatggttgataatgaattatctgattttctcccattgatgctacagtttttgcaagttgctgattttaaaaatgatagtcgagcacaggaaaaccttcaacttgtcattatgattattgaagatggtacgtatgaaatggcaaataccctagctgaaaacaataatccctatgcatatgttgtcagtgcattaagaaaaacgttaaaagcgtgtatcgtgcctttgaaagaggtggaaaatcatgcttaa

SEQ ID NO: 100 - protein, 171 aa, Artificial Sequence
  Description of Artificial Sequence: synthetic amino acid sequence
MNFPEKMTFHPKIFEETISKSHPGYEDLLAYREVMMNYTLSEIKAIYTDTFDFSKKHPLYMTFNKFDTQKERGQMLAKLKVLYEMFGLKMVDNELSDFLPLMLQFLQVADFKNDSRAQENLQLVIMIIEDGTYEMANTLAENNNPYAYVVSALRKTLKACIVPLKEVENHA

SEQ ID NO: 101 - DNA, 369 bp, Artificial Sequence
  Description of Artificial Sequence: synthetic nucleic acid sequence
atgttgttgctaactttaagacgactatccatcaaaaacgttagacgattaagttcattttcagatatatttgtgaatatcgttttgttgattattttaataatgggttgttattctacgcttgtaaccaatgcgattcaacctgaatttgattatcgtcaaaccattgcgatatggtttagacatttattcatgttttctccaaatgctgacttaatgttaaacgtgccttggtcgtttaaactgcacatattattagggtttacagtgtttgcgtgttggccatttactcgtttagtacatgtttggagtgtaccactgtcttatatgaacagaagatatattgtttatcgcaaaaacaaaatttaa

SEQ ID NO: 102 - protein, 122 aa, Artificial Sequence
  Description of Artificial Sequence: synthetic amino acid sequence
MLLLTLRRLSIKNVRRLSSFSDIFVNIVLLIILIMGCYSTLVTNAIQPEFDYRQTIAIWFRHLFMFSPNADLMLNVPWSFKLHILLGFTVFACWPFTRLVHVWSVPLSYMNRRYIVYRKNKI

SEQ ID NO: 103 - DNA, 414 bp, Artificial Sequence
  Description of Artificial Sequence: synthetic nucleic acid sequence
atgaatttagataagttgagagcacaagagggttatgattttggtggtatcgctttatatgattatcatcacacttcatcaccaattaaatggcaatatgtttcaggtaacacaaatgatagatataaacttatcattttgagaaagggtagagggcttgctggaatggtgatgaaaaccggtaagcgtatggttattgctgatgtagatacagctttatctccagaagagaaagttaaatttccaatcattcttagtgagtcattgacagctgtagttgcagtccctttatggttagaaaattcaatgtatggcgttttattattaggtcaaagaaatcatcagccgttacctcagtcattggaccaacttaatattgaaaaacaaatcggtatttttacagaaataaactag

SEQ ID NO: 104 - protein, 137 aa, Artificial Sequence
  Description of Artificial Sequence: synthetic amino acid sequence
MNLDKLRAQEGYDFGGIALYDYHHTSSPIKWQYVSGNTNDRYKLIILRKGRGLAGMVMKTGKRMVIADVDTALSPEEKVKFPIILSESLTAVVAVPLWLENSMYGVLLLGQRNHQPLPQSLDQLNIEKQIGIFTEIN

SEQ ID NO: 105 - DNA, 1044 bp, Artificial Sequence
  Description of Artificial Sequence: synthetic nucleic acid sequence
gtggtaaatatgttggagcaaactgatttaagtttagagcaattacttaagaattattatgaaaccacgaacgagaaaattgtatttgttaatagacaaggcaaaattattgctatgaatgacgcagcaaaagatattttaactgaggaagataattataatgctatgacaaatgcgatttgtcatcgatgcgaaggatactctaatgaatatgatgtacaatcgtgtaaagattgttttttagagacaacgcaattacaacattccaatttccaagtatttatgaagacaaaagataatgaaattaagccttttacagctatgtatcaaaatattgatgaacaaagaggtattagtgcatttaccttacagaatgtggcgcctcagattgaaaggcaagaaaaaatgtatcaacaaaaaatgttacatcgttcaattcaagcacaagaaaatgaacgaaagcgtatttctagagaattacatgatagtgtaatacaggatatgctcaatatagatgttgaactaaggcttttgaagtataagcacagggataaggtgttagctgaaacatctcaacgtatagaaggcttattatcacagcttattgatgatattagaaatatgtctgttgaattaagaccttcttctctcgacgatttaggcattgaagcagcttttaaatcatattttaaacagtttgaagaaaattatggtatgcatattaaatatgattcgaacattaaaggcatgcgttttgataatgaaattgaaacagttgtgtatcgtgtagttcaagagggtgtatttaatgctctaaaatatgctgaggttaatgaaattgaggtaagtacgcatagtgatggcaagcagcttgtagcagaggttgtggatcgaggtaaagggtttagtttagatcatcaccctaaaggctctggacttggattgtacggaatgagagaacgtgcagaattagttaacggtcatgttaatatagagacacatattaatagaggtactataattacattagatataccgatttaa

SEQ ID NO: 106 - protein, 347 aa, Artificial Sequence
  Description of Artificial Sequence: synthetic amino acid sequence
VVNMLEQTDLSLEQLLKNYYETTNEKIVFVNRQGKIIAMNDAAKDILTEEDNYNAMTNAICHRCEGYSNEYDVQSCKDCFLETTQLQHSNFQVFMKTKDNEIKPFTAMYQNIDEQRGISAFTLQNVAPQIERQEKMYQQKMLHRSIQAQENERKRISRELHDSVIQDMLNIDVELRLLKYKHRDKVLAETSQRIEGLLSQLIDDIRNMSVELRPSSLDDLGIEAAFKSYFKQFEENYGMHIKYDSNIKGMRFDNEIETVVYRVVQEGVFNALKYAEVNEIEVSTHSDGKQLVAEVVDRGKGFSLDHHPKGSGLGLYGMRERAELVNGHVNIETHINRGTIITLDIPI

SEQ ID NO: 107 - DNA, 657 bp, Artificial Sequence
  Description of Artificial Sequence: synthetic nucleic acid sequence
gtgaaaatagttatagcggatgaccatgcagttgttaggacaggattttcaatgatattaaattatcaagaagatatggaagttgttgcaactgcagctgacggggttgaagcttatcaaaaagtgttagaacatcgaccagatgttttaattttagatttgagcatgccgccaggagagtcaggcttaatcgcaaccagtaaaatttctgaaagttttcctgatactaaaattttaatacttacgatgtttgatgacgaagaatatttatttcatgtgttaaaaagtggtgctaaaggatacattttaaaaaattcacctgatgagcaattaatattggccgtacgtacagtatatcaaggtgaaacttatgttgatatgaaattgacgacgtctttagtcaatgagtttgtcaatcaatcacaaacggatgaagtgtcatcatcttcagatccatttaaaattttatcgaaacgagagttagaaatattacctcttatagcaaaaggctatggcaataaagatattgcagaaaagttgtttgtatcggtgaaaacggtagaggcacataaaacgcatattatgacgaaactaaatttaaagagtaaacctgaattagttgaatatgccttaaagaaaaaattattagaattttaa

SEQ ID NO: 108 - protein, 218 aa, Artificial Sequence
  Description of Artificial Sequence: synthetic amino acid sequence
VKIVIADDHAVVRTGFSMILNYQEDMEVVATAADGVEAYQKVLEHRPDVLILDLSMPPGESGLIATSKISESFPDTKILILTMFDDEEYLFHVLKSGAKGYILKNSPDEQLILAVRTVYQGETYVDMKLTTSLVNEFVNQSQTDEVSSSSDPFKILSKRELEILPLIAKGYGNKDIAEKLFVSVKTVEAHKTHIMTKLNLKSKPELVEYALKKKLLEF

SEQ ID NO: 109 - DNA, 1278 bp, Artificial Sequence
  Description of Artificial Sequence: synthetic nucleic acid sequence
atgaaaagtttagataaaggatttagacatttaacacgaaaagataaattaaaaaaacttgttgaatacggttggctagatgatgaaaactatgaaatattacttaatcatccgttaattaatgaggaagtcgcaaacagtttaattgaaaatgtcattggtcaaggtgcactaccagtagggttattacctcgaattatagttgatgataaagaatatgtagtacctatgatggtagaggaaccttctgtcgtagcagcagcaagttatggcgcaaaactcgttaatcaaagtggtggatttaagacaatttcaagtgaacgtctaatgattggacaaattgtctttgatgatgttgaagacacaggcacattagctaactcaatatatcaaatagaatcacaaattcatcaaatcgctgatgaagcttacccttctattaaagcaagaggtggaggatatcaacgtattgaaatagatacattccctaatcatcgattattatctttgaaggtttttgttgatactaaagatgctatgggtgctaatatgttaaatacaatattagaagcaatcactgcacatctaaaagttaaattttcaaatcaaaatgttttaatgagtattttatctaatcatgcgacagcatcagtagtaaaagtacaaggggaaatagatattgaagatttacatagaggagagagaagtggcgaagaggtagcacaacgtatggaacgagcgtcagttcttgcacaagtagatatacatcgtgctgcaacacataacaaaggtgtgatgaatggtatacacgctgtagtattggctacaggcaatgatacaagaggagttgaagcaagtgctcatgcatatgcaagcaaagatggtcattatagagggatagctacttgggaatatgatcgctcacgtaataaattggttggaactattgaagttcctatgactttagcgacagtaggtggaggtacgaaagttttacctattgctaaagcctcattaaatttgcttaatgttgaaaatgcacaggaactagggcaagttgttgctgctgttggattagcacaaaatttctctgcatgtagagcgctagtgtctgaggggatacaacaaggacatatgagtttacaatataaatcattagcgattgttgtaggtgcaaaaggcgaagaaattgcgcaagtagctgaagcgctcaaatatgaatcacaagctaatactgccaaagctcaagaaatcttgatgaatataagaaagtcataa

SEQ ID NO: 110 - protein, 425 aa, Artificial Sequence
  Description of Artificial Sequence: synthetic amino acid sequence
MKSLDKGFRHLTRKDKLKKLVEYGWLDDENYEILLNHPLINEEVANSLIENVIGQGALPVGLLPRIIVDDKEYVVPMMVEEPSVVAAASYGAKLVNQSGGFKTISSERLMIGQIVFDDVEDTGTLANSIYQIESQIHQIADEAYPSIKARGGGYQRIEIDTFPNHRLLSLKVFVDTKDAMGANMLNTILEAITAHLKVKFSNQNVLMSILSNHATASVVKVQGEIDIEDLHRGERSGEEVAQRMERASVLAQVDIHRAATHNKGVMNGIHAVVLATGNDTRGVEASAHAYASKDGHYRGIATWEYDRSRNKLVGTIEVPMTLATVGGGTKVLPIAKASLNLLNVENAQELGQVVAAVGLAQNFSACRALVSEGIQQGHMSLQYKSLAIVVGAKGEEIAQVAEALKYESQANTAKAQEILMNIRKS

SEQ ID NO: 111 - DNA, 432 bp, Artificial Sequence
  Description of Artificial Sequence: synthetic nucleic acid sequence
atgaaattcaaaaaattattatctcgtattattatcgctacaatgattacatttactggaacactctcatatcaagctattgaacaaacgcatatttcccatgctgcacataattattatggtaaaaaacaatgcacttggtgggcatttaaacgtcgtgctcaattaggtaaacctgtatcaaatcgatggggtaatgctaagaattggtatagcaatgcacgtcgatctggttatgcaactggacataagcctcgaaaatacgctgttatgcaatcaacgagaggctattatgggcacgtagcagtggttgaaaaagtatataagaatggaaaaatcaaaatttctgaatataattataatgtgccattaggctacggcacacgcattattagtaaatcgtctgcacgaaactataattatatttattaa

SEQ ID NO: 112 - protein, 143 aa, Artificial Sequence
  Description of Artificial Sequence: synthetic amino acid sequence
MKFKKLLSRIIIATMITFTGTLSYQAIEQTHISHAAHNYYGKKQCTWWAFKRRAQLGKPVSNRWGNAKNWYSNARRSGYATGHKPRKYAVMQSTRGYYGHVAVVEKVYKNGKIKISEYNYNVPLGYGTRIISKSSARNYNYIY

SEQ ID NO: 113 - DNA, 1113 bp, Artificial Sequence
  Description of Artificial Sequence: synthetic nucleic acid sequence
atggctaaacttgcagaagcgcgccaagtcgatcctaataaatttttaattggaattggtcaaactgaaatgactgtgagcccagtgaatcaagatatcgtatctatgggagccaatgctgctaaagatattataacagaagaagataaaaagaatattggtatggttatagtagcaactgagtctgcgattgataatgccaaagcagcagccgttcaaattcaccatcttttaggtattcaaccctttgcaagatgctttgaaatgaaagaggcttgttatgcagcaacacctgcaattcaacttgccaaagattatcttgctcaacgccctaacgaaaaggttcttgtcattgctagtgacacagctcgttatggtattcattctggtggtgagcctactcaaggtgccggtgcagttgcaatgatgatttcacataacccaagtattttaaaacttaatgatgatgccgtagcatatactgaagacgtttatgatttctggcgtccaacgggtcatcaatatcccttagttgctggtgcattgtcgaaagatgcctatatcaagtcattccaagaaagttggaatgaatatgcacgtcgccataataaaacactcgctgatttcgcttcactatgtttccatgtaccattcaccaaaatgggacaaaaagctttagattctattattaatcatgccgatgaaactacacaagaccgtcttaactctagttaccaagatgcagttgattataatcgttatgtcggtaatatttacacagggtccttatatttaagtctcatctctttattagaaacacgtgatttaaaaggcggacaaacgattggtctctttagttatggttctggttctgtaggcgagttctttagtggaacattagtagatggattcaaggagcaattagatgttgagcgccacaaatttttattaaataatagaatagaggtttctgttgatgaatatgaacatttcttcaaacgctttgaccaattagaattgaatcatgaacttgaaaaatcaaatgcagatcgtgacattttctatttaaaatctattgataacaatattcgtgaatatcatatagcagaataa

SEQ ID NO: 114 - protein, 370 aa, Artificial Sequence
  Description of Artificial Sequence: synthetic amino acid sequence
MAKLAEARQVDPNKFLIGIGQTEMTVSPVNQDIVSMGANAAKDIITEEDKKNIGMVIVATESAIDNAKAAAVQIHHLLGIQPFARCFEMKEACYAATPAIQLAKDYLAQRPNEKVLVIASDTARYGIHSGGEPTQGAGAVAMMISHNPSILKLNDDAVAYTEDVYDFWRPTGHQYPLVAGALSKDAYIKSFQESWNEYARRHNKTLADFASLCFHVPFTKMGQKALDSIINHADETTQDRLNSSYQDAVDYNRYVGNIYTGSLYLSLISLLETRDLKGGQTIGLFSYGSGSVGEFFSGTLVDGFKEQLDVERHKFLLNNRIEVSVDEYEHFFKRFDQLELNHELEKSNADRDIFYLKSIDNNIREYHIAE

SEQ ID NO: 115 - DNA, 336 bp, Artificial Sequence
  Description of Artificial Sequence: synthetic nucleic acid sequence
gtgattgaagtaaaaaatacaggcgatagacctatacaagtaggttcacatttccactttttcgaagcaaataaagcattagaatttgatcgtgagaaagcatatggtaaacatttggatattcctgcaggagctgcagtgagatttgaacctggagatgaaaaaaaagtacaacttgtcgaatattctggacgacgtaaaatttatggattccgtggtttagtcgatggcgatattgacgaagaacgcgtattccgtccaaatgattcaaatcaaaacgccgccgttaaaaacgatgcaggcgaagacaatgcgaataaaaaaggtggtaaataa

SEQ ID NO: 116 - protein, 111 aa, Artificial Sequence
  Description of Artificial Sequence: synthetic amino acid sequence
VIEVKNTGDRPIQVGSHFHFFEANKALEFDREKAYGKHLDIPAGAAVRFEPGDEKKVQLVEYSGRRKIYGFRGLVDGDIDEERVFRPNDSNQNAAVKNDAGEDNANKKGGK

SEQ ID NO: 117 - DNA, 1716 bp, Artificial Sequence
  Description of Artificial Sequence: synthetic nucleic acid sequence
atgagttttaaaatgacacaatctcaatacacaagtctttatggaccaactgtaggagactctgtgagattaggagatacgaacttgtttgcacaagttgaaaaagactatgcaaattatggagatgaagctactttcggtggcggaaaatcaattcgtgatggtatggctcaaaatcctaatgtgacaagagatgataaaaatgtagccgatttagttttaactaacgcattaattattgattatgacaagattgttaaagcagatatcggaattaaaaatggttatatttttaagatcggtaaagctggaaacccagatataatggataacgttgacatcatcattggtgcaacaactgatattattgctgctgaaggtaaaattgttactgccggcggtatcgatacacacgtgcacttcatcaatcctgaacaagctgaagttgcacttgagagtggtattacaacgcatatcggtggaggaactggtgcttctgaaggtgctaaagcgactactgtaacaccaggaccttggcatattcatcgcatgttagaagcagcagaagagatgcctattaatgtaggatttactggtaaaggtcaagctgtcaatcatactgcacttattgaacaaattcatgcaggcgctataggtcttaaagtacatgaagattggggagctacaccttcagcattaagtcatgcattagacgttgcagatgagtttgatgttcaagtcgctttacatgcagatacattaaatgaagctggatttatggaagatacaatggctgctgtgaaagatcgtgtattgcatatgtatcatactgaaggagctggtggtggtcatgcacctgacttaatcaaatcagctgcatattcaaacatcttaccttcttctacaaacccaacattaccttacactcacaacactgtagatgaacatttagacatggttatgattactcaccatcttaatgcttcaataccagaagacattgcatttgcagattctcgtatacgtaaggaaactatagcagcagaagacgtattacaagatatgggcgtatttagtatggtaagttcagattcacaagcaatgggacgtgtcggtgaagttgtaacacgtacttggcaagttgcacaccgtatgaaagaacaacgcggaccattagatggtgactttgaatatcacgataataatcgtattaaacgttacattgcaaaatatacaatcaatcctgccattacacatggtatttctgactatgttggatctgtagaagcgggtaaacttgccgatttagtaatgtgggaaccagaattcttcggtgccaaacccgatcttgttgttaaaggtggcatgattaactcagcagtaaatggtgatgctaatggctccataccaacatcagagcctttgaaatatcgcaaaatgtatggtcaatttggtggtaacattacacatactgctatgacttttgtttctaacactgcatatgaaaacggtatttatcgtcaactcaatctaaaacgaatggttcgaccagttagaaatattagaaatttaactaaggcagatatgaaaaataataatgctacacctaaaatagatgtagatccacaaacatatgaggtattcgttgatggtaataaaatcacaagtgaagcagcaacagaattaccattaacacaaagatacttcttattctag

SEQ ID NO: 118 - protein, 571 aa, Artificial Sequence
  Description of Artificial Sequence: synthetic amino acid sequence
MSFKMTQSQYTSLYGPTVGDSVRLGDTNLFAQVEKDYANYGDEATFGGGKSIRDGMAQNPNVTRDDKNVADLVLTNALIIDYDKIVKADIGIKNGYIFKIGKAGNPDIMDNVDIIIGATTDIIAAEGKIVTAGGIDTHVHFINPEQAEVALESGITTHIGGGTGASEGAKATTVTPGPWHIHRMLEAAEEMPINVGFTGKGQAVNHTALIEQIHAGAIGLKVHEDWGATPSALSHALDVADEFDVQVALHADTLNEAGFMEDTMAAVKDRVLHMYHTEGAGGGHAPDLIKSAAYSNILPSSTNPTLPYTHNTVDEHLDMVMITHHLNASIPEDIAFADSRIRKETIAAEDVLQDMGVFSMVSSDSQAMGRVGEVVTRTWQVAHRMKEQRGPLDGDFEYHDNNRIKRYIAKYTINPAITHGISDYVGSVEAGKLADLVMWEPEFFGAKPDLVVKGGMINSAVNGDANGSIPTSEPLKYRKMYGQFGGNITHTAMTFVSNTAYENGIYRQLNLKRMVRPVRNIRNLTKADMKNNNATPKIDVDPQTYEVFVDGNKITSEAATELPLTQRYFLF

SEQ ID NO: 119 - DNA, 453 bp, Artificial Sequence
  Description of Artificial Sequence: synthetic nucleic acid sequence
atgattatagaagaaattcaaggaaatattgctaatttatctcaagatgaaaagcaaaaacatgtcgaaaaagtttatcttgaaaactcagatttggttaaacgtatacaacgtgttaaaacagatcacggtaatgaaatagggatacgtcttaaacaacctattgacctacaatatggtgatattttatatcaagacgatacaaacatgattattgtcgatgttaatagcgaagacttattagttattaaacctagaaatttaaaggaaatgggagacattgctcatcaactaggtaatcgccatctgcctgcccaatttacagaaactgaaatgcttattcaatatgactatcttgttgaagatttattaaaagagttgggtatcccctactcacatgaagacagaaaggtcaatcaagcatttcgacatataggacattcacatgattga

SEQ ID NO: 120 - protein, 150 aa, Artificial Sequence
  Description of Artificial Sequence: synthetic amino acid sequence
MIIEEIQGNIANLSQDEKQKHVEKVYLENSDLVKRIQRVKTDHGNEIGIRLKQPIDLQYGDILYQDDTNMIIVDVNSEDLLVIKPRNLKEMGDIAHQLGNRHLPAQFTETEMLIQYDYLVEDLLKELGIPYSHEDRKVNQAFRHIGHSHD

SEQ ID NO: 121 - DNA, 309 bp, Artificial Sequence
  Description of Artificial Sequence: synthetic nucleic acid sequence
atgccaaggtcctggtgttacagtagtcgctttagcaccttcagaagcaccagttcctccaccgatatgcgttgtaataccactctcaagtgcaacttcagcttgttcaggattgatgaagtgcacgtgtgtatcgataccgccggcagtaacaattttaccttcagcagcaataatatcagttgttgcaccaatgatgatgtcaacgttatccattatatctgggtttccagctttaccgatcttaaaaatataaccatttttaattccgatatctgctttaacaatcttgtcataatcaataattaa

SEQ ID NO: 122 - protein, 102 aa, Artificial Sequence
  Description of Artificial Sequence: synthetic amino acid sequence
MPRSWCYSSRFSTFRSTSSSTDMRCNTTLKCNFSLFRIDEVHVCIDTAGSNNFTFSSNNISCCTNDDVNVIHYIWVSSFTDLKNITIFNSDICFNNLVIINN

SEQ ID NO: 123 - DNA, 627 bp, Artificial Sequence
  Description of Artificial Sequence: synthetic nucleic acid sequence
atggtaataggcgtacctaattcatcattatctgcagcaagtggttatgctgaagaaataggcctaccatatgaaatgggactagttaaaaatcaatatgttgctcgaacttttatacaacctactcaggaattaagagagcaaggtgtacgtgtgaaactgtcggctgttaaggatattgttgatggtaaagatatcgtacttgtagatgattcgattgttcgaggtacaacgattaaacgcatagttaaaatgcttaaggattcaggagctaaccgcattcacgtaagaattgcttctcccgaattcatgttccctagtttttatggtattgacgtatctacaacagctgaactcatctcagcaagtaagtctcctgaggaaattaaaaatcatattggtgcagattctcttgcttatttaagcgttgatggcttaatcgagtctataggacttgattatgatgcgccatatcatggcttgtgtgtagaaagttttacaggtgattatccagcaggactttacgattatgagaaaaattataaaaagcatttaagtgaacgtcaaaaatcatatatagctaataataaacattattttgatagtgagggaaatttacatgtctaa

SEQ ID NO: 124 - protein, 208 aa, Artificial Sequence
  Description of Artificial Sequence: synthetic amino acid sequence
MVIGVPNSSLSAASGYAEEIGLPYEMGLVKNQYVARTFIQPTQELREQGVRVKLSAVKDIVDGKDIVLVDDSIVRGTTIKRIVKMLKDSGANRIHVRIASPEFMFPSFYGIDVSTTAELISASKSPEEIKNHIGADSLAYLSVDGLIESIGLDYDAPYHGLCVESFTGDYPAGLYDYEKNYKKHLSERQKSYIANNKHYFDSEGNLHV

SEQ ID NO: 125 - DNA, 774 bp, Artificial Sequence
  Description of Artificial Sequence: synthetic nucleic acid sequence
atggaccatagttccgcttcgaaaaaattaattaaagatatagagcaaaatcagtatgtaacagtaaaacatttatctcatgatgatttttatattgatgatttggtaaaaaagaaagaagtcattgcaagccttgaaatacctaaggatttctcaaaacaccttaaagataatgatttaaataagactcttccattatatagcagagatgattttataggacatattgctatggaaataatcagtcgatcattatacgaacaacaaatccctaatattattcatgaacatcttgatgatatgaaacaaccacaatccttagataaagtgaaacaatcttattattcgcttacacctcaatctaaaataaaaagtgtagctatcaataaacatgctcatcaatccatttcaattggcattgtatttgttgtcgtcatctttgtaagtgttatccaaatcctattacatcaacgtcttaaacagaacgcacctctcgaaagattatatttggtaccttatagtcaacttaaactatacttgacttatatcagtgtacatgtggtcatactgatgctcatgctattgatgattagccttttaatgcatcaaccattaagcattcttttctacttaaaaacactgattatagttttattttatgaggcaggtattgctttattactttttaaaattaatgttcttagtcaccgtatattcatggctattatttatacggtagcgataggtattatatatttatggattcaattgtaa

SEQ ID NO: 126 - protein, 257 aa, Artificial Sequence
  Description of Artificial Sequence: synthetic amino acid sequence
MDHSSASKKLIKDIEQNQYVTVKHLSHDDFYIDDLVKKKEVIASLEIPKDFSKHLKDNDLNKTLPLYSRDDFIGHIAMEIISRSLYEQQIPNIIHEHLDDMKQPQSLDKVKQSYYSLTPQSKIKSVAINKHAHQSISIGIVFVVVIFVSVIQILLHQRLKQNAPLERLYLVPYSQLKLYLTYISVHVVILMLMLLMISLLMHQPLSILFYLKTLIIVLFYEAGIALLLFKINVLSHRIFMAIIYTVAIGIIYLWIQL

SEQ ID NO: 127 - DNA, 669 bp, Artificial Sequence
  Description of Artificial Sequence: synthetic nucleic acid sequence
atgcttaacatcatgacaacaaaaataatgattccaacgatatcaaattttttattatatgcagactcatctttagattctggtatacctctaagcaatatgagtgaattaagtttaaataatataataagagaatttaacaagcgttttgaagaaaaatatagtcaaagttatgaatataaaaaattagatttttctgctactacaaccatttatgattcagaaatatcagagtttaaagattgggtagatgcaaattatttaggtactaacgttgaaaataacattcaaactgaaaaaagatttttatatgaaagaccaccagttagatatgatagtgtaacacctgagttagagttgttaaaaagaaattacgataaaaatgtaactgtatttggtaatttgcctaaaaaagcgatacaagttcctaaatatactggtggcactactacgcctgattttgtctatatgatagaaactgatgaacaagatgcaaaataccttattgttgaaacaaaagcagaaaacatgagactaggagataaaagtattggtgaaatacaaaaaaaattctttaacacattagataatttgaatattaaatatcaattagctactagcgcgcaagatgtttataatgaaattaaaaaattagatgattcaaagtga

SEQ ID NO: 128 - protein, 222 aa, Artificial Sequence
  Description of Artificial Sequence: synthetic amino acid sequence
MLNIMTTKIMIPTISNFLLYADSSLDSGIPLSNMSELSLNNIIREFNKRFEEKYSQSYEYKKLDFSATTTIYDSEISEFKDWVDANYLGTNVENNIQTEKRFLYERPPVRYDSVTPELELLKRNYDKNVTVFGNLPKKAIQVPKYTGGTTTPDFVYMIETDEQDAKYLIVETKAENMRLGDKSIGEIQKKFFNTLDNLNIKYQLATSAQDVYNEIKKLDDSK

SEQ ID NO: 129 - DNA, 1293 bp, Artificial Sequence
  Description of Artificial Sequence: synthetic nucleic acid sequence
atgatggggaaatcagaaaaaatttcattacttgaaaaagtccaagatggtttagtagataaaaccggagcaaaacctaagttaccaacaactattaccgatttaaatcaagaaactttagaggtatatagaataccactaaagtttctgtattataatgatagaaatggaagaattgcttctgtaatatccagagtaagcgacgatataaaagttgcttatgaatttgaagataataattataataaaagtattgaaaatatgatatatgaggctaatacttctgctttaaaaaacactaaaaaatctattaaagataaaggtcagcaagtatttggttatgtattagatgatggtagagttattgacggaaatagaaggtttactgcgcttagacagttagaacaagaaacaggaaatactttttattttgaagctgttattttaccatttacttatgataaaaagactgatcgagctaaaatcaagcaattagaacttgcaatacaaatgggtatagaaggaaagcaagattatgataaagttgatgaagcggtggatatttatcaaacaattgaagttgaaaagttgatgactgtagcggactatgcaaatgagtcaaataaaacaaaaaaaactattgaaaagcaattaggttctgcaaaattaataagaaaatttttagattttattaatgctcaagagaattcttattatattataaaagatgctggcatttattcattatttgaagaagcagtacctaagttagataaagcttatcctaaaggtggaccttcgttagaagatgctattgaaaaattttttagttttgtccttttgcaaattcaatcagggacaagcacacgggcatatgctggaagagattattttgaaaatatcgttttttcaaatgagggtagtcatcaatttaatacagaaacagaagatgctatcgatggtttgagagataaattagaagaaaaacgtgtagaatctaccgcagatttaaagagtacactaagccaatcgatacctgaactacgagaagtaagttcttcatataacaaagttgtaagcaaaagtaaacgaaatgctaatgtggaaagttttattgaaaatgttaaatcaatgtctgaaagtctcaatgatatggaaaaaggcaatggtttacctagtagtcttaattttgaacaatttaatctaaaacaattaaaagaaattagagaaatgctaataagaataaataattgtagtagagagttgatagatatttatgaacatgaaatctga

SEQ ID NO: 130 - protein, 430 aa, Artificial Sequence
  Description of Artificial Sequence: synthetic amino acid sequence
MMGKSEKISLLEKVQDGLVDKTGAKPKLPTTITDLNQETLEVYRIPLKFLYYNDRNGRIASVISRVSDDIKVAYEFEDNNYNKSIENMIYEANTSALKNTKKSIKDKGQQVFGYVLDDGRVIDGNRRFTALRQLEQETGNTFYFEAVILPFTYDKKTDRAKIKQLELAIQMGIEGKQDYDKVDEAVDIYQTIEVEKLMTVADYANESNKTKKTIEKQLGSAKLIRKFLDFINAQENSYYIIKDAGIYSLFEEAVPKLDKAYPKGGPSLEDAIEKFFSFVLLQIQSGTSTRAYAGRDYFENIVFSNEGSHQFNTETEDAIDGLRDKLEEKRVESTADLKSTLSQSIPELREVSSSYNKVVSKSKRNANVESFIENVKSMSESLNDMEKGNGLPSSLNFEQFNLKQLKEIREMLIRINNCSRELIDIYEHEI

SEQ ID NO: 131 - DNA, 504 bp, Artificial Sequence
  Description of Artificial Sequence: synthetic nucleic acid sequence
atgaatacaatcaaaagtacgatacacacagaagcgatttttagcgatgatgaacaacaccgatacttacttaaaaagacgtggaatgaaaagaagcccacatgtacagtgataacgatgtcccctcatttagacggcatattatcactcgatcttacaactgttcttatcctcaatcaattagcgaattcagaacgatacggtgctgtatatttagtgaatttattttcgaatattaaaaccccagataatctcaaacatattaaagagccttatgataaacatacagacagacacttaatgaaagcaataagtgagagtgacacagtaattctagcttatggagcctatgcgaagcgaccatttgttatcgaacgtgttgaacaagtgatggaaatgttgaagcctcacaaaaagaaaattaaaaagctcataaacccagcaacaaatgaaatcatgcacccactcaatcctaaagcacgccaaaaatggacattgaaataa

SEQ ID NO: 132 - protein, 167 aa, Artificial Sequence
  Description of Artificial Sequence: synthetic amino acid sequence
MNTIKSTIHTEAIFSDDEQHRYLLKKTWNEKKPTCTVITMSPHLDGILSLDLTTVLILNQLANSERYGAVYLVNLFSNIKTPDNLKHIKEPYDKHTDRHLMKAISESDTVILAYGAYAKRPFVIERVEQVMEMLKPHKKKIKKLINPATNEIMHPLNPKARQKWTLK

SEQ ID NO: 133 - DNA, 735 bp, Artificial Sequence
  Description of Artificial Sequence: synthetic nucleic acid sequence
gtgattacgcaaggagatagaattggatggttaaatcctcttatattgatattaattgctatattcattgtgacattaattgcattttatatatttgaaaaacgtcaagatgaaccttttatagatttaagtttattttcaaataatgtttatattggaacaacattagccaacttgatggtgaacatggatattggttcattagcattatttaatatttatgttcaagacgataaacatctatcagctgcacaagccggtttaattacaattccatatatgctgtgtagtttgttaatgattcgtgttggtgaacgttttatgcaaaaaagaggaccgcaattgccattgatgttaggtccggtatcaattactgttggtattatacttttagcattcacttctttgcctaatatgatttattatattgtggcatgtattggctttatctttataggtctaggattaggattttttgctacacccgcgctatctacagctgtatctaatgttccagctgaaaaagcaggtactgcatcaggaattatcaaaatgacttctacactaggtgcagcatttggaatcgctgttgtgacaacaatatatacggcattatctgtaaatcacccggcatatttagcagctactatcgcatttatcgtgggtgcaggtttagtgtttatcgcatttattgcggcgtattgtttaattcctaaaaagaatgtagatatctaa

SEQ ID NO: 134 - protein, 244 aa, Artificial Sequence
  Description of Artificial Sequence: synthetic amino acid sequence
VITQGDRIGWLNPLILILIAIFIVTLIAFYIFEKRQDEPFIDLSLFSNNVYIGTTLANLMVNMDIGSLALFNIYVQDDKHLSAAQAGLITIPYMLCSLLMIRVGERFMQKRGPQLPLMLGPVSITVGIILLAFTSLPNMIYYIVACIGFIFIGLGLGFFATPALSTAVSNVPAEKAGTASGIIKMTSTLGAAFGIAVVTTIYTALSVNHPAYLAATIAFIVGAGLVFIAFIAAYCLIPKKNVDI

SEQ ID NO: 135 - DNA, 351 bp, Artificial Sequence
  Description of Artificial Sequence: synthetic nucleic acid sequence
atgattggtatgtcgtttaatcaactaggtgcttttaaagaagctttaccatttttaatgactgcagctgaaatggacgatgatagagatttagaagtacagtttcaatatgggttagtactatgccaactcgaaatgtttgatgaagctattaaacaattaaataaggttctttctatcgattcacagcacgtagatggtatatataatcttggtttagcaacatatatgaaaaatgaaaatttagatgaagcaattgcatattttgaacaagcaatatcaattgatgaaaaacatttacttagtcaacatgcattaaagacattcaaaacaatgaaagaggaggaataa

SEQ ID NO: 136 - protein, 116 aa, Artificial Sequence
  Description of Artificial Sequence: synthetic amino acid sequence
MIGMSFNQLGAFKEALPFLMTAAEMDDDRDLEVQFQYGLVLCQLEMFDEAIKQLNKVLSIDSQHVDGIYNLGLATYMKNENLDEAIAYFEQAISIDEKHLLSQHALKTFKTMKEEE

SEQ ID NO: 137 - DNA, 2250 bp, Artificial Sequence
  Description of Artificial Sequence: synthetic nucleic acid sequence
atgtctgaccctacactttttgattattcaatgatcaaaggtacagttgatgctattttatttcaaaatacggataatttttatactgttctaaaagtagatactatagaatcaaatgaaaaatttgatagtatgccaactgtggtagggtttcttcccaatgtagttgaaggcgatgtttatacttttaaagggcaagtcgtacaacatccacgttatggtaagcaattaaaggctgaaacatttgaaaaagaattacctcaaactaaagaagccattattagttacttatcaagtgatttatttaaaggcatcggtaaaaaaacggctcaaaacattgtaaatacactaggtgaaaatgctataaatgatattttaactcgtccagaaatcttagaaagtgtacctagtttaccaaagaagaaacaaaagcaaattgctgatcagattaatgcaaaccaagaatctgagaaaattatgatacgtttacacgacctagggtttggtccgaaattatcaatggctatatatcagttctatatgggtgatactttaaatgtcttagataaaaatccttaccaattagtatatgacattaaaggtattggttttaataaggctgaccaacttgctcgaaatgtcggtattgagccacattcacctgaaagattaaaagcagcattattatttacgttagaagaagaatgtatcaaacaaggacatacatatctacctcgtacaattgttatagaaacaacacaaaatttactcaatgaagatattgagaaaccaattgaaacagagcaattactagaaatcattgacgttttatcagaagagaaaaaattaatatctgaagctgatcaggtatcaattccaagtttatactattcagaattgaaaagtgtgcaaaacttataccgaattaaaacaaacacatctaaattaaaagaaatagaacagtctgatttacaaatacatattggtgatattgagtcacaaaatgaggttaattactctgcctctcaaaaagaagcgcttgaaacagcaataaattctaaaattatgcttttaactggtggtccgggtaccggtaaaaccacagtcattaaaggtatagttgaattatatgcagaaatacatgggctctcgctcgattatgatgattacaatgaagatgattatccagtagtgttagctgcacccactggtcgtgcttctaagcgccttcacgaatcgacaggtttagaagcaatgacaattcatcgtttaatcggttggaaccaagatacacaaccacaggatattttagaaaatgagatcaatgcaagactcattatcatcgatgaaatgtcaatggtagatacttggttgttccatcaatttttaagcgctgtgcctttagaagcacaaattgtatttgtcggagatgaagatcagttaccatcagtaggtccaggacaggtatttaaagaccttattgattctgaaataataccgcgtgttaatcttaccgaagtatatcgtcagcaagatggttccagtattattgacttagctcaccgtatgaaattaaatgaacctatcgatattactaaacgttatcatgatcgtagttttattcgttgtggtacgaatcaaattccagacgttgttgataaagtagttaaaagcgctgtagctaaaggctatgatatgagtgatatacaagttttggctcctatgtataaaggtaacgctggtattaagagacttaaccaagttctacaatctattcttaatccgaagcaacaagatgatcgtgaaatagaatttggtgaagctgtgtttagaaaaggggataaagtacttcagttagttaatcgacctaatgataatatatttaatggggatataggtataatagtaggtatattttgggccaaagaaaatgctctaaataaggatgtgttagttgtagattttgaaggtaatgaaattacatttactaaacaagatttaatggaactaacacatgcatattgtacatctatccataaatcacaaggttcagaatttcctattgtaattatgcctattgttagacaatattataggatgttacaacgtcccattctttatacaggattaactagagctaaacaatcacttgttttatcgttaaagagagatatacatttttatttatttttaagatttctcagaaaaattaggtttttctcatttaattttaatcttagccatttataa

SEQ ID NO: 138 - protein, 749 aa, Artificial Sequence
  Description of Artificial Sequence: synthetic amino acid sequence
MSDPTLFDYSMIKGTVDAILFQNTDNFYTVLKVDTIESNEKFDSMPTVVGFLPNVVEGDVYTFKGQVVQHPRYGKQLKAETFEKELPQTKEAIISYLSSDLFKGIGKKTAQNIVNTLGENAINDILTRPEILESVPSLPKKKQKQIADQINANQESEKIMIRLHDLGFGPKLSMAIYQFYMGDTLNVLDKNPYQLVYDIKGIGFNKADQLARNVGIEPHSPERLKAALLFTLEEECIKQGHTYLPRTIVIETTQNLLNEDIEKPIETEQLLEIIDVLSEEKKLISEADQVSIPSLYYSELKSVQNLYRIKTNTSKLKEIEQSDLQIHIGDIESQNEVNYSASQKEALETAINSKIMLLTGGPGTGKTTVIKGIVELYAEIHGLSLDYDDYNEDDYPVVLAAPTGRASKRLHESTGLEAMTIHRLIGWNQDTQPQDILENEINARLIIIDEMSMVDTWLFHQFLSAVPLEAQIVFVGDEDQLPSVGPGQVFKDLIDSEIIPRVNLTEVYRQQDGSSIIDLAHRMKLNEPIDITKRYHDRSFIRCGTNQIPDVVDKVVKSAVAKGYDMSDIQVLAPMYKGNAGIKRLNQVLQSILNPKQQDDREIEFGEAVFRKGDKVLQLVNRPNDNIFNGDIGIIVGIFWAKENALNKDVLVVDFEGNEITFTKQDLMELTHAYCTSIHKSQGSEFPIVIMPIVRQYYRMLQRPILYTGLTRAKQSLVLSLKRDIHFYLFLRFLRKIRFFSFNFNLSHL

SEQ ID NO: 139 - DNA, 585 bp, Artificial Sequence
  Description of Artificial Sequence: synthetic nucleic acid sequence
atggcaatgtttgaattcaaacagaacgtacaaatctttggtaaatctattattctttcgcagtctggttatactggagaagatggctttgaaatttactgtaagcaagaagatactaaggatatatgggagcaattattagaatacgatgttacaccatgcggtttaggtgctcgtgatacgctaagacttgaagcaggattacctttacatggtcaagatttatctgaatcaattactccttatgaaggagggatagccttcgctgctaaaccgttaattgaaaatcattttattggcaaatccgtactcaaagctcaaaaagaaaatggttccgagcgtagaacagtaggtcttgaactattaggtaaaggcattgctagaacaggttatgacgtactagatgaaaatagtaatgaaattggtttcgttacatcaggaacacaatccccatcttctggtaaatctatagcacttgcaataatagatagagatgcatttgaaatgggcaaaaaagtaattgtgcaaatacgtaagcgtcaagttgaggcaaaaatagttaaaaaaaatcaaattgagaaataa

SEQ ID NO: 140 - protein, 194 aa, Artificial Sequence
  Description of Artificial Sequence: synthetic amino acid sequence
MAMFEFKQNVQIFGKSIILSQSGYTGEDGFEIYCKQEDTKDIWEQLLEYDVTPCGLGARDTLRLEAGLPLHGQDLSESITPYEGGIAFAAKPLIENHFIGKSVLKAQKENGSERRTVGLELLGKGIARTGYDVLDENSNEIGFVTSGTQSPSSGKSIALAIIDRDAFEMGKKVIVQIRKRQVEAKIVKKNQIEK

SEQ ID NO: 141 - DNA, 966 bp, Artificial Sequence
  Description of Artificial Sequence: synthetic nucleic acid sequence
atggatgtagcaaattcttctatgtatgatggtatgactagttttgctgaagcatgtatattggcactaagtcatacgaaaaaaaataaaattgtagtttcaagtggactacattatcaagctttacaaattctacacacatacgccaaaactcgtgatgaatttgaaataattgaagttgatcttaaaggtactattactgatttagagaaattagaacaacttatcgatgacaacacagcagctgtcgctgtccaatatcccaatttttatggttctattgaagatttagaacaaattaataactatataaaggataaaaaagctttatttatcgtatatgccaatccactttctttaggattactaacacccccaggtacattcggggcagacatagtagtgggagatacacagccttttggtattcctacacaatttgggggtccgcattgtggatactttgctacaacaaagaaattaatgagaaaagtacctggtcgattagttgggcaaactcaagatgacgaaggtaatcgtggatttgttctcacgttacaagctagagaacaacatatccgccgtgataaagcaacttctaatatttgttcaaatcaagctttaaatgcacttgcatcttcaatagcaatgtcagctttaggtaaacaaggtatttatgaaattgcagttcaaaatcttaaaaatgccaattatgccaaaaataagtttgaagaacatggttttgaggtactaaaagcacaatcttttaatgaatttgtagtcaaatttaatcaaccaataaaaaatattaatcttaaattagcagaatatggatatattggtggttttgacttaggtgaagtatctgatgattttaaaaaccatatgttagtagcagttacagagttaagatctaaagatgaaatcgatgatttcgttacgaaagcaggtgagttaaatgattag

SEQ ID NO: 142 - protein, 321 aa, Artificial Sequence
  Description of Artificial Sequence: synthetic amino acid sequence
MDVANSSMYDGMTSFAEACILALSHTKKNKIVVSSGLHYQALQILHTYAKTRDEFEIIEVDLKGTITDLEKLEQLIDDNTAAVAVQYPNFYGSIEDLEQINNYIKDKKALFIVYANPLSLGLLTPPGTFGADIVVGDTQPFGIPTQFGGPHCGYFATTKKLMRKVPGRLVGQTQDDEGNRGFVLTLQAREQHIRRDKATSNICSNQALNALASSIAMSALGKQGIYEIAVQNLKNANYAKNKFEEHGFEVLKAQSFNEFVVKFNQPIKNINLKLAEYGYIGGFDLGEVSDDFKNHMLVAVTELRSKDEIDDFVTKAGELND

SEQ ID NO: 143 - DNA, 1266 bp, Artificial Sequence
  Description of Artificial Sequence: synthetic nucleic acid sequence
atgaaatataatcctaaaatcaatgaaaaggtagcgcgtatttctggttttagtgaatctcatcctttacaagaagaagaacacgttcaaggttctcttgaaattatatatagtttacaagaagaattgaaggaaattactggtatggatgaagttaccctacaacctgctgcaggtgcacatggtgagtggactgctttaatgattttcaaagcttatcatgaaaaaaatggacaaagccatcgtgatgaagtaatagtgcctgattcagcacatggtactaatcctgcttctgcctcatttgctggatttaaatcagtaactgtaaaatctaatcaacgtggggaagttgacatagaagatttaaaaagagtagtaaacgataatacagctgcaatcatgttaactaatccaaatacattaggtatatttgaacaggatattattgaaatagggaaaatcgttcatgaagcaggaggtttattatattacgatggagcaaatttaaatgctattttagataaagtacgtcctggtgatatgggctttgatgcggtacatcttaatttgcacaaaacattcactggtcctcatggcggtggtggaccaggatcaggaccagttggagtagtagagaaattagccagttatctacctaagcctatggttataaaagataacgataggtataaatatgataatgatattccaaattcaattggacgagtaaaaccgttttatggaaatttcggcatttatttaagagcatatacttatatcagatcaatgggagccaatggtttaaaagaagtatctgaagctgccgttcttaatgcgaattatataaaatctcgccttaaaaatcactttgaaattccgttcaatcaatattgtaaacatgaatttgtattaagtggaactttacaaaaacaatatggtgtcagaacattagatatggctaagcgactgttagattttggtgtgcatccacctacaatatattttcctctcaatgtcgaagaaggaatgatgattgagccaacagaaactgaatctaaagaaacacttgattactttattgatgcgatgattcaaatcgctgacgaaacaaaaaatgatccagataaagttttagaagcaccacatacgactataattgatcgattagatgagaccactgcagcacgaaaaccaattcttaaatttgaagaacttaaggacgaaaagtataaagaacacacaaatattgattctgaagataattaa

SEQ ID NO: 144 - protein, 421 aa, Artificial Sequence
  Description of Artificial Sequence: synthetic amino acid sequence
MKYNPKINEKVARISGFSESHPLQEEEHVQGSLEIIYSLQEELKEITGMDEVTLQPAAGAHGEWTALMIFKAYHEKNGQSHRDEVIVPDSAHGTNPASASFAGFKSVTVKSNQRGEVDIEDLKRVVNDNTAAIMLTNPNTLGIFEQDIIEIGKIVHEAGGLLYYDGANLNAILDKVRPGDMGFDAVHLNLHKTFTGPHGGGGPGSGPVGVVEKLASYLPKPMVIKDNDRYKYDNDIPNSIGRVKPFYGNFGIYLRAYTYIRSMGANGLKEVSEAAVLNANYIKSRLKNHFEIPFNQYCKHEFVLSGTLQKQYGVRTLDMAKRLLDFGVHPPTIYFPLNVEEGMMIEPTETESKETLDYFIDAMIQIADETKNDPDKVLEAPHTTIIDRLDETTAARKPILKFEELKDEKYKEHTNIDSEDN

SEQ ID NO: 145 - DNA, 722 bp, Artificial Sequence
  Description of Artificial Sequence: synthetic nucleic acid sequence
atgattatgactgaaatatggaattttataaatactggaagcaaaaatccttattataatatggcaatggacgaagcgttactaaattttgtatcgcgtggagaaatcgatccagttataagattttatacttggaatcctgcaacactctcaataggctactttcagcgtctccaaaaagaaattgatattgataaagtaaaagaaaagggctatggcttagtaagacgtcaaacgggtggtagaggcgtgttacacgataaagaattaacatatagcgttattgttcctgagtctcatccaaatatgccttcaactgtaactgaagcttataaaattatttcacaaggattattagaaggttttaaaaatttaggttttgaaacttatttcgctatcccccgttctaaagaagaacgagacaaattaaagcaaccacgaagttcagtatgttttgatgcacctagttggtatgagcttgtagtagaaggcagaaaaattgcaggtagcgctcaaaccagacaaaaaggtgtcattcttcaacatggttcaattttacaagatatagatatcgatgatttatttgatatgtttaaatttaaaaatgaacgactaaaagcaaaaatgaaagaaaattttgttcaaaaagctgtagctattaatgacatttcaaatcaacatattacattaaatgaaatggagaacgcctttgaggcaggttt

SEQ ID NO: 146 - protein, 241 aa, Artificial Sequence
  Description of Artificial Sequence: synthetic amino acid sequence
  MOD_RES (241): variable amino acid
MIMTEIWNFINTGSKNPYYNMAMDEALLNFVSRGEIDPVIRFYTWNPATLSIGYFQRLQKEIDIDKVKEKGYGLVRRQTGGRGVLHDKELTYSVIVPESHPNMPSTVTEAYKIISQGLLEGFKNLGFETYFAIPRSKEERDKLKQPRSSVCFDAPSWYELVVEGRKIAGSAQTRQKGVILQHGSILQDIDIDDLFDMFKFKNERLKAKMKENFVQKAVAINDISNQHITLNEMENAFEAGX

SEQ ID NO: 147 - DNA, 1014 bp, Artificial Sequence
  Description of Artificial Sequence: synthetic nucleic acid sequence
atggaacgattttgttgtgtaaatcaaattaactatattcaaatgaatccgttagaagccaaatttaaaacgagcgctctaagatcatggaaaactgatcaggcagatgctcataagcttgcttgtttaggaccgacgctcaaacaaacaggcagcttacctatacatgagttaatattctttgaattaagagaacgtgcccgttttcatctagaaatcgagaatgaacaaaatcgacttaaatttcagattcttgaattactccatcaaacattccctggtttagaaagattatttagtagtcgatattcaatcattgcactcaacatcgcagaaatttttactcatccagacgtggttcttgatatcgacaaggatgtacttattacacatatattcaattctacagataagggaatgtcaatggataaagctacaaaatatgcacttcaattaagagtgattgctcaagaaagctatcctaatgtcgatagacattcctttctagtcgaaaaattacgcttacttattcaacaattaaaacaatctattcatcatctcaaacaattagatgatgccatgattcaattagcacaacaactcgattattttgaaaatattcattcgatacctggtattggtaagctaagcacagctatgattattggggagattggtgatattaagcgatttaaatcaaataaacaactcaacgcttttgtaggcattgatatcaaacgatatcaatcaggtcatacacactgtagagataccatcaacaagcgtggtaataaaaaagcgagaaaacttttattttgggtgattatgaatataataagagggcagcatcattatgacaatcatgtcgtcgattattactacaaactaagaaagcagcctaatgagaaacctcataagactgccatcattgcttgtataaatcgattattaaaaacgattcattatctggtaatgaatcataaattgtacgattatcaaatgtcaccacattag

SEQ ID NO: 148 - protein, 337 aa, Artificial Sequence
  Description of Artificial Sequence: synthetic amino acid sequence
MERFCCVNQINYIQMNPLEAKFKTSALRSWKTDQADAHKLACLGPTLKQTGSLPIHELIFFELRERARFHLEIENEQNRLKFQILELLHQTFPGLERLFSSRYSIIALNIAEIFTHPDVVLDIDKDVLITHIFNSTDKGMSMDKATKYALQLRVIAQESYPNVDRHSFLVEKLRLLIQQLKQSIHHLKQLDDAMIQLAQQLDYFENIHSIPGIGKLSTAMIIGEIGDIKRFKSNKQLNAFVGIDIKRYQSGHTHCRDTINKRGNKKARKLLFWVIMNIIRGQHHYDNHVVDYYYKLRKQPNEKPHKTAIIACINRLLKTIHYLVMNHKLYDYQMSPH

SEQ ID NO: 149 - DNA, 525 bp, Artificial Sequence
  Description of Artificial Sequence: synthetic nucleic acid sequence
atgcttgatacatctgacatcgaagggaaaacgattttagatgtgggatgtaatcaaggcggatttttacgacagttatacgatacaacaccgtttaaaaaaggtgttggcatagatttagcacgtttatctttggaaaaggcagagacattaaaaggacaacgtccacttacatactatttaacagataaaccgcaagaaacgaagcacgtgtttgatacggcagtaagtacgtctgtcttgtacttaatagaagatattccgcaacatgcaaaagatttaaaagaggtattgaaaccaggcggtgtttattacgcttcattcgcggatttaactaataacccaagtcgtcagtttatggatgacacgattaatcaatatggtgcaacaccttctcagaatcactctctaaaacatatcgttgatagctttgtggatgcaggatttgaagttgcagtaatgaaaaagcatgtacttataaatatttatctaaaaagattggatcaatcgttgaaacaactttaa

SEQ ID NO: 150 - protein, 174 aa, Artificial Sequence
  Description of Artificial Sequence: synthetic amino acid sequence
MLDTSDIEGKTILDVGCNQGGFLRQLYDTTPFKKGVGIDLARLSLEKAETLKGQRPLTYYLTDKPQETKHVFDTAVSTSVLYLIEDIPQHAKDLKEVLKPGGVYYASFADLTNNPSRQFMDDTINQYGATPSQNHSLKHIVDSFVDAGFEVAVMKKHVLINIYLKRLDQSLKQL

SEQ ID NO: 151 - DNA, 567 bp, Artificial Sequence
  Description of Artificial Sequence: synthetic nucleic acid sequence
atggatattgtattacaaaacaaggagcgtttaggtcttacagatattgtgaaaccagggggtctactttatttccatgtccatgaaccgcgtattaaatttaaaagttgggcagatatagatgaagaccaatttcaaaaagactatatcaaaaactttaaaatgagtggtttgcttaatcgtgaccaagaagtgttagacgctttagatattagacttgaaccaaagtataattcggatattgttccaatagcattaacagctaaaggcgctataaatcaacgtagtagtaaagtagctgatgaaaacatcatttatcaattaatagaacataataagaagaattttatcgagacagccagccacattatggatggacatacggaagtggcacccttgaagtacaaacaagtattaccttgtcaattttgtaattataaatcagtttgtcatgtagacggattaatagatagtaagcgttatagaacagtagatgaatcgataaaaccattagatttaattcaacaattaagaaatgaaggtggtgaaagacatgattccaactaa

SEQ ID NO: 152 - protein, 188 aa, Artificial Sequence
  Description of Artificial Sequence: synthetic amino acid sequence
MDIVLQNKERLGLTDIVKPGGLLYFHVHEPRIKFKSWADIDEDQFQKDYIKNFKMSGLLNRDQEVLDALDIRLEPKYNSDIVPIALTAKGAINQRSSKVADENIIYQLIEHNKKNFIETASHIMDGHTEVAPLKYKQVLPCQFCNYKSVCHVDGLIDSKRYRTVDESIKPLDLIQQLRNEGGERHDSN

SEQ ID NO: 153 - DNA, 3021 bp, Artificial Sequence
  Description of Artificial Sequence: synthetic nucleic acid sequence
atgcagcttatcaatgatttagcaatgatttttatgaaagcaggatatgaggaattacaaaaaagttatgacttattctcaatgatggaaagtgttgataagcagcttgaagttattgaaaccgaacgcatgtttattactaaagctattgaaggtaaagtattaaatacagatgttatcacgcaacatgaatttatgagtcgttttccggcaataaatagcaagataaaagaagcaaatgaaggcatggaagatgctttaaatgaagcaaaacaacattatgataaatataaatctttagttatgaaagtaaagaatgattatttttctagaaatgcagaagatttgcaaagagatatgcaacaactcgcacctcgagtggcttatttagctcaaatagttcaagatgtgattcaatcatttggtgttcaaaaacgaagtcgtaatattttggatttttcagattatgaacattttgcattacgcattcttactaacgaagatggctcaccttcgcgtatcgctgaaacgtatcgtgaacattttaaagaaatcctagttgatgagtatcaagatactaatagagtgcaagaaaaaatattatcttgtattaaaactggtgaagaacacgatggtaacttgttcatggttggggatgtgaagcagtctatttataaatttagacaagctgatcctagtttatttattgaaaaatataatcgcttttctagtagtggaaatgaaagtggcttgcgcattgacttatcgcaaaactttcgttcgagacaggaagtgttatctacaaccaattacttgttcaaacatatgatggatgaacaagtaggagaaatttcatatgatgatgcagcgcaattgtattttggtgcaccatatgacgaagtttcacatcctgttcaattacgagcacttgttgaggcaagttcagaaaatagtgacttaactggaagtgaacaagaagcgaattacattgttgaacaagttaaagatattattaatcatcaaaacgtatacgatatgaaaacaggtcaatacagaaaagcaacatataaagatatcgtaattttagagcgaagttttggtcaagcgcgtaatcttcaacaagcttttaaaaataatgatatcccttttcacgtaaatagtaaggaagggtattttgagcaaactgaagtacgtcttgtgctttcatttttaagaacaatagataatccacttcaagacatttatttagtgggattgatgcgttctgtaatatatcaatttactgaagaagaattagctgaaataagagttgtaagccctcatgatgattacttttatcaatctataaaaaattatatgattgatgaaaaagctgattctagattggttgacaagttaaatcgttttattcaggatatacaaaaatatcaaaattatagtctaagtcaaccggtttaccaattaattgataaattttataatgatcattttgtaattcagtactttagcggtcttattggaggtaaaggtagaagagcaaatctgtatgggctatttaataaagctgttgaatttgaaaattcaagtttcagaggtttattccaatttattcgttttattgatgagcttattgatcgtaaaaaagattttggtgaagaaaatgtcgtaggtcctaacgataatgtggttagaatgatgacgattcacagtagtaaaggattagaatttccatttgtaatttactcaggattatctaaaaaattcaacaaaggtgacctgaatgcaccagttattctaaatcaacaatatggtttaggtatggattattttgatgtaaataaagatatggcttttccttcacttgcctctgtggcatatagagcaataaatgaaaaagaacttatatcagaagagatgcgtttaatctatgttgcgttgacacgagcaaaagagcaacttattttagttggaagagtcaaagatgaaaagtcgttaattaaatatgaacaattagctgtttcagacacacatatagcagttaatgaacgccttactgctaccaatccatttgttctaatttatggtgttttggctaagcatcaatcgccttcattgccaaatgatcaaagatttgaaagagatattgatcaattaaattctgaagtgaagccacgtgtatcaatagtgattgatcattatgaggatgtttcaactgaagaagtagtcaatgataatgaaataagaacaatcgaagaattaaaggccataaatactggtaatgaagatgtgaaaattaaaattcatcaacagctttcttatgactatccttttaaagttaacacgatgaaaccatctaaacagtcggtatcagagttaaaacgtcaattagaaactgaagaaagtaatacaaattatgatagagtacgtcaatatcgtattggtgttgcatcatatgaaagacccaagtttcttacccaaacaaaaaaaagaaaagcaaatgaaatagggactttaatgcatacagtcatgcaacacttaccttttagagaacaacgtttaacaaaagacgaattatttcaatatatcgatcgattgattgacaaacaacttattgatgaagatgcaaaagaggatattagaatagatgagattatgcatttcattgatggccctctctatatggaaatagctcaagctgacaatgtttatactgaattaccttttgtggtaaatcaaattaaagttgatggacttacaagtgaagatgaagatgtatccattattcaaggtatgattgatttaatatatgaaagtgacggacaattttactttgttgattacaaaacagatgcttttaatagaagaaaaggtatgagtgatgaagaaatagggaatcagctcaaagaaaaatatcagatacaaatgacgtattatcgaaatactttagaaaccatacttaaacgacccgtaaagggttacttatattttttcaaatttggtacattagaaatagatgattaa

SEQ ID NO: 154 - protein, 1006 aa, Artificial Sequence
  Description of Artificial Sequence: synthetic amino acid sequence
MQLINDLAMIFMKAGYEELQKSYDLFSMMESVDKQLEVIETERMFITKAIEGKVLNTDVITQHEFMSRFPAINSKIKEANEGMEDALNEAKQHYDKYKSLVMKVKNDYFSRNAEDLQRDMQQLAPRVAYLAQIVQDVIQSFGVQKRSRNILDFSDYEHFALRILTNEDGSPSRIAETYREHFKEILVDEYQDTNRVQEKILSCIKTGEEHDGNLFMVGDVKQSIYKFRQADPSLFIEKYNRFSSSGNESGLRIDLSQNFRSRQEVLSTTNYLFKHMMDEQVGEISYDDAAQLYFGAPYDEVSHPVQLRALVEASSENSDLTGSEQEANYIVEQVKDIINHQNVYDMKTGQYRKATYKDIVILERSFGQARNLQQAFKNNDIPFHVNSKEGYFEQTEVRLVLSFLRTIDNPLQDIYLVGLMRSVIYQFTEEELAEIRVVSPHDDYFYQSIKNYMIDEKADSRLVDKLNRFIQDIQKYQNYSLSQPVYQLIDKFYNDHFVIQYFSGLIGGKGRRANLYGLFNKAVEFENSSFRGLFQFIRFIDELIDRKKDFGEENVVGPNDNVVRMMTIHSSKGLEFPFVIYSGLSKKFNKGDLNAPVILNQQYGLGMDYFDVNKDMAFPSLASVAYRAINEKELISEEMRLIYVALTRAKEQLILVGRVKDEKSLIKYEQLAVSDTHIAVNERLTATNPFVLIYGVLAKHQSPSLPNDQRFERDIDQLNSEVKPRVSIVIDHYEDVSTEEVVNDNEIRTIEELKAINTGNEDVKIKIHQQLSYDYPFKVNTMKPSKQSVSELKRQLETEESNTNYDRVRQYRIGVASYERPKFLTQTKKRKANEIGTLMHTVMQHLPFREQRLTKDELFQYIDRLIDKQLIDEDAKEDIRIDEIMHFIDGPLYMEIAQADNVYTELPFVVNQIKVDGLTSEDEDVSIIQGMIDLIYESDGQFYFVDYKTDAFNRRKGMSDEEIGNQLKEKYQIQMTYYRNTLETILKRPVKGYLYFFKFGTLEIDD

SEQ ID NO: 155 - DNA, 1014 bp, Artificial Sequence
  Description of Artificial Sequence: synthetic nucleic acid sequence
atggaacgattttgttgtgtaaatcaaattaactatattcaaatgaatccgttagaagccaaatttaaaacgagcgctctaagatcatggaaaactgatcaggcagatgctcataagcttgcttgtttaggaccgacgcttaaacaaacagacaacttacctatacatgagttaatattctttgaattaagagaacgcgtccgttttcatctagaaatcgagaatgaacaaaatcgacttaaatttcagatccttgaattactccatcaaacattccctggtttagaaagattgtttagtagtcgatattcaatcattgcactcaacatcgcagaaatctttactcatccagacatggttcttgatatcgacaaggaggtactgattacacatatattcaattctacagataagggaatgtcaatggataaagctacaaaatatgcacttcaattaagggtgattgctcaagaaagctatcctaatgtcgatagacattcctttctagtcgaaaaattacgcttacttattcaacaattaaaacaatctattcatcatctcaaacaattagatgatgccatgattcaattagcacaacaactcgattattttgaaaatattcattcgatacctggtattggtaagctaagcacagctatgattattggggagattggtgatattaagcgatttaaatcaaataaacaactcaatgcttttgttggcattgatatcaaacgatatcaatcaggtcatacacactgtagagataccatcaacaagcgtggtaataaaaaagcgagaaaacttttattttgggtgattatgaatataataagagggcagcatcattatgacaatcatgtcgtcgattattactacaaactaagaaagcagcctaatgagaaacctcataagactgccatcattgcttgtataaatcgattattaaaaacaattcattatcttgtaatgaatcataaattgtacgattatcaaatgtcaccacattag

SEQ ID NO: 156 - protein, 337 aa, Artificial Sequence
  Description of Artificial Sequence: synthetic amino acid sequence
MERFCCVNQINYIQMNPLEAKFKTSALRSWKTDQADAHKLACLGPTLKQTDNLPIHELIFFELRERVRFHLEIENEQNRLKFQILELLHQTFPGLERLFSSRYSIIALNIAEIFTHPDMVLDIDKEVLITHIFNSTDKGMSMDKATKYALQLRVIAQESYPNVDRHSFLVEKLRLLIQQLKQSIHHLKQLDDAMIQLAQQLDYFENIHSIPGIGKLSTAMIIGEIGDIKRFKSNKQLNAFVGIDIKRYQSGHTHCRDTINKRGNKKARKLLFWVIMNIIRGQHHYDNHVVDYYYKLRKQPNEKPHKTAIIACINRLLKTIHYLVMNHKLYDYQMSPH

SEQ ID NO: 157 - DNA, 318 bp, Artificial Sequence
  Description of Artificial Sequence: synthetic nucleic acid sequence
gtgatactgatggaagaagcactaaaagatagtatcttaggcgctcttgaaatggtaatagatcctgagttagggatagatatcgttaatttaggtttagtatataaagttgatgttgatgatgaaggtttatgtacagttgaaatgacattgacttcgatgggatgtccattaggaccacaaattattgaacaagttaagagtgttttggctgagattcctgaaatttctgatacagaagtgatgattgtatggagtccaccttggaataaagatatgatgtcacgatatgccaaaatagctttaggcatcggataa

SEQ ID NO: 158 - protein, 105 aa, Artificial Sequence
  Description of Artificial Sequence: synthetic amino acid sequence
VILMEEALKDSILGALEMVIDPELGIDIVNLGLVYKVDVDDEGLCTVEMTLTSMGCPLGPQIIEQVKSVLAEIPEISDTEVMIVWSPPWNKDMMSRYAKIALGIG

SEQ ID NO: 159 - DNA, 1086 bp, Artificial Sequence
  Description of Artificial Sequence: synthetic nucleic acid sequence
atgcctggattagatggtttgcgagcaattgcagtcattggtattattatttatcacttgaataaacaatggttaacaggtggttttttaggcgtagatactttttttgttatttcaggttatttgattacgagcttattacttaaagagtatgaagatactggaacaataaatcttaaaaatttttggattcgtcgtattaaaaggttattaccagcggtatttgcattaatagtagtagttggaattgcaactttattattgcaccccgagcatattgtaagagttaaacatgatatgatagcagcaatattttacgtatctaattggtggtatattgctaaagatgtcaattatttcgagcaattttcttttatgcctttaaagcacctatggtcactagccattgaagagcagttttacctttttttcccagcagtactcttattatttatggcaatagttaagaaaaagaaaaatgtcatactgatgttttggatcatatccctggtttcattattaatgatggttgttatttctcaacctcacttgaaccattctagagtatattttggaactgatacaagattgcagacactgcttttaggtgtacttctagcatttatctggccaccttttaaattaaatcccaatccacctaaaggattaaaaactgtgattaatagtgcgggtatcataggacttacatttttaattctattattctttactgttagtgatgaaagtgattggatttataacggtggattttatcttatttcaacaatgactttgctaattattgcaagtgttgttcatccaacgacaattttagctaagttattaggaaatcctttatttgtctacattggaaagcgttcatacagtttatacttatggcattttcctgtaattagctttattcatagttattttattgatggtcaattaccaacttatgtttatattatggatatcgtaattactgtattattagccgaattatcatttagatatgttgaaacgccattaagaaaggaaggtctaaaggcttttacagtgtgctcccttaaaaattatttttag

SEQ ID NO: 160 - protein, 361 aa, Artificial Sequence
  Description of Artificial Sequence: synthetic amino acid sequence
MPGLDGLRAIAVIGIIIYHLNKQWLTGGFLGVDTFFVISGYLITSLLLKEYEDTGTINLKNFWIRRIKRLLPAVFALIVVVGIATLLLHPEHIVRVKHDMIAAIFYVSNWWYIAKDVNYFEQFSFMPLKHLWSLAIEEQFYLFFPAVLLLFMAIVKKKKNVILMFWIISLVSLLMMVVISQPHLNHSRVYFGTDTRLQTLLLGVLLAFIWPPFKLNPNPPKGLKTVINSAGIIGLTFLILLFFTVSDESDWIYNGGFYLISTMTLLIIASVVHPTTILAKLLGNPLFVYIGKRSYSLYLWHFPVISFIHSYFIDGQLPTYVYIMDIVITVLLAELSFRYVETPLRKEGLKAFTVCSLKNYF

SEQ ID NO: 161 - DNA, 711 bp, Artificial Sequence
  Description of Artificial Sequence: synthetic nucleic acid sequence
atgaaaaacgcactaaaactttttatcacggatttaaaaagagttgctaaaacaccaggtgtatgggtcatcttagctggtttagcaattcttccttcattctatgcatggtttaacctctgggctatgtgggatccgtatggtcatacaggacatatcaaagttgccgtagtgaatgaagaccaaggtgaaaaagttcgtggtaagaatattaatgtaggaaataaaatggtcaaaactttaaaaaagaatgatagttttgactggcaatttgtgagtagagaaaaagccgaccatgaaattaagatgggaaaatattatgcaggtatttatataccgaagaaattcacacatgaaatcactggtactttaagaaaacatcctcaaaaggcggatatagattttaaagtaaatcagaagattaatgctgtagcagctaagttaaccgatacgggatcgtcgtttgtgattgataaagcaaataaacaatttaacaaaaccgtagcaaccgctttactttctgaagctaataaagtcggactatcaattgaagataatgtacctacaatcaataaaattaagagtgctgtatatcaagctaataattcattgcctaaaattaatcaatttgcagacaagattattgaactaaataaacatcaagacgatttggatgcttatgctaatcaatttagaagtttaggaaagtat

SEQ ID NO: 162 - protein, 237 aa, Artificial Sequence
  Description of Artificial Sequence: synthetic amino acid sequence
MKNALKLFITDLKRVAKTPGVWVILAGLAILPSFYAWFNLWAMWDPYGHTGHIKVAVVNEDQGEKVRGKNINVGNKMVKTLKKNDSFDWQFVSREKADHEIKMGKYYAGIYIPKKFTHEITGTLRKHPQKADIDFKVNQKINAVAAKLTDTGSSFVIDKANKQFNKTVATALLSEANKVGLSIEDNVPTINKIKSAVYQANNSLPKINQFADKIIELNKHQDDLDAYANQFRSLGKY

SEQ ID NO: 163 - DNA, 393 bp, Artificial Sequence
  Description of Artificial Sequence: synthetic nucleic acid sequence
atgagtagctatcctttatattatccgatgcctaaagctattttggcatatcgtgacatcatatctttattccaaggtggactccatacaatcatcacttctgtatcagaaatttcaggaatctcagccaaaacactcttaacttgttcaataatttgtggtcctaatggacatcccatcgaagtcaatgtcatttcaactgtacataaaccttcatcatcaacatcaactttatatactaaacctaaattaacgatatctatccctaactcaggatctattaccatttcaagagcgcctaagatactatcttttagtgcttcttccatcagtatcacctctttaaaattttctttacaccaatatatcaaatatccgacaaaacgccaataa

SEQ ID NO: 164 - protein, 130 aa, Artificial Sequence
  Description of Artificial Sequence: synthetic amino acid sequence
MSSYPLYYPMPKAILAYRDIISLFQGGLHTIITSVSEISGISAKTLLTCSIICGPNGHPIEVNVISTVHKPSSSTSTLYTKPKLTISIPNSGSITISRAPKILSFSASSISITSLKFSLHQYIKYPTKRQ

SEQ ID NO: 165 - DNA, 822 bp, Artificial Sequence
  Description of Artificial Sequence: synthetic nucleic acid sequence
atgcaaccttatttaatttgtctagatctagatggtacattattaaatgacaataaagaaatctcaccttacactaaacaagtattaaccgaattacaacaatgtggacactacgttatgattgctactggaagaccctatcgcgcaagccagatgtattatcatgaactaaatatgagcacacctgttgttaactttaatggagcatttgtacatcatccaaaagcaaacgattttaaagtgatacatgaagtacttgatgtggaaatttctaaaaatattattacagcacttcaacaatctcatattacaaatatcattgctgaagtaaaagactatgtctttataaatagttatgattcaagactttacgaaggtttttcaatgggaaatcctaaaattcaaacaggtaatttacttgaaaatcttaatgaagcacctacgtcattacttgttgaagcagaagaagaaaatattcctgaaattaaagatatgttaacacatttttatgcagaaaatattgaacatcgtcgttggggcgcaccgtttccagtaatagaaattgtgaagcgtgggattaacaaagcacgtggaatcaagcatgttcaaaactatttaaacatcgccgacgatcatatcattgcgtttggtgatgaggacaatgatatagaaatgataaagtttgcgacccatggcattgcaatggccaatggcttgaaagatttaaaggaaatagcaaatgagactacgtatagtaataatgaagacggaataggtcgttatttaaatgacttttttaatttgaaaatacgttattattaa

SEQ ID NO: 166 - protein, 273 aa, Artificial Sequence
  Description of Artificial Sequence: synthetic amino acid sequence
MQPYLICLDLDGTLLNDNKEISPYTKQVLTELQQCGHYVMIATGRPYRASQMYYHELNMSTPVVNFNGAFVHHPKANDFKVIHEVLDVEISKNIITALQQSHITNIIAEVKDYVFINSYDSRLYEGFSMGNPKIQTGNLLENLNEAPTSLLVEAEEENIPEIKDMLTHFYAENIEHRRWGAPFPVIEIVKRGINKARGIKHVQNYLNIADDHIIAFGDEDNDIEMIKFATHGIAMANGLKDLKEIANETTYSNNEDGIGRYLNDFFNLKIRYY

SEQ ID NO: 167 - DNA, 1317 bp, Artificial Sequence
  Description of Artificial Sequence: synthetic nucleic acid sequence
atgaataaaattataatagtcggtgcagttgctggtggtgcgacttgtgcaagtcaaattcgaagattagataaagagagtgaaatcattgtttttgaaaaagatagagacatgagctttgctaattgtgcattaccttattatattggcaacgttatcgaggaccgtcgtaaagttttagcatacacgcccaatcaattttatgacaaaaagcaaatcactgtaaaaacataccatgaagttatacaaatcaatgatgagagacaaacagttactgtcttaaatcatcaaactaatcaaacttttgaagaaagttacgatacattgattttaagtcctggcgcatctgcaaatcgattaaacactcatagtgatatctcatttactgtgcgaaatctcgaagatactgaaacaattgatacctttattacgaataccaaagcacaacgtgcacttgttgttggcgcgggttacatctctttagaagtccttgaaaatttacatcatagaggtttggatgtcacatggattcatcgctctacaaatattaataaactgatggatcaagatatgaatcaacccatcatcgacgaaatagaaaagagaaatatcacttatagatttaacgaagaaattagtcacgtaaatggacatgaagttacattcacatctggtaaagttgaaaactttgatcttattatcgaaggtgtaggtactcatccaaattcacaatttattaaatcatctaacgtcatactgaatgataaaggttatatcccagtaaatcataatttccaaacaaatataccaaatatttatgcattaggtgatgttattacttcacattatcgtcatgtgaatttaccggcacaggttccacttgcttggggagcacaccgtggtgcaagtattatagctgaacaactttctggaaattcgtctattcactttaaaggttatctaggaaataatatagtgaaattttttgactatacattagcaagtgttggcatcaaaccaaatgaacttaaaaatttcgattatgatatggttgaagttaagcaaggagctcatgcaggatattacccaggaaattcaccactacatttacgtgtttattttgaaaaagactcgagaaaacttatacgcgcagcagcagttggtaaacaaggtgccgataaaagaatagacgtattatcaatggcaatgatgaataatgctactgtggatgatttaacagaatttgaagtagcatatgcacctccttatagtcatccaaaagatttaattaatttaattgggtataaagcgcaataa

SEQ ID NO: 168 - protein, 438 aa, Artificial Sequence
  Description of Artificial Sequence: synthetic amino acid sequence
MNKIIIVGAVAGGATCASQIRRLDKESEIIVFEKDRDMSFANCALPYYIGNVIEDRRKVLAYTPNQFYDKKQITVKTYHEVIQINDERQTVTVLNHQTNQTFEESYDTLILSPGASANRLNTHSDISFTVRNLEDTETIDTFITNTKAQRALVVGAGYISLEVLENLHHRGLDVTWIHRSTNINKLMDQDMNQPIIDEIEKRNITYRFNEEISHVNGHEVTFTSGKVENFDLIIEGVGTHPNSQFIKSSNVILNDKGYIPVNHNFQTNIPNIYALGDVITSHYRHVNLPAQVPLAWGAHRGASIIAEQLSGNSSIHFKGYLGNNIVKFFDYTLASVGIKPNELKNFDYDMVEVKQGAHAGYYPGNSPLHLRVYFEKDSRKLIRAAAVGKQGADKRIDVLSMAMMNNATVDDLTEFEVAYAPPYSHPKDLINLIGYKAQ

SEQ ID NO: 169 - DNA, 777 bp, Artificial Sequence
  Description of Artificial Sequence: synthetic nucleic acid sequence
atgagccatagttataattctatagaagaggtgctcaaagctgtaaaatcaaatcaactatctattaatgatgctaaagcccaactcagtcattatgacgaattgggctttgctaaaattgacttacatagagcacagcgtcaaggatttcccgaagttatctttgggcaaggaaaaacaaaagaacaaatcactaaaatcatctctagtttgatatttcataatgaagttattctagtgacacgtgttgatgaaatgaaagcaaaatacattttacaacattatccaaacttggaatatcatcaaactgcacagttaattagcactccactaaaagatataccacaatctaaatactatgtttctgtactttgtgctggaacttctgatttacctattgcagaagaagctgcattaaccgctgaaatcatgggagtaagtgtaaaacgattttatgatgtcggggtttcaggtattcatcgcttattatccaacattcatgatatacgcagagggaaagtttctatcgttatagctggaatggaaggcgctttagcaagtgttgttggaggattagtcaaccaccctgtatatgcagtaccaacgagtgtaggttatggagcaaacttgaatggggttaccaccctattatcaatgataaatagttgcgcacccggaaccagcgtattaaatatcaataatggatttggtggcggttacaacgctgcacagattattcatatgctagaaaataaagagagtgaggtatctttatga

SEQ ID NO: 170 - protein, 258 aa, Artificial Sequence
  Description of Artificial Sequence: synthetic amino acid sequence
MSHSYNSIEEVLKAVKSNQLSINDAKAQLSHYDELGFAKIDLHRAQRQGFPEVIFGQGKTKEQITKIISSLIFHNEVILVTRVDEMKAKYILQHYPNLEYHQTAQLISTPLKDIPQSKYYVSVLCAGTSDLPIAEEAALTAEIMGVSVKRFYDVGVSGIHRLLSNIHDIRRGKVSIVIAGMEGALASVVGGLVNHPVYAVPTSVGYGANLNGVTTLLSMINSCAPGTSVLNINNGFGGGYNAAQIIHMLENKESEVSL

SEQ ID NO: 171 - DNA, 1140 bp, Artificial Sequence
  Description of Artificial Sequence: synthetic nucleic acid sequence
atgctactttctgctttagttgatttaggagcaaaccctgaagacattgaatcagaactaaaaaaattacctttagatcaatttaagctacattttcaaaaaagagtaaaacaaggtattcatgcaatgacattaaacattgatgttaaagaagcaaatcatcatcgtcacgttaatgatatatttaaaatgatagatgacagtacacttccggaaagggttaaatatcgcagtaagaaaatttttgaaatcattggtcaagcagaagctaaaattcatggcatgtcgtttgaagaagttcactttcatgaagtgggggcaatggactctattatagatattattggtgggtgtattgcactagaacaactagggattaacacattatactgttcagctattccaacaggtcatggtaaaatcaatattgctcatggcatttatccaatccctgcaccagctactgctgaaattcttaaaggtataccaatcgcacattttgatgttcaaagtgaactcacaacccctactggtgctgcatttgctaagggacttgtttcatcgtttgggccatttccttcagcaacaatacaacatataggctatggcgccggcagtaaggattttgatttccctaatatattaagggttattcaatttgaatctgaattcgagcaacaagatagcgtccaagtaatagagtgtcaaatagatgatatgacacctgaagcattaggttattttatgaataatgcgttagagcaaggtgctttagatgcttactatacgcctatatttatgaaaaaaagtcgcccaagcacgcagttaacgttaatatgtaaattacatgataagacatatttcgaacaacttatcttacaagaaacaagttctttaggcgtcagaagtacttctgttaatagaaagaccttgaaccgcgcattcaaaattctttctacacaacacggcactgtttccattaaatttggcctacaaaatggaaaaattatgaaaatgaaacccgagtatgaagatttgaagaaaatagctaaaactacaaaacaaccgtttcaagtaattcataacgaggtattacaacaactctatcaaacatatcatataggaaatatacttcaataa

SEQ ID NO: 172 - protein, 379 aa, Artificial Sequence
  Description of Artificial Sequence: synthetic amino acid sequence
MLLSALVDLGANPEDIESELKKLPLDQFKLHFQKRVKQGIHAMTLNIDVKEANHHRHVNDIFKMIDDSTLPERVKYRSKKIFEIIGQAEAKIHGMSFEEVHFHEVGAMDSIIDIIGGCIALEQLGINTLYCSAIPTGHGKINIAHGIYPIPAPATAEILKGIPIAHFDVQSELTTPTGAAFAKGLVSSFGPFPSATIQHIGYGAGSKDFDFPNILRVIQFESEFEQQDSVQVIECQIDDMTPEALGYFMNNALEQGALDAYYTPIFMKKSRPSTQLTLICKLHDKTYFEQLILQETSSLGVRSTSVNRKTLNRAFKILSTQHGTVSIKFGLQNGKIMKMKPEYEDLKKIAKTTKQPFQVIHNEVLQQLYQTYHIGNILQ

SEQ ID NO: 173 - DNA, 798 bp, Artificial Sequence
  Description of Artificial Sequence: synthetic nucleic acid sequence
atgatttcctcacaaattgatgctgatcgaatggactatttacaaagagatgcatattttacaggcgtaacgtatggctcatttgatatggagcgtattttaaggttgatgagaccatctaaagaagaagtgttaattaaagatagtggtatgcatgctgtcgaaaattttattatgagtcgttatcaaatgtattggcaaatatattttcatccagtaagccgtggtggggaagttttattaaacaattgtttaaaacgagctaagcagctttataatgaaggatatgaatttaaaatgtatccaaaagactttataccattctttgaaggaacaatgacgattgaacaatatgtagaacttgatgaagcagttgtattgtattacttgaagaaatggattcatgaaaatgatacaatattaagtgatttatcaagacggtttatcaatcgagatttatttaaatatattcctttcgacggttcaattattaccatttcggaattgcaagaattatttgaagcgggtggtattaatcctgattattactttgtaagtgaagcattttcagatttaccttatgattatgatcgcccaggctcaaatcgcaaaccgattcatttattaaaaagtaatggtggaattacagaaataagtaatcaatcattggtgattaatagtattacagggattaatagagaagaccataaattatattatcctaaagagatgattttaaaaattaaagattatcaaattaaaggttctattattaacttacttaatgaattaaattaa

SEQ ID NO: 174 - protein, 265 aa, Artificial Sequence
  Description of Artificial Sequence: synthetic amino acid sequence
MISSQIDADRMDYLQRDAYFTGVTYGSFDMERILRLMRPSKEEVLIKDSGMHAVENFIMSRYQMYWQIYFHPVSRGGEVLLNNCLKRAKQLYNEGYEFKMYPKDFIPFFEGTMTIEQYVELDEAVVLYYLKKWIHENDTILSDLSRRFINRDLFKYIPFDGSIITISELQELFEAGGINPDYYFVSEAFSDLPYDYDRPGSNRKPIHLLKSNGGITEISNQSLVINSITGINREDHKLYYPKEMILKIKDYQIKGSIINLLNELN

SEQ ID NO: 175 - DNA, 807 bp, Artificial Sequence
  Description of Artificial Sequence: synthetic nucleic acid sequence
atgtcacaaagtcaaatcaatcagatgtttaatcaaaaagatatgccagctaatttgaagaaacggtatgcacaaagattgttacagtttccgcatgcacacaataagtcataccttagagaacaagcaaaacatcctaatgatgtctctggaaactacatttcttcatttaaagaaaatcaattaactaagattgaagctattaaatcattattctcattcactaagccacctctagcagaagtaaaacctgcaacaagagaagatgcttcatgggatgagatgaaacataaagctgccgatataggcaaagcaaatactcaatctaataaatatgatataagagatccatattggaaattgataaaacaaaacaagcgtaaaatcaaaagggattatgagttcaacattaactcacccgagttccaagatttaaaattattagtgcaaacgctacatgctgctggagctgatgtacaatatgtttgtataccttcaaatggaagatggtatgatcatataggtatcaaaaaagatagacgtgaagctgtatataaaaagattcactcaactgtagttgataatggtgggaaaatttatgatttgacaaataaggactatgaaaagtacgtaattagtgatgctgttcatattggatggaaaggttgggtttacgtcgaccagcaaattgcaagacatatggatggtcatgcgcctaaaaatcatgaagtcgattattctaaaaataaaccaccgcacaaacatcacaacgatcgtcaagatgatcaacatcaaggcaacaaataa

SEQ ID NO: 176 - protein, 268 aa, Artificial Sequence
  Description of Artificial Sequence: synthetic amino acid sequence
MSQSQINQMFNQKDMPANLKKRYAQRLLQFPHAHNKSYLREQAKHPNDVSGNYISSFKENQLTKIEAIKSLFSFTKPPLAEVKPATREDASWDEMKHKAADIGKANTQSNKYDIRDPYWKLIKQNKRKIKRDYEFNINSPEFQDLKLLVQTLHAAGADVQYVCIPSNGRWYDHIGIKKDRREAVYKKIHSTVVDNGGKIYDLTNKDYEKYVISDAVHIGWKGWVYVDQQIARHMDGHAPKNHEVDYSKNKPPHKHHNDRQDDQHQGNK

SEQ ID NO: 177 - DNA, 321 bp, Artificial Sequence
  Description of Artificial Sequence: synthetic nucleic acid sequence
atgactaaaattagtgttgtcgtatatggagcagaagtcgtttgtgcgagttgtgtaaatgcacctacatctatagatacttatcaatggcttcaagcattacttttaagaaagtttcctcaacatcattttgaatttacatatattgacatacgaaatgatactgaaaatttaactgatcatgatatgcaatttatagaaagaattaatgaagatgaattgttttacccattagttacgatgaatgatgaatatgtagcagatggttacatacaatataaacaaataacccgttttattaaatcatattttactatgtaa

SEQ ID NO: 178 - protein, 106 aa, Artificial Sequence
  Description of Artificial Sequence: synthetic amino acid sequence
MTKISVVVYGAEVVCASCVNAPTSIDTYQWLQALLLRKFPQHHFEFTYIDIRNDTENLTDHDMQFIERINEDELFYPLVTMNDEYVADGYIQYKQITRFIKSYFTM

SEQ ID NO: 179 - DNA, 376 bp, Artificial Sequence
  Description of Artificial Sequence: synthetic nucleic acid sequence
atgccatctattccagaaatctttaatatttttggctttaaacggttgtttaaagttaggcggtgtcttaatggattattaacgggtgttcagttggcttccgttattaaaatgagtggtaaaactctaagcgagttagcttctcaaatgaaaaagtacccacaatctttaattaatgtgagagtgactgacaaatatcgtgttgaagagaatattcatgttcaagagataatgacgaaagttgaaacagagatgaatggtgaaggaagaattcttgttcgtccttctggaactgaacctttagtacgtgtaatggttgaggctgcaactgacgcggatgctgaaagatatgctcaaagtatcgctgaccgcgaca

SEQ ID NO: 180 - protein, 126 aa, Artificial Sequence
  Description of Artificial Sequence: synthetic amino acid sequence
  MOD_RES (126): variable amino acid
MPSIPEIFNIFGFKRLFKVRRCLNGLLTGVQLASVIKMSGKTLSELASQMKKYPQSLINVRVTDKYRVEENIHVQEIMTKVETEMNGEGRILVRPSGTEPLVRVMVEAATDADAERYAQSIADRDX

SEQ ID NO: 181 - DNA, 1119 bp, Artificial Sequence
  Description of Artificial Sequence: synthetic nucleic acid sequence
atgcaagtcacgcaaagtattgtcaaccaattgaatgagatgaatctcaatcatttatcagtcattcaacatgatttgtttatggaagctcatccaattatgacttctatatgtaagaaatggtatatcaatagctttaaatattttagaaatacatataaacgattttactatagtcgccctaatgagctcgataaatgtttttataaatattatggattaaataaactcatcaacttacttattaaagaaaagcctgatctcatattattaacatttccaacacctgtgatgtcagtgttgaccgaacaatttaatataaatatccctattgcgacagttatgacagattatcgcatgcataaaaattggattacaccatattcacaaagatattatgtagcaacaaaagatactaaagatgatttcattgaagctggtgttcctgcttcatatattaaagtgacgggcattcctattgctgataaatttgaagaatctattgataaagaagaatggttatcgcaacaacatttagacccttcaaaacctactatattaatgtcagcaggtgcatttggtgtttcaaaaggctttgactatatgattaataatattttagaaaaaagtccaaattcgcaagtggtcatgatttgtggacgtagtaaggaacttaaacgttcattaaaagctaagttcaaagataatccaagtgtaataatattaggatatacaaatcacatgaatgagtggatggcatcaagccaactaatgattacaaaacctggtggtatcacaatttccgaaggacttagtcgttgtattcctatgatttttttaaaccctgcacccggtcaagaacttgaaaatgcatattactttgaaagtaaaggatttggaaaaatagcagatactccaaatgaggcaattgatattgtttctgacttaacaaataacgaagagactttaaaggttatgtcatctaaaatgctagaatcaaaggtaggatattctactagaaagatttgtaaagatttattagatttaataggtcactcatctcaaccggatgaaatctatggaaaggttcctttgtatgcaagattcttcgtcaagtaa

SEQ ID NO: 182 - protein, 372 aa, Artificial Sequence
  Description of Artificial Sequence: synthetic amino acid sequence
MQVTQSIVNQLNEMNLNHLSVIQHDLFMEAHPIMTSICKKWYINSFKYFRNTYKRFYYSRPNELDKCFYKYYGLNKLINLLIKEKPDLILLTFPTPVMSVLTEQFNINIPIATVMTDYRMHKNWITPYSQRYYVATKDTKDDFIEAGVPASYIKVTGIPIADKFEESIDKEEWLSQQHLDPSKPTILMSAGAFGVSKGFDYMINNILEKSPNSQVVMICGRSKELKRSLKAKFKDNPSVIILGYTNHMNEWMASSQLMITKPGGITISEGLSRCIPMIFLNPAPGQELENAYYFESKGFGKIADTPNEAIDIVSDLTNNEETLKVMSSKMLESKVGYSTRKICKDLLDLIGHSSQPDEIYGKVPLYARFFVK

SEQ ID NO: 183 - DNA, 1146 bp, Artificial Sequence
  Description of Artificial Sequence: synthetic nucleic acid sequence
atgatgttggtaattctgtttctgatggaatttgcaagaggtatgtacatactaagttatataaactttttacctacagtgacctctatcgcaatagcaatcacatcatttgctttttccattcactttatcgcagatgctgcaacaaattttgtcatcggctttttacttaaaaaatttggttcaaaattagtacttacatctggattcttacttgcttttataagcttgtttttagtgatatggttcccggcatcaccattcataattattttcagtgctattatgttaggaattgctgtgagtccgatttgggttatcatgttatctagtgtagatgaaagaaatcgcggcaaacaaatgggttatgtctacttttcatggttgctaggtttattggtgggtatggttatcatgaacttgcttattaaattccatcctactcgttttgcatttttaatggccttggttgtgcttattgcctgggtactatactattttgttaatatcaacttaacaaattacaatactaaacctgtgaaagcacaattaaagcaaattgtagatgttacacaacgtcatcttattctatttccgggtatcttgttacaaggagcagctatagcagcacttgtacctattcttccaaaatatgcaacgcaagttgtgaaagtatcaaccgttgaatatacagtagcaatcattattggtggcataggctgtgctttctctatgttatttttatcaaaaatcatcgacaataatagcaaagggtttatgtatggagttatttttagtggctttatactatatacaattcttatattcgggctatctacaattacaaatatatatatagtttgggccataggactttttattgggctaatgtacggtatcctcttaccggcttggaatacctttatggctgggcatattaatcctaacgaacaggaagaaacatggggcgtgttcaacagtgttcaaggcttcggttcaatgataggcccactagtcggaggtctaattactcaatttactaataatttaaataataccttttacttttcagcgatgatttttcttgcacttgcagtattttacggatattactttattaaaacaaacagaagggttaaaccttaa

SEQ ID NO: 184 - protein, 381 aa, Artificial Sequence
  Description of Artificial Sequence: synthetic amino acid sequence
MMLVILFLMEFARGMYILSYINFLPTVTSIAIAITSFAFSIHFIADAATNFVIGFLLKKFGSKLVLTSGFLLAFISLFLVIWFPASPFIIIFSAIMLGIAVSPIWVIMLSSVDERNRGKQMGYVYFSWLLGLLVGMVIMNLLIKFHPTRFAFLMALVVLIAWVLYYFVNINLTNYNTKPVKAQLKQIVDVTQRHLILFPGILLQGAAIAALVPILPKYATQVVKVSTVEYTVAIIIGGIGCAFSMLFLSKIIDNNSKGFMYGVIFSGFILYTILIFGLSTITNIYIVWAIGLFIGLMYGILLPAWNTFMAGHINPNEQEETWGVFNSVQGFGSMIGPLVGGLITQFTNNLNNTFYFSAMIFLALAVFYGYYFIKTNRRVKP

SEQ ID NO: 185 - DNA, 597 bp, Artificial Sequence
  Description of Artificial Sequence: synthetic nucleic acid sequence
atgaaattcttccctacgtttttcaacatcttcgtaatggaattttgttgtggcggacaagagagtatcgcttcagctgtcaatcataaaccaaatattgacttaaattccttattaaataagttgaatcatattgataatacagaaggtaacagtaccattaatcctaaatttttaaatgttgaatctcttatacaatatatacaatcagcttatcacgaaacgcttaaagaagaatttaagaatcttacaccttacatgactaaattggcaaaagtacatggtcctagtcacccatacttattaaaattacaagacttatatcgcgagtttcgtgatagtatgttggatcatatacgtaaagaagatgaggaagattttcctaaactcattcaatatagtcaaggacaagatgtacaaaacattaaaatcatattagaagatttaattaatgaccacgaagatactgggcaattattaaatgttatgaatcaactaacctctgattatcaaaccccagaagaagcatgtggaacatggaagcttgtttaccaaagattacaaaatatcgaacgtcaaacacaccaacatgtacat

SEQ ID NO: 186 - protein, 199 aa, Artificial Sequence
  Description of Artificial Sequence: synthetic amino acid sequence
MKFFPTFFNIFVMEFCCGGQESIASAVNHKPNIDLNSLLNKLNHIDNTEGNSTINPKFLNVESLIQYIQSAYHETLKEEFKNLTPYMTKLAKVHGPSHPYLLKLQDLYREFRDSMLDHIRKEDEEDFPKLIQYSQGQDVQNIKIILEDLINDHEDTGQLLNVMNQLTSDYQTPEEACGTWKLVYQRLQNIERQTHQHVH

SEQ ID NO: 187 - DNA, 450 bp, Artificial Sequence
  Description of Artificial Sequence: synthetic nucleic acid sequence
atgggaaaagaaattcttccttatatcgatgcgacatttccaacttataaagtaggtaatacaaggttacttattggagatagtttagcaggaagtatcgctttaatgactgcaatgacttacccaactatttttagtcgagttgcgttattgagcccaatgtataatgaaaatattaagaaaaaaattgatacatgtatgaataaaggtcaattgacgatatggcatgccattggtttagaagaagcagattttattttaccaactaatggtaaaagagctaactttttaacacctaaccgtgaattaaatcaactgattaaagaagataatattgaatatttctataaagaatttaacggtggacatcattggaaatcatggaaaccattgctaggagatattctcttacaatttttaggtgatccaataaatggaaaatatgtttaa

SEQ ID NO: 188 - protein, 149 aa, Artificial Sequence
  Description of Artificial Sequence: synthetic amino acid sequence
MGKEILPYIDATFPTYKVGNTRLLIGDSLAGSIALMTAMTYPTIFSRVALLSPMYNENIKKKIDTCMNKGQLTIWHAIGLEEADFILPTNGKRANFLTPNRELNQLIKEDNIEYFYKEFNGGHHWKSWKPLLGDILLQFLGDPINGKYV

SEQ ID NO: 189 - DNA, 510 bp, Artificial Sequence
  Description of Artificial Sequence: synthetic nucleic acid sequence
atgattttaggattagcattggttccgtcaaagtcatttcaagatgaggtgaatgcttatcgcaagcgatatgacaatcattatgctcaaataatgcctcatatcacgattaaacctcaatttgaaatcgatgatcatgattttaatttaattaaaaatgaagtgaaaaatcgaatttctagtattaaaccagtagaagtacatgctacaaaggcatctaatttcgctccaatcagtaatgttatatacttcaaagttgctaaaacagagtcattagatcaattatttaatcaatttaatacagaagatttttacggtacagctgaacatccttttgtaccacattttacaattgcccaaggtctaacaagtcaagaatttgaagatatatatggtcaagtaaaattagcaggggtagaccatagagaaataattgaagaactatcgttacttcaatatagtgaagaagaggacaaatggactattattgaaacttttacattaggataa

SEQ ID NO: 190 - protein, 169 aa, Artificial Sequence
  Description of Artificial Sequence: synthetic amino acid sequence
MILGLALVPSKSFQDEVNAYRKRYDNHYAQIMPHITIKPQFEIDDHDFNLIKNEVKNRISSIKPVEVHATKASNFAPISNVIYFKVAKTESLDQLFNQFNTEDFYGTAEHPFVPHFTIAQGLTSQEFEDIYGQVKLAGVDHREIIEELSLLQYSEEEDKWTIIETFTLG

SEQ ID NO: 191 - DNA, 705 bp, Artificial Sequence
  Description of Artificial Sequence: synthetic nucleic acid sequence
atgggtgatttaaattttattcatcatttaaaaacattaactgagaatggagcagacattgttgaaattggtgtgccattttctgatcctgttgcagatggacctataatcatgaaagcagggcgcaacgctattgacgagggttcaaacattaaattcatttttgatgaattaataaaaaataaaaatactatttcatctaagtatgtattaatgacttattataatattctaagtgcttatggagaagaattatttttggataagtgtgatgaagctggtgtttatggtttaattattccagatttaccttacgaacttacaaaaaagtttaaaaaagatttttatcatcattctgttaaaataatatcgttaattgccatgaccgcaagtgatgctaggattatgcaaattgcaaagaactcagaaggatttatttacacggtaacaatgaatgccacaacaggtaacagtggggagttccatccagatttaaagagaaaaattgaatatataaaaaaagtttcaaaaattcctgtggttgctggatttggtatcaaaaatcctgaacatgttaaagatatagcgtccgttgcagatggtattgtaattggtagtgaaattgtaaaacgtattgaaatagattcaagaaaagaatttatcacttatatcaaatcaataagaactacgttgaattctttataa

SEQ ID NO: 192 - protein, 234 aa, Artificial Sequence
  Description of Artificial Sequence: synthetic amino acid sequence
MGDLNFIHHLKTLTENGADIVEIGVPFSDPVADGPIIMKAGRNAIDEGSNIKFIFDELIKNKNTISSKYVLMTYYNILSAYGEELFLDKCDEAGVYGLIIPDLPYELTKKFKKDFYHHSVKIISLIAMTASDARIMQIAKNSEGFIYTVTMNATTGNSGEFHPDLKRKIEYIKKVSKIPVVAGFGIKNPEHVKDIASVADGIVIGSEIVKRIEIDSRKEFITYIKSIRTTLNSL

SEQ ID NO: 193 - DNA, 1179 bp, Artificial Sequence
  Description of Artificial Sequence: synthetic nucleic acid sequence
atggaaggtaattacgaattaaaggttgctgaaggtaccgagtcacatttagttggaattaaaaataatgataacgaagtgattgcagcttgtttattaacagctgttcctgtaatgaaaatatttaaatatttttattccaatcgcggtccagtaatagattataataataaagagcttgtacattttttctttaatgaattgagtaaatatgtaaaaaaatataattgtttatatttaagagttgacccataccttccatatcaatatttaaatcatgagggagaaataactggaaatgcaggtcatgattggatttttgatgaattagagagtttaggatataaacacgaaggattccacaaaggatttgatcctgtattacaaatccgatatcattctgttctaaatttagcaaacaaaagtgctaatgatgttttaaaaaacatggatggtttaagaaagcgtaatactaaaaaagttaagaaaaatggagttaaagtccgctttttatctgaagaagagttacctatatttaggtcatttatggaggatacctctgaaactaaagattttgcagatagagaagatagtttttattacaacagattcaaacattataaagaccgtgttttagtaccactagcctatattaactttgatgagtatatagaggaactaaataatgaaagaaatgtgcttaataaagattataataaagctttaaaagacattgagaaacgtccagagaataaaaaagcacataacaaaaaggaaaatttagaacaacaactcgatgcaaatcagcaaaaaattaatgaagctaaaaacttaaaacaagaacatggcaatgaattacccatctctgctggcttctttataattaatccgtttgaagtagtttactacgctggtggaacttcaaatcgttatcgccattttgcagggagctatgcggttcaatggaagatgattaactatgcaattgaacatggtattaatcggtataatttctatggtattagtggtgactttagtgaagatgctgaagatgctggcgtagttaagtttaaaaagggctatgatgccgatgttatagaatacgttggtgactttattaaacctattaataaaccaatgtataacatttatagaacacttaaaaaactaaagaaatag

SEQ ID NO: 194 - protein, 392 aa, Artificial Sequence
  Description of Artificial Sequence: synthetic amino acid sequence
MEGNYELKVAEGTESHLVGIKNNDNEVIAACLLTAVPVMKIFKYFYSNRGPVIDYNNKELVHFFFNELSKYVKKYNCLYLRVDPYLPYQYLNHEGEITGNAGHDWIFDELESLGYKHEGFHKGFDPVLQIRYHSVLNLANKSANDVLKNMDGLRKRNTKKVKKNGVKVRFLSEEELPIFRSFMEDTSETKDFADREDSFYYNRFKHYKDRVLVPLAYINFDEYIEELNNERNVLNKDYNKALKDIEKRPENKKAHNKKENLEQQLDANQQKINEAKNLKQEHGNELPISAGFFIINPFEVVYYAGGTSNRYRHFAGSYAVQWKMINYAIEHGINRYNFYGISGDFSEDAEDAGVVKFKKGYDADVIEYVGDFIKPINKPMYNIYRTLKKLKK

SEQ ID NO: 195 - DNA, 1254 bp, Artificial Sequence
  Description of Artificial Sequence: synthetic nucleic acid sequence
atgaaatttacagagttaacagttaaagaatttgaaaactttgtacaaaatccatcattagaaagtcattatttccaagtgaaggaaaatattgctacacgtgaatcagatgggtttcaagtagtgttattaggtgtaaaagacgacgacaatagagtgatagcagctagcctgttttctaaaatccctacaatgggcagttatgtgtattattccaatagaggccctgtaatggactattcagatttaggtttagtggatttttatttaaaagagcttgataaatatttacatcaacatcaatgcttatatgtaaaattagatccttactggttgtatcaagtttatgataaagatattaatcctttaacagaaaaaaatgatgctttagtaaatctatttaaatcacatggttatgatcatcacggatttacaacccaatatgattcttccagccaagttagatggatgggggtattagatttagaaggcaaaacccctgcatctctaaggaaagagtttgatagtcaaagaaaacgaaatattaataaagcgataaactacggtgtgaaagttagatttcttagtaaggatgaatttgatttattcttagacttataccgagagactgaagctagaactggatttgcttctaaaactgacgattatttctataactttatagagcattatggcgataaagtattagttcctttagcttacatagatttaaatgaatatatacaacatttgcaagaatcactaaatgataaagaaaatcgacgtgatgatatgatggcgaaagaaaataaaacagataaacagttaaagaaaatagctgagttagataaacaaattgatcacgataaaaaagaattgcttcaagctagtgaattacgtcaaacagatggcgaaattttaaatttagcttcaggagtatactttgctaatgcatatgaagtgaactatttctctggagggtcttcagaaaaatataatcaatatatgggaccatatgcaatgcattggcacatgattaattattgttttgataacggttatgatagatataatttctatggcttatcaggtgattttactgaaaacagtgaagactatggtgtttatcgctttaagagaggttttaatgttaggattgaggaattaatcggtgatttctataaaccaatcaataaagtgaaatattggttattcaatacattagatcgcatacgtaataaattgaaaaagtaa

SEQ ID NO: 196 - protein, 417 aa, Artificial Sequence
  Description of Artificial Sequence: synthetic amino acid sequence
MKFTELTVKEFENFVQNPSLESHYFQVKENIATRESDGFQVVLLGVKDDDNRVIAASLFSKIPTMGSYVYYSNRGPVMDYSDLGLVDFYLKELDKYLHQHQCLYVKLDPYWLYQVYDKDINPLTEKNDALVNLFKSHGYDHHGFTTQYDSSSQVRWMGVLDLEGKTPASLRKEFDSQRKRNINKAINYGVKVRFLSKDEFDLFLDLYRETEARTGFASKTDDYFYNFIEHYGDKVLVPLAYIDLNEYIQHLQESLNDKENRRDDMMAKENKTDKQLKKIAELDKQIDHDKKELLQASELRQTDGEILNLASGVYFANAYEVNYFSGGSSEKYNQYMGPYAMHWHMINYCFDNGYDRYNFYGLSGDFTENSEDYGVYRFKRGFNVRIEELIGDFYKPINKVKYWLFNTLDRIRNKLKK

SEQ ID NO: 197 - DNA, 2004 bp, Artificial Sequence
  Description of Artificial Sequence: synthetic nucleic acid sequence
gtgacaaatgcaacgcctgaacaatataacccttcatataaagaatggaatttagaagacttacctatcattcctaagaaaatgaaaacagtagtgattagtaaaacaaatagacaatttaaaattgtaaaatctttaattttagataaaaatgttaaagaaattattatagcaacagatgctggacgagaaggtgaactagtagctcgtcttattttagataaagtaggtaataaaaaaccaatcaagcgtttgtggattagttcggttacaaaaaaagccatacaagaaggatttaaacagttaaaaaatggaaacgcgtatcaaaatttatatgaagcagcacttgcacgaagtgaagcagattggatagtagggattaatgcaacacgtgcactaacgacaaaatatgatgcacaattatcattaggtcgtgtacaaactccaacaatacaaatagttaaatcaagacaagatgagattaactattttaaaccagaaaaatattacacgttatccattaatgttgatggttacgatttaaaccttaagcaacaaaagcgatataaagataaaaaagaattagaattgattgaacataaaattaaacatcaagaaggaaagatattagaagttaaaggaaaaaataagaaatcttacgcgcaacctttatttaatttaacagatttacaacaagaggcatataaacattacaagatggggccaaaggagacactaaatacattacaacatttatatgagagacataagttagtaacctatccccgtacagattctaattatttaacagatgatatggtcgatacaattcaagaacggttaagagcaattttagctacagattataaatctcatgttcgagatttaatttctgagtccttttcttctaaaatgcatatttttaataatcaaaaagtttcagatcatcatgcgattattcccacagaggttagaccatctattgaacaattgagtcaacgagagtttaaaatttatatgctaatcgcagaaagatttttagaaaatttaatgaatccttatttatatgaagttttaacaatccatgcacaactgaaagattacaattttgttttaaaagagataatacctaaacaattaggatataaagctttaaaagatcaaacctcttcgcatactttaacgcattcttttaaagaaggtcagttatttaaagtacatcgtattgagattcatgaacatgaaacaaaggcaccggaatattttaacgaaggttcattacttaaagccatggagaatccacaaaatcatattgatttgaatgataaaaagtatgcaaaaacactcaaacattcgggggggattggaactgtagcaactagggctgatattatagaaaagttatttaacatgaatgctttagagtcgcgagatggcaaaattaaagttacatcaaaaggaaaacaaattttagaattgtctccaagtgaattaacctcacctatactaacagcccaatgggaagaaaaattaatgcttatcgaaaaggggaaatataattctcagaaattcatacaggaaatgaaaaactttacatttaaagtagtaaataaaattaaaagcagtgagcaaaaatataaacatgataatttaacaacaaccgagtgcccaacatgtggtaagtttatgataaaagtcaaaactaaaaatggacagatgcttgtatgtcaagatcccaaatgtaaaactaagaaaaatattcaacgcaagactaatgcacgttgcccttattgtaagaaaaaaatgactttattcggtaaagggaaagaagctgtttatagatgtgtatgtggccacacagaaactcaatcacaaatggacaaaagaatgagagataaaacgaatggtaaagtttcacgtaaagaaatgaaaaaatatataaataaaaaagaagaaatcgacaataatccattcaaagatgctctgaaaaatctcaaattgtag

SEQ ID NO: 198 - protein, 667 aa, Artificial Sequence
  Description of Artificial Sequence: synthetic amino acid sequence
VTNATPEQYNPSYKEWNLEDLPIIPKKMKTVVISKTNRQFKIVKSLILDKNVKEIIIATDAGREGELVARLILDKVGNKKPIKRLWISSVTKKAIQEGFKQLKNGNAYQNLYEAALARSEADWIVGINATRALTTKYDAQLSLGRVQTPTIQIVKSRQDEINYFKPEKYYTLSINVDGYDLNLKQQKRYKDKKELELIEHKIKHQEGKILEVKGKNKKSYAQPLFNLTDLQQEAYKHYKMGPKETLNTLQHLYERHKLVTYPRTDSNYLTDDMVDTIQERLRAILATDYKSHVRDLISESFSSKMHIFNNQKVSDHHAIIPTEVRPSIEQLSQREFKIYMLIAERFLENLMNPYLYEVLTIHAQLKDYNFVLKEIIPKQLGYKALKDQTSSHTLTHSFKEGQLFKVHRIEIHEHETKAPEYFNEGSLLKAMENPQNHIDLNDKKYAKTLKHSGGIGTVATRADIIEKLFNMNALESRDGKIKVTSKGKQILELSPSELTSPILTAQWEEKLMLIEKGKYNSQKFIQEMKNFTFKVVNKIKSSEQKYKHDNLTTTECPTCGKFMIKVKTKNGQMLVCQDPKCKTKKNIQRKTNARCPYCKKKMTLFGKGKEAVYRCVCGHTETQSQMDKRMRDKTNGKVSRKEMKKYINKKEEIDNNPFKDALKNLKL

SEQ ID NO: 199 - DNA, 333 bp, Artificial Sequence
  Description of Artificial Sequence: synthetic nucleic acid sequence
atggctttttttgtaaccgaactaatccacaaacgcttgattggttttttattacctactttatctaaaataagacgagctactagttcaccttctcgtccagcatctgttgctataataatttctttaacatttttatctaaaattaaagattttacaattttaaattgtctatttgttttactaatcactactgttttcattttcttaggaatgataggtaagtcttctaaattccattctttatatgaagggttatattgttcaggcgttgcatttgtcacaagatgccccaatgcccaagttactatatactgtttcccttctatataa

SEQ ID NO: 200 - protein, 110 aa, Artificial Sequence
  Description of Artificial Sequence: synthetic amino acid sequence
MAFFVTELIHKRLIGFLLPTLSKIRRATSSPSRPASVAIIISLTFLSKIKDFTILNCLFVLLITTVFIFLGMIGKSSKFHSLYEGLYCSGVAFVTRCPNAQVTIYCFPSI

SEQ ID NO: 201 - DNA, 618 bp, Artificial Sequence
  Description of Artificial Sequence: synthetic nucleic acid sequence
gtgcatttaataggtgtatctaaaacgatgcctatttcaacgggtatgcaacttgtcggtaccactctatttagcgctattttcttaggtgaatggagcacgattgttcaagtagtgatgggacttatagcaatgatcttattggttgtaggtatttctttaacatcacttaaagccaaaagcgaaggcaaatccgataacccagaatttaaaaaagcaatgggaatattacttctatcaacaatcggttacgtaggttatgtcgttcttggagatatttttggagtaagtggtacagatgctctcttcttccaatcaattggtatggcaattggaggattaatcctttcaatgaatcataatacttcaattaaatctactgctctaaatcttataccaggtgttatctggggtatcggtaacttatttatgttctattcacaacctaaagttggtgtagcaactagtttctcattatcacaactgcttgttattgtttcaactttagggggtatctttattctaggggagaaaaaagatcgtcgccaaatgattggtatttggtcaggtattatcgttatagttatagcttcaatcattttaggcaacttaaaatag

SEQ ID NO: 202 - protein, 205 aa, Artificial Sequence
  Description of Artificial Sequence: synthetic amino acid sequence
VHLIGVSKTMPISTGMQLVGTTLFSAIFLGEWSTIVQVVMGLIAMILLVVGISLTSLKAKSEGKSDNPEFKKAMGILLLSTIGYVGYVVLGDIFGVSGTDALFFQSIGMAIGGLILSMNHNTSIKSTALNLIPGVIWGIGNLFMFYSQPKVGVATSFSLSQLLVIVSTLGGIFILGEKKDRRQMIGIWSGIIVIVIASIILGNLK

SEQ ID NO: 203 - DNA, 792 bp, Artificial Sequence
  Description of Artificial Sequence: synthetic nucleic acid sequence
gtgtttgaagaattagaaaataaagtggttcttattactggagctgccactggaattggcaaatctattgcggaaaattttggtaaagctaaggccaaggttgttataaattaccgttctgatcgacatcatgatgaaattgaggaaattaaacaaactgttgctaaatttggtggtcaaacattggtggttcaaggtgatgtttcaattgaagaagatattaaacgaatgattgaaacaacaattaatcactttggaactttagacattataattaataatgctggattcgaaaattcaatcccaactcatgaaatgtcgattgacgactggcaaaaagttattgacataaacttaactggcgcctttgtgggttcaagagaagccatcaatcaatttttaaaggaaaacaagaaaggtactattattaacatttcgagtgttcatgacactattccatggcctaattatgtacactatgccgcaagtaaaggtggcttaaaattaatgatggaaacaatgtcaatggaatatgcccaatacggtattcgtattaataatatatctcctggggcaattgttactgaacacactgaagaaaaattttctgacccaacgacgcgtgaagaaacaataaaaatgatacctgcacgtgaaattggaaatgctcaagatgtagctaatgcagtactattcctatcttcagatcttgcaagttatatacacggtacaacattgtacgttgatggtggcatgatgaactatccagcatttatgggtggtaaaggttaa

SEQ ID NO: 204 - protein, 263 aa, Artificial Sequence
  Description of Artificial Sequence: synthetic amino acid sequence
VFEELENKVVLITGAATGIGKSIAENFGKAKAKVVINYRSDRHHDEIEEIKQTVAKFGGQTLVVQGDVSIEEDIKRMIETTINHFGTLDIIINNAGFENSIPTHEMSIDDWQKVIDINLTGAFVGSREAINQFLKENKKGTIINISSVHDTIPWPNYVHYAASKGGLKLMMETMSMEYAQYGIRINNISPGAIVTEHTEEKFSDPTTREETIKMIPAREIGNAQDVANAVLFLSSDLASYIHGTTLYVDGGMMNYPAFMGGKG

SEQ ID NO: 205 - DNA, 906 bp, Artificial Sequence
  Description of Artificial Sequence: synthetic nucleic acid sequence
atgagtagtactcgtaaaccaaaattagattatgaggaacaaattaaaaagttgaaatcattaggaattctattcaatgaaataacagaagaagaagctaaagaaatattaaaaaataacacttatttttttaaattgatatcttttcgtaaaaatataaaaaaggatagtagtggaaattataattttgagttttctgcactttctgattttgctactttagatatgcgattaagatatactttattacctatgtgtttggatatagaacattcactaaaaacagatattcttaaaaagattactgatgatgtaaacgaagacggatatacaattgttcaagattttataaacaatcataatggagatttagaaaaaatcttttctagcgtgattaaaagagatggtacagttataccgagttttcaaaaatattatgatgatcctccaatatgggtatgcttagaattaatgacttttggccaattttcagcatttgtagaattttattctgaaagaacaaatgactctgagttacgtaaggctggtaaatttattaaatttgctaaaaacattaggaataaatgtgctcatagccaaccaattttattaaatttaaatccacgcaaaaactttaccgttgaaagagaattaaaaaagataggtagaaaacaaagactgtctgataaaaaccttaaagtattagcaataattgatattcttgcattattagttttacattctaaatattgtagtaaaggtataaaagataatcgaaaaaatgatttattaacttttaaacaacgtaaaaatagatattttcatcattatcgaaatgttccttctctttcatttttctttctatcacttaacaaaatgattgactattatgttcaaaacaattaa

SEQ ID NO: 206 - protein, 301 aa, Artificial Sequence
  Description of Artificial Sequence: synthetic amino acid sequence
MSSTRKPKLDYEEQIKKLKSLGILFNEITEEEAKEILKNNTYFFKLISFRKNIKKDSSGNYNFEFSALSDFATLDMRLRYTLLPMCLDIEHSLKTDILKKITDDVNEDGYTIVQDFINNHNGDLEKIFSSVIKRDGTVIPSFQKYYDDPPIWVCLELMTFGQFSAFVEFYSERTNDSELRKAGKFIKFAKNIRNKCAHSQPILLNLNPRKNFTVERELKKIGRKQRLSDKNLKVLAIIDILALLVLHSKYCSKGIKDNRKNDLLTFKQRKNRYFHHYRNVPSLSFFFLSLNKMIDYYVQNN

SEQ ID NO: 207 - DNA, 539 bp, Artificial Sequence
  Description of Artificial Sequence: synthetic nucleic acid sequence
atgcattaccgtaaatattttccgttttttacattaattactgcatttgcttcattggcatggttaagtggagacttaaggttaatgaccatgttttggggtgcaacattatttgtgttaacacggctcattaaagttaacaaattatggaaggtgcctagggaagcagcaagaatttcagcttggtcatttatattggcatggttgtcgttattgattgctgtcattttattgtatatcgctacaggagattggtatatttattcgaatatgtcagatgataatgcaatcaattatggaatgcgtctctgtatcaatttacttattgttttagctgtgattattccggcggcacaatttccatttcaaggctggcttattgaatctgtagctgcgcctacgccagtttcagctattatgcacgctggtattgttaatgctggtggcgttattcttacacgcttttctccggtatttaatgacgaaatagccatttcactgttattaattattgcaagtatttcagtattgttgggttc

SEQ ID NO: 208 - protein, 180 aa, Artificial Sequence
  Description of Artificial Sequence: synthetic amino acid sequence
MHYRKYFPFFTLITAFASLAWLSGDLRLMTMFWGATLFVLTRLIKVNKLWKVPREAARISAWSFILAWLSLLIAVILLYIATGDWYIYSNMSDDNAINYGMRLCINLLIVLAVIIPAAQFPFQGWLIESVAAPTPVSAIMHAGIVNAGGVILTRFSPVFNDEIAISLLLIIASISVLLGS

SEQ ID NO: 209 - DNA, 1356 bp, Artificial Sequence
  Description of Artificial Sequence: synthetic nucleic acid sequence
atgcgttacacctataagaatacaatagatgataaaacaatatacataagtggaattaataatgaaattattgatttacaaaaagatttatggaaatacttgtctattgttggagtcattgtattatttacggtttatttagcaagtagaagtatcaatcgaacatatattagacctatcaatgaagtaacttatgctacatcacttctagcagatggatattaccatgttcgtgttccagaaagtaatgtgaaggaaactagggcattatttgtgactacaaatgacttagcacgacgattgcaaaaattaaacaatagtcaaaaaattcaatccaatagattaaaaactaccttagaaaatataccgagttcagtactgatgattgataaacatggagaaattgtagttgctaatcatgcttattatcaggtgtttaaccctgatcaaatggtagaaaataaaagttacattggtttcatagatgatagtattgaaaaattaattattgaaagttttagaactgaaaaagttatctatgaacaattagaagttgctattaataacgtacatactaaatatttcgatgtatcttgtatccccattttaactaaatctaaaaaaaatttacaaggtatggtggttgtgcttcatgacattactaatttgcagaaattagaaaaccttagaagggaatttgttgcaaatgtgtcacatgaactaaaaacaccgattacttcaatcaaaggttttgcagaaactctgattgaaggtgctaaaaatgatgaacaatcgcttgatatgtttttaaatattattttaaaagaatctaatagaatagagtcattggttacagacttattagatttatcacatatagaacagcaaaaagaacttgaaataaattacatgaatttatctgaattagctattaatataatagataatttgcaaacacaagcatacaataagagaatcaaaatacaatctgaaattgaaaaagatgtcatcattgaggcacatgaaaataaaatagcgcaagttattactaatttgctatcaaatgctataaattattcttcagaagataataaggtaatagtaagagtatatagaaatgacaataaagtttatttagagattcaagattatggtattggtataagtgaaacagatcaaaagcgtatatttgaacgtttctatcgtgtagataaagcgagaagtagagattcaggtggtacaggacttggtctgtctataacaaaacatattgttgaagcacataatggtagaatagacgtgaaaagtgcacctggcaaaggttcgatattcaaagttctatttaatgataattaa

SEQ ID NO: 210 - protein, 451 aa, Artificial Sequence
  Description of Artificial Sequence: synthetic amino acid sequence
MRYTYKNTIDDKTIYISGINNEIIDLQKDLWKYLSIVGVIVLFTVYLASRSINRTYIRPINEVTYATSLLADGYYHVRVPESNVKETRALFVTTNDLARRLQKLNNSQKIQSNRLKTTLENIPSSVLMIDKHGEIVVANHAYYQVFNPDQMVENKSYIGFIDDSIEKLIIESFRTEKVIYEQLEVAINNVHTKYFDVSCIPILTKSKKNLQGMVVVLHDITNLQKLENLRREFVANVSHELKTPITSIKGFAETLIEGAKNDEQSLDMFLNIILKESNRIESLVTDLLDLSHIEQQKELEINYMNLSELAINIIDNLQTQAYNKRIKIQSEIEKDVIIEAHENKIAQVITNLLSNAINYSSEDNKVIVRVYRNDNKVYLEIQDYGIGISETDQKRIFERFYRVDKARSRDSGGTGLGLSITKHIVEAHNGRIDVKSAPGKGSIFKVLFNDN

SEQ ID NO: 211 - DNA, 801 bp, Artificial Sequence
  Description of Artificial Sequence: synthetic nucleic acid sequence
atgaaaggtctaatgggggatacctctgacaatattcctggcgttgctggtgtcggcgaaaagacggctattaaattacttaatcaatttgagtcagtagaaggggtctatgaacatattgaggaggtcactgcaaaaaaattaaaagaaaaactcatcaatagtaaagatgatgccttaatgagtaaagatttagcaacaatcaatgttcacagtccgattgaagtatcattagaagatacaaaattaactctacaagacgacactacagaaaaaattgaactatttaaaaagctagaatttaaacaactattagcagatatagacacatcctctacgaatgaagaagtcatagataaaacttttgaaattgagcaagactttcaaaatgtagatttgaatgatttaaacgaagcggtaatacattttgaactcgaaggcactaattatcttaaagacactattctcaagtttggtttttatacaaatcatcaacatgtagtgataaatgctgaggatgtaaaggattataaacatttagttcaatggcttgaagataaaaatacaactaaaattgtctatgatgcaaaaaaaacttatgtatctgctcatcgattagggattaatatagaaaatattgaatttgatgttatgttagcaagctatattattgacccatcacgttctattgatgacgttaaatctgtggtaagtttatatggacaaaattatgtaaaagataatattacaatatttgggaaaggtaagaaacatcatatacctgaatatccctcattttaa

SEQ ID NO: 212 - protein, 266 aa, Artificial Sequence
  Description of Artificial Sequence: synthetic amino acid sequence
MKGLMGDTSDNIPGVAGVGEKTAIKLLNQFESVEGVYEHIEEVTAKKLKEKLINSKDDALMSKDLATINVHSPIEVSLEDTKLTLQDDTTEKIELFKKLEFKQLLADIDTSSTNEEVIDKTFEIEQDFQNVDLNDLNEAVIHFELEGTNYLKDTILKFGFYTNHQHVVINAEDVKDYKHLVQWLEDKNTTKIVYDAKKTYVSAHRLGINIENIEFDVMLASYIIDPSRSIDDVKSVVSLYGQNYVKDNITIFGKGKKHHIPEYPSF

SEQ ID NO: 213 - DNA, 873 bp, Artificial Sequence
  Description of Artificial Sequence: synthetic nucleic acid sequence
gtgattcctgaacgtcgtatgcatgcgaaaggttcaggtgcatttggtacgttcacagttacaaatgacatcacacaatatacaaatgcgaaaatattctcagaagtcggaaaacaaacagagatgtttgcacgtttttctactgtttcaggagaacgtggagcagcagatttagaacgtgatatacgtgggtttgccttgaaattctacactgaagatggaaactgggatttagtaggtaacaatacgccagttttcttctttagagatcctaaactatttattagtttgaatcgtgctgtaaaacgagatccacgtacaaatatgagaagtgcacaaaataactgggacttttggacaggtctaccggaagcattgcatcaagtgacaatattaatgtcagatagaggtatgccaaaaggattccgaaatatgcatggattcggttctcatacgtattctatgtataatgataaaggtgaacgtgtatgggtaaaatatcatttccgtacacaacaaggaattgaaaactatactgacgaggaagcagctaaaattgtaggtatggatagagattcttcacagagggatttatataatgctatcgaaaatggagattatccaaaatggaaaatgtacattcaagttatgacagaggaacaagctaaaaatcatccagacaatccttttgatttaacaaaggtatggtataaaaaagactatccactgattgaagtgggagaatttgaattgaatcgtaatcctgagaattattttcttgatgtagagcaggcagcgtttacgcctacaaatattgttcctgggttagattattcaccagataaaatgctacaaggacgtttattctcataa

SEQ ID NO: 214 - protein, 290 aa, Artificial Sequence
  Description of Artificial Sequence: synthetic amino acid sequence
VIPERRMHAKGSGAFGTFTVTNDITQYTNAKIFSEVGKQTEMFARFSTVSGERGAADLERDIRGFALKFYTEDGNWDLVGNNTPVFFFRDPKLFISLNRAVKRDPRTNMRSAQNNWDFWTGLPEALHQVTILMSDRGMPKGFRNMHGFGSHTYSMYNDKGERVWVKYHFRTQQGIENYTDEEAAKIVGMDRDSSQRDLYNAIENGDYPKWKMYIQVMTEEQAKNHPDNPFDLTKVWYKKDYPLIEVGEFELNRNPENYFLDVEQAAFTPTNIVPGLDYSPDKMLQGRLFS

SEQ ID NO: 215 - DNA, 1059 bp, Artificial Sequence
  Description of Artificial Sequence: synthetic nucleic acid sequence
gtgatttttttgaaaaataataatgaaacaagaagatttagcattaggaagtacacggtgggagtcgtgtcaatcattactgggattacaatatttgtcagtggtcagcatgctcaagctgctgaaatgacacaatcatcatcagattttaacgaacagtcacaacaaacagaacaagttgaacacaaagaagatacaactcatttatcatacgaattgaatcaagagggtgacacagctagccaatcaaagactaatcaagagaaccaatctgatgaaaatgtacaaaaaaagaataatcaaactcaacaagattcaacacaaacgtcaccattaaatgaccaagaacaaactttaaaggggcaacaatcaaaagacaatcatgttaccccaaattcacgtcaggatacatatccaaaaggccaaaatcaagatgataaaggcaaacaacagtttaaagataatcaacactcacaaacagaacatcaacctaatactcaaaaccaaaataatgatcaagattcatcagataaaaagcaacacccatctgatcaaactcaagccccatcttcaaaaggaacacaacctaaacaatcacagtctataggagatagagataaaacagtaaaacaaccatcttctaaagtacacaaaataggtaatacaaaaactgataaaacagttaaaacaaatcaaaaaaagcaaacatcattaacttcaccacgcgttgtgaaatcaaaacaaactaaacatatcaatcaacttactgcgcaagctcaatataaaaatcaatatccagtcgtgtttgtacatggatttgtaggtttagtcggtgaagattcattcagcatgtacccaaattattggggtggtactaaatataacgtgaaacaagaacttacaaaattaggttaccgagttcacgaagccaatgtaggagcatttagcagcggtgaagttaatttacgattggaccgcgtgtaccatttcaattcgtcttggctcaaaaattcatcgtcgtacttagtattatcactgatattctcatgtttatcataa

SEQ ID NO: 216 - protein, 352 aa, Artificial Sequence
  Description of Artificial Sequence: synthetic amino acid sequence
VIFLKNNNETRRFSIRKYTVGVVSIITGITIFVSGQHAQAAEMTQSSSDFNEQSQQTEQVEHKEDTTHLSYELNQEGDTASQSKTNQENQSDENVQKKNNQTQQDSTQTSPLNDQEQTLKGQQSKDNHVTPNSRQDTYPKGQNQDDKGKQQFKDNQHSQTEHQPNTQNQNNDQDSSDKKQHPSDQTQAPSSKGTQPKQSQSIGDRDKTVKQPSSKVHKIGNTKTDKTVKTNQKKQTSLTSPRVVKSKQTKHINQLTAQAQYKNQYPVVFVHGFVGLVGEDSFSMYPNYWGGTKYNVKQELTKLGYRVHEANVGAFSSGEVNLRLDRVYHFNSSWLKNSSSYLVLSLIFSCLS

SEQ ID NO: 217 - DNA, 1026 bp, Artificial Sequence
  Description of Artificial Sequence: synthetic nucleic acid sequence
atgggaataaaagatattgctaaagctgaaatgattaaagccaatgtacctgtagtaccaggaagtgaaggacttattcaaagtatagatgacgctaaaaaaatagctaaaaaaatcggctatccagttatcatcaaagccacagcaggtggtggtggaaaaggtattcgggttgctcgtgatgagaaagaacttgaaactggttaccgtatgacacaacaagaagctgaaaccgcgttcggaaatggtggtttatacttagaaaaatttatagaaaactttagacatatagagattcaaattattggcgatacttatggaaacgttatacatttaggtgaacgtgattgtacaattcaaagaagaatgcaaaagctcgttgaagaagcaccctcaccagttttaagtgaagataaacgccaagaaatgggtaatgctgcaattagagccgcaaaagctgtaaattatgaaaacgcaggtacaattgaatttatatatgatttagatgataaccaattttatttcatggaaatgaatacacgtattcaagttgaacacccagtaactgaaatggtaacaggagtagatttagtaaaattacaactcaaagttgctatgggtgaggcgttaccttttaaacaagaagatatttccattaacggtcacgctattgaatttcgaatcaatgctgaaaatccttacaaaaactttatgccatcaccaggcaagattacccaatatcttgctccaggcggttttggagtgagaattgaatcagcatgttatactaattatacgataccaccttactatgactccatggtggcaaaacttatagttcacgaacctacacgtgaagaatcaattatgacaggcattcgtgctttaagtgaatatcttgttttaggtatcgacactacgattccattccacttaagacttctaaataatcatatttttagaagtggggaatttaatacaaaattcctagaaaagtataatattatggacgataataaccaatag

SEQ ID NO: 218 - protein, 341 aa, Artificial Sequence
  Description of Artificial Sequence: synthetic amino acid sequence
MGIKDIAKAEMIKANVPVVPGSEGLIQSIDDAKKIAKKIGYPVIIKATAGGGGKGIRVARDEKELETGYRMTQQEAETAFGNGGLYLEKFIENFRHIEIQIIGDTYGNVIHLGERDCTIQRRMQKLVEEAPSPVLSEDKRQEMGNAAIRAAKAVNYENAGTIEFIYDLDDNQFYFMEMNTRIQVEHPVTEMVTGVDLVKLQLKVAMGEALPFKQEDISINGHAIEFRINAENPYKNFMPSPGKITQYLAPGGFGVRIESACYTNYTIPPYYDSMVAKLIVHEPTREESIMTGIRALSEYLVLGIDTTIPFHLRLLNNHIFRSGEFNTKFLEKYNIMDDNNQ

SEQ ID NO: 219 - DNA, 363 bp, Artificial Sequence
  Description of Artificial Sequence: synthetic nucleic acid sequence
atggtcaatgtagcagattattctcaatctaatttaggaaaaattgaaatagcaccagaagtattatctgttatcgcatccattgcgacatcagaagtagaaggtattacaggccattttgctgaactaaaaaaaacaaatctagagaagattagtcgaaaaaatttaaacagagatttaaaaatcgaagctaaagaagacggaatatacattgatgtattttgttctttaaaacatggcgtaaatatttctaaaactgcaaatcaaattcaagaagcaattttcaattcaattacgacaatgacagctattgaaccacagcaaattaatattcacatcagaagtatcgtcgcagaaaaataa

SEQ ID NO: 220 - protein, 120 aa, Artificial Sequence
  Description of Artificial Sequence: synthetic amino acid sequence
MVNVADYSQSNLGKIEIAPEVLSVIASIATSEVEGITGHFAELKKTNLEKISRKNLNRDLKIEAKEDGIYIDVFCSLKHGVNISKTANQIQEAIFNSITTMTAIEPQQINIHIRSIVAEK

SEQ ID NO: 221 - DNA, 390 bp, Artificial Sequence
  Description of Artificial Sequence: synthetic nucleic acid sequence
atgagtcgtaaagatgcaagagtacaagcttttcaaactttatttcaacttgaaataaaagagacagatttaacaattcaagaagcaattgaatttattaaagatgatcattctgatttagactttgattttatatactggttagttactggagtcaaagatcatcaaatcgttttagacgaaacaattaaaccccatttaaaagactggtctatcgatcgtttactgaaatcagatcgtattattttaagaatggcaacttttgaaatattgcacagcgacacacctaaaaaagtagttgttaatgaagctgtagaactcacaaaacagtttagtgatgatgatcattataaatttgttaatggtgttttaagtaatataaatgattaa

SEQ ID NO: 222 - protein, 129 aa, Artificial Sequence
  Description of Artificial Sequence: synthetic amino acid sequence
MSRKDARVQAFQTLFQLEIKETDLTIQEAIEFIKDDHSDLDFDFIYWLVTGVKDHQIVLDETIKPHLKDWSIDRLLKSDRIILRMATFEILHSDTPKKVVVNEAVELTKQFSDDDHYKFVNGVLSNIND

SEQ ID NO: 223 - DNA, 783 bp, Artificial Sequence
  Description of Artificial Sequence: synthetic nucleic acid sequence
atgaaatattcattaaatgctggtggtaaaagaatcagaccagtcatattattattaacactaaaaatgcttaacaaagattatcaacaaggactaaatagtgctttagcattggaaatgattcatacttattctttaattcatgatgatttaccagcaatggataatgacgattaccgtagaggaaaattaacaaatcataaagtttatggtgaatggaaagccattcttgctggtgatgcattattaacaaaagcttttgaattagtttctaatgatactaccattgaagatagtgtgaaagtaagtattataaaaagactttcaaaagcaagtggacatttgggaatggtgggtggccaagcgcttgatatggaaagtgaagggaagtcaattcgtttagaaactttagaatcaattcatgaaactaagacaggcgctttactaaatttttcagttatggctgcggtagacattgctcaagtagaacaaaatattgctaagaatttagatgaatttagtcatcatttaggaatgatgtttcaaattaaagatgatttactggatgtgtatggtgatgaatcaaaacttggcaaaaaagtaggcagtgatatagtaaatcataaaagtacttatgtttctttacttggaaaagaaggagcagaagaaaagttaaacaatcatcaatatcttgctatgaactgcttaaatcaaatttctgatcaatatgatacttctgaattaagtgatattgtagatttattctataacagagaccattaa

SEQ ID NO: 224 - protein, 260 aa, Artificial Sequence
  Description of Artificial Sequence: synthetic amino acid sequence
MKYSLNAGGKRIRPVILLLTLKMLNKDYQQGLNSALALEMIHTYSLIHDDLPAMDNDDYRRGKLTNHKVYGEWKAILAGDALLTKAFELVSNDTTIEDSVKVSIIKRLSKASGHLGMVGGQALDMESEGKSIRLETLESIHETKTGALLNFSVMAAVDIAQVEQNIAKNLDEFSHHLGMMFQIKDDLLDVYGDESKLGKKVGSDIVNHKSTYVSLLGKEGAEEKLNNHQYLAMNCLNQISDQYDTSELSDIVDLFYNRDH

SEQ ID NO: 225 - DNA, 1022 bp, Artificial Sequence
  Description of Artificial Sequence: synthetic nucleic acid sequence
atgttacaaaccttatcaataaaacaatttgccattattgacgaacttgatataaacttttctgacggtctaacagttatgagtggtgaaactggctcaggaaaatctatcattattgatgccattggacagttaatcggtatgagagcttcttctgattacgtcagacatggtgaaaagaaagcaattatcgaaggtatctttgatatagacgagagtaaagacgcaattaatatactagaatcattagctatagatgttgatgaagattttttattagttaaaagagaaattttcagttctggtaagagtatttgtcgtattaataaccaaactgtcactctacaggacttaagaaaagtgatgcaagaactgcttgatattcatggtcaacatgaaacgcaatctttacttaagcaaaaatatcatcttcaactattagatgattatgcagacaatcagtattcagatttacttaatcaatatcaactttcttataaccaatataaaaataaacgtaaagaattagaggaattagaatccgcggaccaggctttattacaacgattagacttaatgaaatttcaattagaggaactaaccgaagcttcactgaaagaaggcgaagtggaccaacttgaatccgatattaaaagaattcaaaactccgaaaaattaaatctagctttaaacaatgcacatcaagttctaactgatgaaagtgcaatacccgataggttgtacgaattaagcaactacttgcaaacgattaatgatatcgttccagaaaaattcgtaagattaaaagaggacattgatcaattttactatatgctagaagatgcaaagcatgaaatttacgacgaaatggctaacactgaattcgatgagcaagttttaaatgagtatgaatccagaatgaatttacttaataatttaaaacgtaaatatggtaaggatattactgaacttattgcttatcagagtaaacttgcaaatgaaattgataaaatagtggaatt

SEQ ID NO: 226 - protein, 341 aa, Artificial Sequence
  Description of Artificial Sequence: synthetic amino acid sequence
  MOD_RES (341): variable amino acid
MLQTLSIKQFAIIDELDINFSDGLTVMSGETGSGKSIIIDAIGQLIGMRASSDYVRHGEKKAIIEGIFDIDESKDAINILESLAIDVDEDFLLVKREIFSSGKSICRINNQTVTLQDLRKVMQELLDIHGQHETQSLLKQKYHLQLLDDYADNQYSDLLNQYQLSYNQYKNKRKELEELESADQALLQRLDLMKFQLEELTEASLKEGEVDQLESDIKRIQNSEKLNLALNNAHQVLTDESAIPDRLYELSNYLQTINDIVPEKFVRLKEDIDQFYYMLEDAKHEIYDEMANTEFDEQVLNEYESRMNLLNNLKRKYGKDITELIAYQSKLANEIDKIVEX

SEQ ID NO: 227 - DNA, 354 bp, Artificial Sequence
  Description of Artificial Sequence: synthetic nucleic acid sequence
atgaaattcttaaatataaattctctagctggtacttgcttttcttcaaatcctgctaaaaattcttcattattgtacgctaatttcactctctctactgaaattcctttttcattaacggtaataataccatatacggtgtttgaaccattgttcaaacctactgatccaggattaaaatatactgttgatttatcatcaaacatatgcaacctatggttatgtccaaataaaattaaatcggcttctttgtctttaaataattcagaaatagcttgttcgtcatcttttgtaataggtgcaaaaggttgttcatcaataggagctgacattttatcattttcaatttcataa

SEQ ID NO: 228 - protein, 117 aa, Artificial Sequence
  Description of Artificial Sequence: synthetic amino acid sequence
MKFLNINSLAGTCFSSNPAKNSSLLYANFTLSTEIPFSLTVIIPYTVFEPLFKPTDPGLKYTVDLSSNICNLWLCPNKIKSASLSLNNSEIACSSSFVIGAKGCSSIGADILSFSIS

SEQ ID NO: 229 - DNA, 1005 bp, Artificial Sequence
  Description of Artificial Sequence: synthetic nucleic acid sequence
atgttagctcaactcggtgaatctactacaaaacctataatatctattatttttattttactcattttagctttattatttatttttgtaggttacccattgataactggtacagtatatgcaattcaaaaagctattaataaagagaaagttctttttagtgatttattttttgcttttaaaaaaggcaaatatgctaaatcagtaattttagctttaataactttagttttattcattgtaatcgtacttattctagtgctattaaataaattatatagtttagctcttagcccaatattaatcggcttacaacaatcaataagcggctacgacaatccaatgggaattttaattacaatacaaattgtgttgttactcataacaggtttcatctcatcaattttctattggtttgtaattatattcattattaattatactaccgcttatacagaagattcatctcgtaaagtaatgagtaatttaaaagaaggatttaaaggtattaaaaacggtaagaaaacttggtttaaatttttcattggcgtattacttattagtttacttgcaagtattattaacaaaccgctattattcggtgtacaatacttaacaagcagtatgtctcaaacggtggctcaaactattattataatagctagaatcgtatctatagtattacgcctatgtctttattacattttgatttttggaattattaattatttcgttagacgtggtgacaaaccagtcaaaagcaaaagacgtcataaaaataaagatattaacaaaggtaatgtaaacgacaaagtagatactaaattaaatgcttccaactccaaagatacagaagcagataaaatgaaagatcaacaaacacatatacaacaagacaaaactgatagtcaagaaaataacatatatgattccatcaaagaaaaagtaaatgaaaataaagaaaatgttacagaacaatctaaaaatctatttgataagaaatag

SEQ ID NO: 230 - protein, 334 aa, Artificial Sequence
  Description of Artificial Sequence: synthetic amino acid sequence
MLAQLGESTTKPIISIIFILLILALLFIFVGYPLITGTVYAIQKAINKEKVLFSDLFFAFKKGKYAKSVILALITLVLFIVIVLILVLLNKLYSLALSPILIGLQQSISGYDNPMGILITIQIVLLLITGFISSIFYWFVIIFIINYTTAYTEDSSRKVMSNLKEGFKGIKNGKKTWFKFFIGVLLISLLASIINKPLLFGVQYLTSSMSQTVAQTIIIIARIVSIVLRLCLYYILIFGIINYFVRRGDKPVKSKRRHKNKDINKGNVNDKVDTKLNASNSKDTEADKMKDQQTHIQQDKTDSQENNIYDSIKEKVNENKENVTEQSKNLFDKK

SEQ ID NO: 231 - DNA, 1218 bp, Artificial Sequence
  Description of Artificial Sequence: synthetic nucleic acid sequence
atgttacaaactacaaaccaatacaaagagatacatgaccatgaaatagttattgttaagcgagacacagtagaaattaaagatcttgaggggcacattcaacaacgtgatacgtatacggcagaaatagatgctgctgatgcagaaaaaggcgtatatgatcattacatgttaaaagaaattcatgaacagcctgcagtgatgcgtcgcattattcaagaatatcaagatgaaaaaggtaatttaaaaatcgattcagagattattaatgatgtagcagatgctgatcgtatttacatcgttgcagctggtactagttatcatgctggattggttggtaaagaatttattgaaaaatgggcaggtgtacctactgaggttcatgtagcttctgaatttgtatataatatgccacttctttctgaaaaaccactatttatttatatttcacaatctggtgaaacagctgatagtcgtgctgtattagttgaaacaaataagttaggtcacaaatcattaacaattactaatgttgctggttcaacattatcacgtgaagcggatcatacattacttttacatgctggacctgagattgcagtcgcatctacaaaagcatatacagcgcaaattgctgttttatctatcttatctcaaattgttgctaaaaatcatggtcgtgaaaccgatgttgatttattaagagaactagctaaggttactacagctattgaaacaattgttgacgatgcacctaagatggagcaaattgcaacggatttcttaaaaactactcgtaatgcattcttcattggacgaacaattgattataatgttagtttagaaggtgcattaaaattaaaagaaatttcttatattcaagctgaaggatttgcaggtggggaattaaagcacggaacaatcgctttgattgaagatggcacacctgttataggtttagctacacaagaaaacgttaatctatcaattcgtggaaatatgaaagaagtagtagcacgtggtgcatatccttgtatgatttcaatggaaggtttgaataaagaaggagacacatacgtgattccacaagtacatgaattattaactcctttagtatctgtagtgacaatgcaattaatctcatattatgctgcgttacaacgagatttagatgttgacaaacctcgtaacttagccaaatcggttacagtagagtaa

SEQ ID NO: 232 - protein, 405 aa, Artificial Sequence
  Description of Artificial Sequence: synthetic amino acid sequence
MLQTTNQYKEIHDHEIVIVKRDTVEIKDLEGHIQQRDTYTAEIDAADAEKGVYDHYMLKEIHEQPAVMRRIIQEYQDEKGNLKIDSEIINDVADADRIYIVAAGTSYHAGLVGKEFIEKWAGVPTEVHVASEFVYNMPLLSEKPLFIYISQSGETADSRAVLVETNKLGHKSLTITNVAGSTLSREADHTLLLHAGPEIAVASTKAYTAQIAVLSILSQIVAKNHGRETDVDLLRELAKVTTAIETIVDDAPKMEQIATDFLKTTRNAFFIGRTIDYNVSLEGALKLKEISYIQAEGFAGGELKHGTIALIEDGTPVIGLATQENVNLSIRGNMKEVVARGAYPCMISMEGLNKEGDTYVIPQVHELLTPLVSVVTMQLISYYAALQRDLDVDKPRNLAKSVTVE

SEQ ID NO: 233 - DNA, 870 bp, Artificial Sequence
  Description of Artificial Sequence: synthetic nucleic acid sequence
atggaggataatatgaaaaatataaaagcaatttttttagatatggatggaacgattttacatgaaaataataaagcctcggaatatactaaacaagtgattaatgaattgagagagcaaaattataaagttttccttgctactgggagatcttattcagaaatcagtcagcttgttcctgatggattcactgtagatggtattatcagttcgaatggaacttcaggtgaaattcatggagataatttgtttagacatagtttaactttagaacgagtacagaaaattgtggaattggctaaaaaacaacatatttattatgaagtttttccttttgaaagtaatcgtatatctcttaaagaagatgaagattggatgaaagaaatgatttccactatagagccacctgacgctgtaagtcaaagtgagtggtcatcgcgaagagaggcaattaaaggaaaaatagattggcgagataccttacctgatgcacacttttctaaaatatatttatttagtcccaacttagataaaataactgattttcgcaaccagcttgttgaaaaccaatcaaatttaggtattaccgtatctaattcttcgcgttataatgctgaaacgatgccatatcatacagataagggtacaggtatcaaggaaatgattgatcactatggtattaagcaagaagaaactttagttattggtgatagtgataatgatagagctatgtttaattttggccatcacactgttgcaatgaaaaatgcaagacaagaaattaaaaatcttacagatgatattaccgaatacacgaacgaagaagatggtgcagcacattacttaaaaagtcatttattagataactag

SEQ ID NO: 234 - protein, 289 aa, Artificial Sequence
  Description of Artificial Sequence: synthetic amino acid sequence
MEDNMKNIKAIFLDMDGTILHENNKASEYTKQVINELREQNYKVFLATGRSYSEISQLVPDGFTVDGIISSNGTSGEIHGDNLFRHSLTLERVQKIVELAKKQHIYYEVFPFESNRISLKEDEDWMKEMISTIEPPDAVSQSEWSSRREAIKGKIDWRDTLPDAHFSKIYLFSPNLDKITDFRNQLVENQSNLGITVSNSSRYNAETMPYHTDKGTGIKEMIDHYGIKQEETLVIGDSDNDRAMFNFGHHTVAMKNARQEIKNLTDDITEYTNEEDGAAHYLKSHLLDN

SEQ ID NO: 235 - DNA, 777 bp, Artificial Sequence
  Description of Artificial Sequence: synthetic nucleic acid sequence
atgttagaatatgctaataagataacattgaagggagataatatcatgaaatttgctgttatcactgatattcatggaaactttgatgcgcttcaaactgttttagatgatattgatagtagagatgatatcgaaaaaatttataacctaggtgataacatagggattggacatgagacaaataaagtactggatactatatttgaccgggatgatatggaaatgattgcaggtaatcatgatgaagctattatgtcactcgtcaatggaacaccttatcctgaagatttaaaagggaaattttatgagcatcatcaatggatagaaggacatttagatgagtcctattacgatgaaattaatcaattgcctagatatattgaaatgaccataaaagggaaaaagattttatttattcattatgaaattgaaaatgataaaatgtcagctcctattgatgaacaaccttttgcacctattacaaaagatgacgaacaagctatttctgaattatttaaagacaaagaagccgatttaattttatttggacataaccataggttgcatatgtttgatgataaatcaacagtatattttaatcctggatcagtaggtttgaacaatggttcaaacaccgtatatggtattattaccgttaatgaaaaaggaatttcagtagagagagtgaaattagcgtacaataatgaagaatttttagcaggatttgaagaaaagcaagtaccagctagagaatttatatttaagaatttcatttaa

SEQ ID NO: 236 - protein, 258 aa, Artificial Sequence
  Description of Artificial Sequence: synthetic amino acid sequence
MLEYANKITLKGDNIMKFAVITDIHGNFDALQTVLDDIDSRDDIEKIYNLGDNIGIGHETNKVLDTIFDRDDMEMIAGNHDEAIMSLVNGTPYPEDLKGKFYEHHQWIEGHLDESYYDEINQLPRYIEMTIKGKKILFIHYEIENDKMSAPIDEQPFAPITKDDEQAISELFKDKEADLILFGHNHRLHMFDDKSTVYFNPGSVGLNNGSNTVYGIITVNEKGISVERVKLAYNNEEFLAGFEEKQVPAREFIFKNFI

SEQ ID NO: 237 - DNA, 357 bp, Artificial Sequence
  Description of Artificial Sequence: synthetic nucleic acid sequence
atgtttttaataactttattgcctatttttcaatatcaagcttctgcacatgcgactttagaaaaatcaacaccacaacagcaaggggttattaaagacaaaccagaagcaatcaagttagagtttaatgaacctgtgaacaccaaatactcgagtgtgaccttatttgatgataaaggtaaaaagattaaagaccttaaaccaataacaactggatggtctcagacagttgtattttcatctgagcaaattgttaatggcacgaatactattgaatggcatacggtatctgcggatggacatgaagtcggagatacgtttgaattttcagttggaaaagtgaggctaaagatgtag

SEQ ID NO: 238 - protein, 118 aa, Artificial Sequence
  Description of Artificial Sequence: synthetic amino acid sequence
MFLITLLPIFQYQASAHATLEKSTPQQQGVIKDKPEAIKLEFNEPVNTKYSSVTLFDDKGKKIKDLKPITTGWSQTVVFSSEQIVNGTNTIEWHTVSADGHEVGDTFEFSVGKVRLKM

SEQ ID NO: 239 - DNA, 618 bp, Artificial Sequence
  Description of Artificial Sequence: synthetic nucleic acid sequence
gtggtttatatgatgacactcacatctgatatattagaagatattctatcatttaaattagaagtgataatgcaatttccgtatatattaagctctatttcactaatcattttgtttatacttttcattttaaaagatatggaaaaaatatggtactggctcatttcaatagttatgattgctgtgataagtatgtctggacacgtgtggtcacaacaagtgccattatggtcaattatcataagaacaattcatcttatagggctaacgttatggttaggttcactcgtttatctcatttgttatgctattaaagtgaaaattaatcagttgacgagtgtaagacgtatgcttttaaaagttaatatcattgctgtgattatgctcgtttttacagggattttaatggctattgatgaaacgaatactttaacactttggaataatgtgagcgcttggtctatttatcttgtcataaaaatcgcaggaattattgctatgatgctattaggtttctatcaaacgatgcgtgctttgagacaacgacaacaggtccatcgttttgcactgatgactgaattgttaattggtatgatattaattttgcaggtatcatga

SEQ ID NO: 240 - protein, 205 aa, Artificial Sequence
  Description of Artificial Sequence: synthetic amino acid sequence
VVYMMTLTSDILEDILSFKLEVIMQFPYILSSISLIILFILFILKDMEKIWYWLISIVMIAVISMSGHVWSQQVPLWSIIIRTIHLIGLTLWLGSLVYLICYAIKVKINQLTSVRRMLLKVNIIAVIMLVFTGILMAIDETNTLTLWNNVSAWSIYLVIKIAGIIAMMLLGFYQTMRALRQRQQVHRFALMTELLIGMILILQVS

SEQ ID NO: 241 - DNA, 384 bp, Artificial Sequence
  Description of Artificial Sequence: synthetic nucleic acid sequence
atggtcataggtttattaagtggcttttactacagagaattaactaaagcgcatgactttgtgggtgacacgcaattgtctttagtgcatacacatacacttatcttaggcatgtttatgtttttactcttattaccacttgaaaaagtatttaaattaagtagttattacttatttaattggttctttttcgtgtatcatttaggtgtgttaatcacgatttcaatgatgacagttaaaggtacattccaagttattggtaaaaaattttcacccgaaatgtttgcgggatttgcaggcataggtcatacaggtatgcttgcaggtttactgttactgtttttcttattaagacaggctattcttacagaacccaaaaaataa

SEQ ID NO: 242 - protein, 127 aa, Artificial Sequence
  Description of Artificial Sequence: synthetic amino acid sequence
MVIGLLSGFYYRELTKAHDFVGDTQLSLVHTHTLILGMFMFLLLLPLEKVFKLSSYYLFNWFFFVYHLGVLITISMMTVKGTFQVIGKKFSPEMFAGFAGIGHTGMLAGLLLLFFLLRQAILTEPKK

SEQ ID NO: 243 - DNA, 1506 bp, Artificial Sequence
  Description of Artificial Sequence: synthetic nucleic acid sequence
atgagcgagaaaccagactcatcgtataaagacactaaaaaacaaatgtttaatgaaataaaaaagagtactaaatttaaaaaagtgtttaaagaaggtgagtatgaaactcaaaatattacaataaaaaataaaggtaattctcaatcttatcttttgctaggatacccaatgaaagctcaaaaaggtgctcaaagtcattatagtggtgtttttatatataaagatttgaaatctatcgaagatacaaataatgctattacaattattatattaataactgctattatatttactatagcaagcacaatatttgcattctttttatctaatagaataacgaaacccttacgtcaattaaaaacacaagcacaaaaagtttctgaaggggattatagtcaaatttcaactgtcgctactaaagatgaaataggtgatttatcacgtgcatttaacaacatgaacgtagaaattcaagaacatatcaaagcaatttcttcatctaagaatataagagatacattattaaactctatggtagaaggcgttctaggcattaataatcaacgtgaaatcatattgtcgaacaagatggctgatgatattatgcgtcacattgatgatttttcaaaagaatctattgaacagcaaattgaagcaacatttgaatcacaacagaatgagtatttagaattagaaattaatacaaggtactatgtatttatctccagttatatagatagaattcaaacaaatggtagaagtggtattgtcatggtcatccgtgatatgacaaatgaacataatcttgatcaaatgaaaaaagattttatagcaaatgtatcacatgaattacgtacgccaatctctttattacagggttacactgagtccatagtagacggtatagttaccgaaccagatgaaatacgtgactcattagcaatcgttttagatgaatctaagcgacttaatcgtttagtcaatgaattactaaatgtagctcgtatggatgctgaaggattatcagttgagaaggaattacaacctattcaacaccttcttgataaaatggagtctaaatatcgcatgcaaagtgaagaattaggtttaacaatgacgtttgattctaataatgacgaacaattatggaactatgatatggatagaatggaccaagtgttaactaatttaattgataacgcaacaagatatacacaagctggtgattctataaagatttctattgatgaagattcagatttcaatattttaacaataactgatacaggcactggtatagcaccggaacatctgaaacaagtatttgaccgtttttataaagtggacgctgctcgaaaaagaggtaagcaaggcaccggattaggacttttcatttgtaaaatgattattgaagaacacgggggacgtattgatgttgagagcgaattaggcaaaggtacttcatttattattagactacctaaatcaaaacaaattagttag

SEQ ID NO: 244 - protein, 501 aa, Artificial Sequence
  Description of Artificial Sequence: synthetic amino acid sequence
MSEKPDSSYKDTKKQMFNEIKKSTKFKKVFKEGEYETQNITIKNKGNSQSYLLLGYPMKAQKGAQSHYSGVFIYKDLKSIEDTNNAITIIILITAIIFTIASTIFAFFLSNRITKPLRQLKTQAQKVSEGDYSQISTVATKDEIGDLSRAFNNMNVEIQEHIKAISSSKNIRDTLLNSMVEGVLGINNQREIILSNKMADDIMRHIDDFSKESIEQQIEATFESQQNEYLELEINTRYYVFISSYIDRIQTNGRSGIVMVIRDMTNEHNLDQMKKDFIANVSHELRTPISLLQGYTESIVDGIVTEPDEIRDSLAIVLDESKRLNRLVNELLNVARMDAEGLSVEKELQPIQHLLDKMESKYRMQSEELGLTMTFDSNNDEQLWNYDMDRMDQVLTNLIDNATRYTQAGDSIKISIDEDSDFNILTITDTGTGIAPEHLKQVFDRFYKVDAARKRGKQGTGLGLFICKMIIEEHGGRIDVESELGKGTSFIIRLPKSKQIS

SEQ ID NO: 245 - DNA, 368 bp, Artificial Sequence
  Description of Artificial Sequence: synthetic nucleic acid sequence
atgggagaagatggaggttttttgttgttcaaatttcctccttttctaagtaagatgaatggaaggagaaaattatatatgcaacaaaacaaacgtttgattacaattagtatgttaagtgcggtagcgtttgtgttaactttcatcaagtttccattgccatttataccaccgtatctaactctcgattttagtgatgtaccgacgttattagcaacattcctcttaagtcctattgctgggattatcgttgcactcatcaaaaatattttaaattttctattcaatataggggatcctgttggaccagtagctaactttttagcaggcgtcagctttttgctatcatcatactatgtttattctat

SEQ ID NO: 246 - protein, 123 aa, Artificial Sequence
  Description of Artificial Sequence: synthetic amino acid sequence
  MOD_RES (123): variable amino acid
MGEDGGFLLFKFPPFLSKMNGRRKLYMQQNKRLITISMLSAVAFVLTFIKFPLPFIPPYLTLDFSDVPTLLATFLLSPIAGIIVALIKNILNFLFNIGDPVGPVANFLAGVSFLLSSYYVYSX

SEQ ID NO: 247 - DNA, 318 bp, Artificial Sequence
  Description of Artificial Sequence: synthetic nucleic acid sequence
atggcaaatgcggatgacgttttaagtggtgacagttatttcatgtcagaacttaagcaactggtacaccagaggtatgtccatcccggtcctctcgtactaaggacagctcctctcaaatttcctacgcccacgacggatagggaccgaactgtctcacgacgttctgaacccagctcgcgtaccgctttaatgggcgaacagcccaacccttgggaccgactacagccccaggatgcgatgagccgacatcgaggtgccaaacctccccgtcgatgtgaactcttgggggagataagcctgttatccccggggtag

SEQ ID NO: 248 - protein, 105 aa, Artificial Sequence
  Description of Artificial Sequence: synthetic amino acid sequence
MANADDVLSGDSYFMSELKQLVHQRYVHPGPLVLRTAPLKFPTPTTDRDRTVSRRSEPSSRTALMGEQPNPWDRLQPQDAMSRHRGAKPPRRCELLGEISLLSPG

SEQ ID NO: 249 - DNA, 399 bp, Artificial Sequence
  Description of Artificial Sequence: synthetic nucleic acid sequence
gtgcatagttacttacacatttgttcttccctaataacagagttttacgatccgaagaccttcatcactcacgcggcgttgctccgtcaggctttcgcccattgcggaagattccctactgctgcctcccgtaggagtctggaccgtgtctcagttccagtgtggccgatcaccctctcaggtcggctacgcatcaattgtggtgcgttattatttttcatgattttaggtcaggtcaattatttttatggtattattatggcttctagcatgatgataggtgcgttgttaggtgctcaatttgctttgaaaaaaggggtaggatatgtaaaagctttatttttagtggttactgcaatattaattataaaaaatctctacgattttattgtgcagtaa

SEQ ID NO: 250 - protein, 132 aa, Artificial Sequence
  Description of Artificial Sequence: synthetic amino acid sequence
VHSYLHICSSLITEFYDPKTFITHAALLRQAFAHCGRFPTAASRRSLDRVSVPVWPITLSGRLRINCGALLFFMILGQVNYFYGIIMASSMMIGALLGAQFALKKGVGYVKALFLVVTAILIIKNLYDFIVQ

SEQ ID NO: 251 - DNA, 495 bp, Artificial Sequence
  Description of Artificial Sequence: synthetic nucleic acid sequence
atgactcaaattacatttaaaaataatcccattaaattatcaggttctgaagtgaatgaaggtgatatcgcaccaaatttcacagtgcttgataatagtttgaatcaaattactttagatgattataaaaacaaaaagaaattaattagtgttataccatctattgatacaggagtatgtgatagtcaaactcgaaagtttaatgaagaagcttcagcagaagatggtgtagttttaacgatatcagtagatttacctttcgcccaaaaaagatggtgtgcatcaagcggattagataatgtaattactttaagtgatcataaagatttatcttttggtcgaaattatggacttgtgatggatgaattacgcttacttgcacgttcggtatttgtgttaaacgaaaacaataaagtagtatataaggaaattgtcagcgaaggtacgaattaccctgattttgaagctgcattaaaagcttacagaaatatttag

SEQ ID NO: 252 - protein, 164 aa, Artificial Sequence
  Description of Artificial Sequence: synthetic amino acid sequence
MTQITFKNNPIKLSGSEVNEGDIAPNFTVLDNSLNQITLDDYKNKKKLISVIPSIDTGVCDSQTRKFNEEASAEDGVVLTISVDLPFAQKRWCASSGLDNVITLSDHKDLSFGRNYGLVMDELRLLARSVFVLNENNKVVYKEIVSEGTNYPDFEAALKAYRNI

SEQ ID NO: 253 - DNA, 981 bp, Artificial Sequence
  Description of Artificial Sequence: synthetic nucleic acid sequence
atggacacttttttaaatagaaagggatattttatgtctgaagaaaatactattatggaacgtctatttcataaattagatgataaagctaaaacgttaaacaaagaaaatggacagagttttatcgaaaatttagggttagctatggaagatatttatacaaaccaaagagaacttttagaacaagcaacgcttcaagatagaaggaaagcttttcaatttgcatatttaagtttattacaagaagaaaatattcaagctaatcatcagatcacgcctgactctataggactcattctcggttttcttgttcaacgctttttagaacataaaaaggaaatgcacattgtagatattgcaagtggggcaggtcatctaagtgcagctgtgaaagaagtactttctgataaaacaattatgcatcatctgatagaggtagatccagtgctatcacgtgtaagtgtgcatttggctaattttttagagataccgtttgacgtttatcctcaagatgcgattatgccattaccattggaagaggctgatgtcgtgattggagatttcccaataggatactatcctttagatgaacgtagtagagaaatgaagttaggctttgaagagggacacagttattcccatcatctgttaatagaacaatctattaatgcgctaaaaggggcaggttatgcatttttagttgttcctagtcatctccttgaagatgataaagtgaaacagttggaaaatttcattgctacagagactgagatgcaagcatttttaaatttacctaaaacattatttaaaaatgaaaaagcacgtaaatctatattgattttacaaaagaaaaaatcaggcgaaactcgaccagttgaagtcttattagccaatatccctgattttaaaaatcctcaacaatttcaaggtttcatttctgaattgaatcagtggatagtcacaaatcatacaaaaaaatag

SEQ ID NO: 254 - protein, 326 aa, Artificial Sequence
  Description of Artificial Sequence: synthetic amino acid sequence
MDTFLNRKGYFMSEENTIMERLFHKLDDKAKTLNKENGQSFIENLGLAMEDIYTNQRELLEQATLQDRRKAFQFAYLSLLQEENIQANHQITPDSIGLILGFLVQRFLEHKKEMHIVDIASGAGHLSAAVKEVLSDKTIMHHLIEVDPVLSRVSVHLANFLEIPFDVYPQDAIMPLPLEEADVVIGDFPIGYYPLDERSREMKLGFEEGHSYSHHLLIEQSINALKGAGYAFLVVPSHLLEDDKVKQLENFIATETEMQAFLNLPKTLFKNEKARKSILILQKKKSGETRPVEVLLANIPDFKNPQQFQGFISELNQWIVTNHTKK

SEQ ID NO: 255 - DNA, 345 bp, Artificial Sequence
  Description of Artificial Sequence: synthetic nucleic acid sequence
gtgacaaaccggaggaaggtggggatgacgtcaaatcatcatgccccttatgatttgggctacacacgtgctacaatggacaatacaaagggcagcgaaaccgcgaggtcaagcaaatcccataaagttgttctcagttcggattgtagtctgcaactcgactatatgaagctggaatcgctagtaatcgtagatcagcatgctacggtgaatacgttcccgggtcttgtacacaccgcccgtcacaccacgagagtttgtaacacccgaagccggtggagtaaccatttggagctagccgtcgaaggtgggacaaatgattggggtgaagtcgtaacaaggtag

SEQ ID NO: 256 - protein, 114 aa, Artificial Sequence
  Description of Artificial Sequence: synthetic amino acid sequence
VTNRRKVGMTSNHHAPYDLGYTRATMDNTKGSETARSSKSHKVVLSSDCSLQLDYMKLESLVIVDQHATVNTFPGLVHTARHTTRVCNTRSRWSNHLELAVEGGTNDWGEVVTR

SEQ ID NO: 257 - DNA, 414 bp, Artificial Sequence
  Description of Artificial Sequence: synthetic nucleic acid sequence
atgataggtacttatcaaagtgataaaaactttgaaatgatgaagacttttaagcattggattcagactaatcattattggaaatatgttgagaaatacggtgtgttaggtatagcattagataatcctctccacgttcaaagtaatcaatgtagatatgacgttgttttgagaatagatgaaacagtaaatgatcagacaatatctaaaagagattttacaggtggcatatatgctgtgtttaaagttagtcatacaaaaataaatatagagaagttctttagcaatttagaaaatattttaaatgaaagtcatttgcgtatgagaaatgaaccaattatagagagatacattgaagaagagggaacagataaagtgtgtgaaatgttagtgcctatctatgaagtaaattaa

SEQ ID NO: 258 - protein, 137 aa, Artificial Sequence
  Description of Artificial Sequence: synthetic amino acid sequence
MIGTYQSDKNFEMMKTFKHWIQTNHYWKYVEKYGVLGIALDNPLHVQSNQCRYDVVLRIDETVNDQTISKRDFTGGIYAVFKVSHTKINIEKFFSNLENILNESHLRMRNEPIIERYIEEEGTDKVCEMLVPIYEVN

SEQ ID NO: 259 - DNA, 1617 bp, Artificial Sequence
  Description of Artificial Sequence: synthetic nucleic acid sequence
atggttttaagttataaattataccccacactcatgttaatcatgagcgtttttttatcttttacggtcgttgcgcaaaacatttcaatttcacactttttaaatcacttactgtattatcaacaacaatctttattattattgttatcagttatttttatctctcttattttaagagcaacatttaatatgctgattcaatttttaggagatcatttggcatttaaagtaaaacatatgcttagagaacaagtgattttgaaaaaaagtgtccgttcaattggtgaagaaataaatattttaactgaaagtattgatggtatcggtccgttctttcagagttatttacctcaagtctttaaatcaatgttgattcccatcgttattattattaccatgtgttttgttcatttacctactgctattattatgatagttaccgcaccttttattccattgttttatgttatttttggacttaaaacaagagatgagtcaaaggatcaaatgacatatttaaaccagtttagtcaacgttttttaaatacagctaaaggtcttattacatttaaacttttaaatcaaacgaaacaatctgagcaacaactttataaagacagtacacgttttagagatttaacaatgcgtattttgaaaagtgcctttttatcaggacttatgcttgagttcataagtatgttagggattggattggtcgcattggaagcggctttaagcttagttgtatttaaccatatcaactttgtgactgcagcgatagcgattattttagctcctgaattttataatgcgattaaagatttaggtcaagcatttcatacaggtaagcaaagtgaaggtgctagcgatgtggtgttttcatttttagaatctgaagataaagctgattctcctacattaaaagtggatgagcaacagtttgaacaagttttaattaagcatgttgattttcaatacgctaatagtaatcatatggctttgaaaaacatttctttttcggtaaataaaggagaaaaggtcgctattgtgggaccgagtggtgcagggaaatccactttagctaagttgcttagtcaatcagtaacacccacacatggaacactttcatttaaccaagcatcattaaatatcggatttctaagtcagcgcccacatatatttgcagattctatcaaaaataatattgcaatgtatgatgatgagatatgtgatgagcaagtgattcaagtgcttgatgaagtggggttaaaagagaaagtactttcattaaaatatggtatctatacttctattggtgaaggtggggaaatgttatcaggtggacaaatgagacgtattgagttaagtcgtttattattattgaaaccagatattgtaatttttgatgaaccagcgataggattagatattgaaactgaaaaggtcatacaacaagtattagagcatcatttttctacaacgacagtgtttattattgcacaccgtgattcaaccattcgaagttcagcacggcgtatatatatcgaaagtggtcatcttataaaagatgattcgataatttctgttacgcgtagtgaggtgaagatagatcaatga

SEQ ID NO: 260 - protein, 538 aa, Artificial Sequence
  Description of Artificial Sequence: synthetic amino acid sequence
MVLSYKLYPTLMLIMSVFLSFTVVAQNISISHFLNHLLYYQQQSLLLLLSVIFISLILRATFNMLIQFLGDHLAFKVKHMLREQVILKKSVRSIGEEINILTESIDGIGPFFQSYLPQVFKSMLIPIVIIITMCFVHLPTAIIMIVTAPFIPLFYVIFGLKTRDESKDQMTYLNQFSQRFLNTAKGLITFKLLNQTKQSEQQLYKDSTRFRDLTMRILKSAFLSGLMLEFISMLGIGLVALEAALSLVVFNHINFVTAAIAIILAPEFYNAIKDLGQAFHTGKQSEGASDVVFSFLESEDKADSPTLKVDEQQFEQVLIKHVDFQYANSNHMALKNISFSVNKGEKVAIVGPSGAGKSTLAKLLSQSVTPTHGTLSFNQASLNIGFLSQRPHIFADSIKNNIAMYDDEICDEQVIQVLDEVGLKEKVLSLKYGIYTSIGEGGEMLSGGQMRRIELSRLLLLKPDIVIFDEPAIGLDIETEKVIQQVLEHHFSTTTVFIIAHRDSTIRSSARRIYIESGHLIKDDSIISVTRSEVKIDQ

SEQ ID NO: 261 - DNA, 786 bp, Artificial Sequence
  Description of Artificial Sequence: synthetic nucleic acid sequence
atgatacttgtcgatgatatgtggttaaagtcaactaattttctcggttctcaatcagcattcacatttaaagttgttatacagttaggttcagtatttgcggccgcctgggtatttagagaacgcttcttagaaattttacatattggccaacataaacctgaaccttccacttcgggagacagacgttcaaaaccacgacgtctgaatttaatacatgtattagtaggtatggtcccagcagggattttaggatttttatttgatgatttaattgaaaaatacttatttagtgtaccaacagtcttaattggtttatttataggtgccatttatatgattatagctgataagtattctaaaactgttcagcatcctcaaacagtagatcaaattaattatttccaagcatttgtcattggtatctctcaagcaatagctatgtggcctggatttagtagatccggttcaacgatttcaacaggtgttcttatgaaattgaatcataaagctgcatctgatttcacttttattatgtcggtaccaattatgttagctgcaagtggattatctttactaaaacattatgagtatattcatttagcacacataccattctacattttaggatttttagcggcatttattgttggattaattgcaattaaaacattcttacacttaattaataaagttaagttagtaccttttgctatttatagaattgtcttagttatttttatagcaatcctatacttcggattcggtattggcaaaggaatttaa

SEQ ID NO: 262 - protein, 261 aa, Artificial Sequence
  Description of Artificial Sequence: synthetic amino acid sequence
MILVDDMWLKSTNFLGSQSAFTFKVVIQLGSVFAAAWVFRERFLEILHIGQHKPEPSTSGDRRSKPRRLNLIHVLVGMVPAGILGFLFDDLIEKYLFSVPTVLIGLFIGAIYMIIADKYSKTVQHPQTVDQINYFQAFVIGISQAIAMWPGFSRSGSTISTGVLMKLNHKAASDFTFIMSVPIMLAASGLSLLKHYEYIHLAHIPFYILGFLAAFIVGLIAIKTFLHLINKVKLVPFAIYRIVLVIFIAILYFGFGIGKGI

SEQ ID NO: 263 - DNA, 2358 bp, Artificial Sequence
  Description of Artificial Sequence: synthetic nucleic acid sequence
gtgtcctgtactatggatggtgacggtgcagctgcaatgcgttataccgaagcacgtatgactaaaataacattagaacttttacgtgatattaacaaagacacaattgattttattgacaactatgatggtaatgaaagagagccgtcagtcttacctgcacgtttccctaacttactagtaaatggtgcggcaggaattgccgtaggtatggctacaaatattcctccccacaatttaactgaagttattgatggtgtgctcagtttaagtaagaatccagacatcacaattaatgagctgatggaagacatacaaggtcctgattttcctacagctggtttagtactagggaaaagtggtattcgtcgagcttatgaaacaggtcgtgggtcaattcaaatgcgttctcgtgctgaaatagaagaacgtggtggtggccgtcaacgtattgtcgtaacggaaatacctttccaagtcaataaagcgcgtatgattgaaaaaatcgcagagttagttagagataagaaaatcgacggtattacagatttacgtgatgaaacaagtttgcgtacaggtgtaagagtagttattgatgtacgtaaagatgcaaatgcgagtgttattttaaataatttatataaacaaacgccattacaaacatcatttggtgtgaatatgattgctttagtgaatggtagacctaaactaatcaatttaaaagaagcacttatccattacttagaacaccaaaaaacagtggttagacgacgtactgaatataatcttaaaaaagcaagagaccgtgcccatattctagaaggtttacgaatagcactagatcatattgatgaaattatcacaacaattcgtgaatcggacactgataaaattgcgatggcaagtttacaagagcgttttaaactaactgaacgtcaagctcaagcaattttagatatgcgtttaagacgtttaactggattagaaagagataaaatagaatctgagtataatgaacttctagaatatattaaagagttagaagagattttagctgatgaagaagtactattacaattagttcgtgatgaattgactgaaattaaagaacgtttcggcgatgaacgtcgcactgaaattcaattaggtggtctagaagatcttgaagatgaagacttaatccctgaagaacaaattgttattacattaagtcataataactatattaaacgtttaccagtatctacatatcgttctcaaaatcgtggtggtcgtggcatacaaggtatgaacacgttggatgaggacttcgttagtcaattggtaacaatgagtacacatgattatgttctgttctttacgaataaaggtcgtgtatataaactcaaaggttatgaagttcctgagttgtcacgtcaatccaaaggcatacctattattaatgcgattgaactcgaaaatgacgaaacaataagtacgatgattgcagttaaagaccttgaaagtgaagaagattatctcgtatttgcgacaaaacaaggtatcgttaaacgttcatcattaagtaacttctcccgtattaacaaaaacggtaaaattgcaattaactttaaagaagatgatgaattaattgcagtacgtctaacaacaggtaatgaagatattcttattggaactgcacatgcatcattaattagattctctgaatctacattacgcccattaggccgtacagcagcaggtgtgaaaggtatttctctacgtgaaggggatactgtcgtaggtcttgatgttgcagattcagaaagtgaagatgaagtattagtagttactgaaaatggttacggtaaacgtacacctgttagcgaatatcgtttatcaaatcgtggtggtaaaggaatcaaaactgcgacaattaccgagcgtaatggtaacatcgtttgtatcacaactgtaaccggtgaagaggatttaatggttgtaactaacgctggtgttattattcgtcttgacgttcatgatatttctcaaaatggacgtgcagcacaaggtgtacgccttatgaaactcggagatggtcaatttgtttctactgttgctaaagtaaacgaagaagacgataatgaggaaaatgcagatgaagcgcaacaatctactactactgaaacagcagatgtagaagaggtagtcgatgatcagacaccaggcaatgcgattcatacagaaggtgatgcagaaatggaatctgtagagtttcctgaaaatgatgatcgtattgatatcagacaagattttatggatagagtgaatgaagatatcgagagtgcttcagataatgaagaagatagtgatgaataa

SEQ ID NO: 264 - protein, 785 aa, Artificial Sequence
  Description of Artificial Sequence: synthetic amino acid sequence
VSCTMDGDGAAAMRYTEARMTKITLELLRDINKDTIDFIDNYDGNEREPSVLPARFPNLLVNGAAGIAVGMATNIPPHNLTEVIDGVLSLSKNPDITINELMEDIQGPDFPTAGLVLGKSGIRRAYETGRGSIQMRSRAEIEERGGGRQRIVVTEIPFQVNKARMIEKIAELVRDKKIDGITDLRDETSLRTGVRVVIDVRKDANASVILNNLYKQTPLQTSFGVNMIALVNGRPKLINLKEALIHYLEHQKTVVRRRTEYNLKKARDRAHILEGLRIALDHIDEIITTIRESDTDKIAMASLQERFKLTERQAQAILDMRLRRLTGLERDKIESEYNELLEYIKELEEILADEEVLLQLVRDELTEIKERFGDERRTEIQLGGLEDLEDEDLIPEEQIVITLSHNNYIKRLPVSTYRSQNRGGRGIQGMNTLDEDFVSQLVTMSTHDYVLFFTNKGRVYKLKGYEVPELSRQSKGIPIINAIELENDETISTMIAVKDLESEEDYLVFATKQGIVKRSSLSNFSRINKNGKIAINFKEDDELIAVRLTTGNEDILIGTAHASLIRFSESTLRPLGRTAAGVKGISLREGDTVVGLDVADSESEDEVLVVTENGYGKRTPVSEYRLSNRGGKGIKTATITERNGNIVCITTVTGEEDLMVVTNAGVIIRLDVHDISQNGRAAQGVRLMKLGDGQFVSTVAKVNEEDDNEENADEAQQSTTTETADVEEVVDDQTPGNAIHTEGDAEMESVEFPENDDRIDIRQDFMDRVNEDIESASDNEEDSDE

SEQ ID NO: 265 - DNA, 1287 bp, Artificial Sequence
  Description of Artificial Sequence: synthetic nucleic acid sequence
atgttagacattcgtttatttagaaatgaacctgagaaagtgaagagcaaaattgaattaagaggcgacgatcctaaagttgtcgaccaagttttagaattagatgaacaacgccgtgaattaatcagtaaaactgaagagatgaaggcgaaaagaaataaagtgagcgaagaaatagctcaaaagaaacgtaataaagaagacgctgatgatgtcattgctgagatgcgtcatttaggtgatgaaattaaagatatcgataatcaacttaatgaagtagataataaaattagagatatcttaattcgtattcctaacttaattaatgaagatgtacctcaaggtgattctgatgaagaaaacgttgaagttaaaaaatggggtacgccacgtgattttgaatttgaacctaaagcgcactgggatttagttgaagaattaaaaatggctgactttgaacgtgctgctaaagtatctggtgctcgtttcgtatacttaactaaagatggcgcattacttgaacgtgctttaatgaattacatgttgacaaaacatacaacgcaacatggttatactgaaatgatgacacctcaattagtgaatgctgatacgatgtttggaacaggtcaattacctaaatttgaagaagatttatttaaagttgaaaaagaaggcttatatacgattccaactgcagaagtacctttaacaaacttctatagagatgaaattattcaaccaggtgtactacctgaattatttacagctcaaactgcatgtttccgtagtgaagcaggatcagctggtagagatactagagggttaattcgtttacatcaatttgataaagttgaaatggttcgtattgtacaacctgaagattcttgggatgctttagaagaaatgacacaaaatgctgaagctattcttgaagaattaggtttaccataccgtcgtgttatcttatgtactggcgatattggtttcagtgctagtaaaacatatgatttagaagtttggttaccaagttacaatgattataaagaaatcagttcttgctctaactgtactgatttccaagcacgtcgcgcaaatatcagattcaaacgtgatgctgcttctaaaccagaattagtacacacattaaatggtagtggtttagcagtaggtcgtacatttgcagccatcgttgaaaactatcaaaacgaagatggtacattaacaattcctgaagcattagtaccatttatgggtggcaaaactaaaattgaaaaaccaatcaaataa

SEQ ID NO: 266 - protein, 428 aa, Artificial Sequence
  Description of Artificial Sequence: synthetic amino acid sequence
MLDIRLFRNEPEKVKSKIELRGDDPKVVDQVLELDEQRRELISKTEEMKAKRNKVSEEIAQKKRNKEDADDVIAEMRHLGDEIKDIDNQLNEVDNKIRDILIRIPNLINEDVPQGDSDEENVEVKKWGTPRDFEFEPKAHWDLVEELKMADFERAAKVSGARFVYLTKDGALLERALMNYMLTKHTTQHGYTEMMTPQLVNADTMFGTGQLPKFEEDLFKVEKEGLYTIPTAEVPLTNFYRDEIIQPGVLPELFTAQTACFRSEAGSAGRDTRGLIRLHQFDKVEMVRIVQPEDSWDALEEMTQNAEAILEELGLPYRRVILCTGDIGFSASKTYDLEVWLPSYNDYKEISSCSNCTDFQARRANIRFKRDAASKPELVHTLNGSGLAVGRTFAAIVENYQNEDGTLTIPEALVPFMGGKTKIEKPIK

SEQ ID NO: 267 - DNA, 693 bp, Artificial Sequence
  Description of Artificial Sequence: synthetic nucleic acid sequence
atgactcaccttacgtttaaacaaggtgtgaaagagtgtattcccacgttacttggttatgcaggtgtaggactatcgtttggaattgtggcagtctcccaaaatttcagtgttttagaaattattttattgtgtctgattatttatgctggtgcagctcaatttattatttgtacattagtgattgcaggcacccctatttctgcaattgtgcttacaatacttatcgttaactctcgaatgttcttattaagtatgactttagcacctaattataagcaatatggattttggaatagggtagggcttggaacgttattaacagatgaaacttttggcgttgctataacaccatatgttaaaggtgaaaaaattaacgatcgatggctacacggactaaatattactgcttacttattttggactgtttcctgtgtaatcggtgccattttcggagagtatatttcaaatcctgatgcgctcggcctagactttgcaattaccgcaatgtttatttttttatgtatatctcaatttgaagggattaagaaatcacgattgagaatatatattgtactcattgtatgtgtgattgtgatgatgcttcttctaagttcaattctaccttcatacctagcaattttaatagccgcaattgttgctgcattgttaggggtggtgatggacaaatga

SEQ ID NO: 268 - protein, 230 aa, Artificial Sequence
  Description of Artificial Sequence: synthetic amino acid sequence
MTHLTFKQGVKECIPTLLGYAGVGLSFGIVAVSQNFSVLEIILLCLIIYAGAAQFIICTLVIAGTPISAIVLTILIVNSRMFLLSMTLAPNYKQYGFWNRVGLGTLLTDETFGVAITPYVKGEKINDRWLHGLNITAYLFWTVSCVIGAIFGEYISNPDALGLDFAITAMFIFLCISQFEGIKKSRLRIYIVLIVCVIVMMLLLSSILPSYLAILIAAIVAALLGVVMDK

SEQ ID NO: 269 - DNA, 969 bp, Artificial Sequence
  Description of Artificial Sequence: synthetic nucleic acid sequence
atgacgaattacacggttaatacattagaactaggtgagtttaaaactgaatctggtgaaacgattgatcatttacgtctacgttatgaacatgtaggacttcctggtcaaccccttgtcgttgtttgccatgcacttactggcaatcatttaacatacggcacggatgcacaacctggctggtggcgagaaatcattgacggtggctacattccagttcatgattatcaatttcttacattcaatgtcattggaagtccatttggttcgagttctaaattaaatgatgataacttcccagaacatttaacattgagagatattgttagagctattgagttaggtatacaagcattagaatttaagaaaattaatattctcattggaggtagtttaggtggtatgcaagcgatggaattgctttataatcgtcaattcgaggtggaaaaagcaatcatattagctgctactgataaaacgtcctcttatagtcgtgcttttaacgagattgcaagacaagctatacatataggcggtaaagaaggtttaagtattgcacgtcaactcggctttctcacgtatcgatcgtctaaaagttatgatcaacgttttacaccagatgaagtagtgagctatcaacaacatcaaggtgataagttcaaagaatatttcgatttaaattgttatttaacactgctagacgtcttagatagtcaccatttagatagaggaagagatgatgttgatgaagtctttcagtcgttggaaacgaaagtactaacaatgggttttattgacgatttgctttatcctgatgatcaagtgagagccttaggagaacgttttaaatatcatcgtcatttcttcgtaccagataatgtgggacatgatggttttcttctaaattttaatgattgggcgcctaatttatatcatttcttaaatttgaaacaattccgacgtaaatag

SEQ ID NO: 270 - protein, 322 aa, Artificial Sequence
  Description of Artificial Sequence: synthetic amino acid sequence
MTNYTVNTLELGEFKTESGETIDHLRLRYEHVGLPGQPLVVVCHALTGNHLTYGTDAQPGWWREIIDGGYIPVHDYQFLTFNVIGSPFGSSSKLNDDNFPEHLTLRDIVRAIELGIQALEFKKINILIGGSLGGMQAMELLYNRQFEVEKAIILAATDKTSSYSRAFNEIARQAIHIGGKEGLSIARQLGFLTYRSSKSYDQRFTPDEVVSYQQHQGDKFKEYFDLNCYLTLLDVLDSHHLDRGRDDVDEVFQSLETKVLTMGFIDDLLYPDDQVRALGERFKYHRHFFVPDNVGHDGFLLNFNDWAPNLYHFLNLKQFRRK

SEQ ID NO: 271 - DNA, 927 bp, Artificial Sequence
  Description of Artificial Sequence: synthetic nucleic acid sequence
atgggagtggcgtatgtgttttcaaaaatacaacctaaagcaactattttagcaattatttcattattagtagtcgctttagtaacacatgtattacctgttctcggcttgattttatgtttatttgcaacgattcccggtattgttttgtggaatcgttccatacaatcattcggaattagtgcattagtaacagttgtacttacaacattattaggtaatacatttgtcttaagtatgatggtcttaatcttattattaagtgcgattatcggacaattacttaaggaaagaacatctaaagaacgaattctttatatttcaacagcttcattaagtttagttacacttattggatggatgttattacaaacattcgataaaattccgacggcagctgtattaattaagcctttaaaaaatgcaatgcatgaggctttcttaaaaagtggaatcgattcaaactatagacagattcttgaggaaagtttccgacaaatgacggtccaactccctagttttctaattatagttattttcatttttgtcttaattaatctgattattacatttccaattttacgcaaatttaaagtagcaacacctatttttaaacctttattcgcatggcaaatgagccgtaatttactatggttttatcttatagtacttatttgtgtcatgattgcgagtgaaccaagtacgttccaaagcatcgtgttaaactttgatgttgtgttatcattagtgatgtacatccaaggattaagtgtcattcacttctttggtaaagctaaaagatggccgaactttgcaacaattcttgttatggtagtagggacgcttcttacaccggcaacgcatattgttggattacttggggtaattgatttatgtattaatttaaagaaaataataaaaaaatga

SEQ ID NO: 272 - protein, 308 aa, Artificial Sequence
  Description of Artificial Sequence: synthetic amino acid sequence
MGVAYVFSKIQPKATILAIISLLVVALVTHVLPVLGLILCLFATIPGIVLWNRSIQSFGISALVTVVLTTLLGNTFVLSMMVLILLLSAIIGQLLKERTSKERILYISTASLSLVTLIGWMLLQTFDKIPTAAVLIKPLKNAMHEAFLKSGIDSNYRQILEESFRQMTVQLPSFLIIVIFIFVLINLIITFPILRKFKVATPIFKPLFAWQMSRNLLWFYLIVLICVMIASEPSTFQSIVLNFDVVLSLVMYIQGLSVIHFFGKAKRWPNFATILVMVVGTLLTPATHIVGLLGVIDLCINLKKIIKK

SEQ ID NO: 273 - DNA, 1986 bp, Artificial Sequence
  Description of Artificial Sequence: synthetic nucleic acid sequence
gtgattagaggtggaagaatgaaccgtcaatccactaaaaaagctttgctcataccgtttattttaatggtgctcactgctatagcacttgtcgccgtgtggtttatttttaaccaactagtggcaggtattgctacagctatacttattgtgatgattattattagtggcgtgttattgagaaaagcatttctaaaaatggataattatgtggatgatttaagtggtcacatctcggcaagtagtaacaaggcgattaagcacttgcctatagggatgattgtgttagatgaagataatcacattgagtggatgaaccaatttatgacagatcacattgaaacgaatgtgatttctgaaaatgtcaatgaagtcttccctaacatattaaaacaactggaaaaagttcaagaagtagaaatagaaaacaacaattattactatcatgtacgatattcagaaaacgagcattgtttatacttctttgatatgactgaaactgaacgtacaaacgaactatatgaagattcaaaaccgattattgcaacaatatttttagataattacgatgaaatcactcaaaacatgaacgatacacaacgttctgaaattaactctatggtgacacgtgtgattagtcgttgggcacaggattacaatatttacttcaaacgttacaactcagatcaatttgtagcttactttaaccaaaaaatattggctgaattagaagattctaattttgaaatcttaagccaattaagagaaaagagtgtgggttaccgcgcacaactaacattaagtattggtgtaggtgaaggtactgagaaccttattgatttaggtgaattatcacaatctggtttagacctcgcgttaggtcgtggtggtgaccaagttgcaattaagaatatgaacggcaatgtaagattctatggtggtaagactgaccctatggaaaaacgtacgcgtgtacgtgcgcgtgtgatttcacatgccctcaaagatattcttactgaaggcgataaagttatcgttatgggacataagcgaccagatttagatgctataggtgcagctatcggagtttcgcgctttgcatcaatgaataatttagaggcatttatcgttcttaatgattctgatattgatccgacattacgtcgtgttatggacgagattgataagaaaccggaactaaaagaacgctttgtaacatcggatgaggcttgggatatgatgacttctaagacgactgtcgttgttgtagatacacataaacctgaaatggtcttagatgaaaatgtcttaaataaagcaaaccgcaaagtagtcattgatcatcatagacgtggcgaaagctttatttcaaatccattacttgtgtatatggaaccttacgctagctcaactgctgagctcgtaacggaattactagaatatcaaccaactgaacagagattgactcgtttagaatcaactgtcatgtatgcaggtattatagtagatacaagaaactttactttaagaacaggttccagaacatttgatgccgcaagttatttacgtgcacatggcgctgatacaatcttaacgcagcatttcttaaaagatgatgtcgatacgtatatcaatcgttcagaattgataagaacagttaagatacaagatcaaggtgtagccattgcacatggttcagatgataaaatttatcatcctgtaacggttgcacaagctgccgacgagttgttaagtttagaaggcattgaagcatcttatgtagtagctaaacgtgaagacaacctgatcggtatctcagcacgttcattaggttccataaatgttcaattaacaatggaagcgttaggtggcggtggccatctgacaaatgctgcgacacaaataaaaggtgcgacaatagatgaagcaatagaacaattacaacaagcaattacagaacaaatgagtaggagtgaagacgcatga

SEQ ID NO: 274 - protein, 661 aa, Artificial Sequence
  Description of Artificial Sequence: synthetic amino acid sequence
VIRGGRMNRQSTKKALLIPFILMVLTAIALVAVWFIFNQLVAGIATAILIVMIIISGVLLRKAFLKMDNYVDDLSGHISASSNKAIKHLPIGMIVLDEDNHIEWMNQFMTDHIETNVISENVNEVFPNILKQLEKVQEVEIENNNYYYHVRYSENEHCLYFFDMTETERTNELYEDSKPIIATIFLDNYDEITQNMNDTQRSEINSMVTRVISRWAQDYNIYFKRYNSDQFVAYFNQKILAELEDSNFEILSQLREKSVGYRAQLTLSIGVGEGTENLIDLGELSQSGLDLALGRGGDQVAIKNMNGNVRFYGGKTDPMEKRTRVRARVISHALKDILTEGDKVIVMGHKRPDLDAIGAAIGVSRFASMNNLEAFIVLNDSDIDPTLRRVMDEIDKKPELKERFVTSDEAWDMMTSKTTVVVVDTHKPEMVLDENVLNKANRKVVIDHHRRGESFISNPLLVYMEPYASSTAELVTELLEYQPTEQRLTRLESTVMYAGIIVDTRNFTLRTGSRTFDAASYLRAHGADTILTQHFLKDDVDTYINRSELIRTVKIQDQGVAIAHGSDDKIYHPVTVAQAADELLSLEGIEASYVVAKREDNLIGISARSLGSINVQLTMEALGGGGHLTNAATQIKGATIDEAIEQLQQAITEQMSRSEDA

SEQ ID NO: 275 - DNA, 1410 bp, Artificial Sequence
  Description of Artificial Sequence: synthetic nucleic acid sequence
atggatggaatgtatgagcaaaatcaaatgccgcatagcaatgaagctgaacaatctgtcttaggtgccattattatagatccagaactcattaatactactcaggaagtcttgcttcctgagtcgttttatagaggcgcccatcaacatatttttcgagcaatgatgcacctaaatgaggataataaagaaattgatgttgtcacattgatggatcaattatcaagtgaaggtagcttaaacgaagcgggtggccctcaatatctcgccgaactatcgacgagtgtaccgacaacgcgaaatgttcagtactatacggatatcgtttttaaacatgcgttgaaacggaaacttattcaaaccgctgatagtatagcgaatgatggctataatgatgaattagaattagatacgattttaagtgacgccgaacgacgtattttagaactatcttctacaagagaaagtgatggttttaaagatattagagatgtcttaggacaggtatatgaaaccgcagaagaactcgaccaaaatagtggtcaaacaccaggtattccaactggttatcgtgacttagaccaaatgactgctggttttaatcgtaatgatttaattattctagcggcacgtccttcagtaggtaagactgcctttgccttaaatattgcgcaaaaggttgccacacatgaagatatgtatactgtcggtatcttctcacttgagatgggcgccgaccaattggcgacacgtatgatttgtagttctggtaacgttgattccaatcgtttaagaactgggacgatgactgaagaagattggagtcgctttacgattgcggtaggtaagctatcacgaactaaaatcttcatagacgatacgccaggtatccgtatcaatgatttacgttctaaatgtcgtcgactcaaacaagagcacggtcttgatatgattgtgattgattatctacaattgattcaaggaagcggatcacgtttctcagataaccgtcaacaagaagtttcggagatttcacgtacacttaaggcgattgcacgtgaattagaatgtccagttattgcactgagtcagctatcacgtggcgttgaacagcgacaagacaaacgtcctatgatgagtgatattcgtgaatctgggtctatagaacaagatgccgacatcgtcgctttcttgtatcgtgatgattattataatcgtggtgaaggtgatgaagatgatgacgatgctgacgatgctggttttgaaccacagacaaatgatgataacggtgaaattgaaatcatcatcgccaagcagcgtaatggtccaacaggtactgtgaaacttcactttatgaaacaatacaataaatttacagatattgattatgctcatgcagatatgtcataa

SEQ ID NO: 276 - protein, 469 aa, Artificial Sequence
  Description of Artificial Sequence: synthetic amino acid sequence
MDGMYEQNQMPHSNEAEQSVLGAIIIDPELINTTQEVLLPESFYRGAHQHIFRAMMHLNEDNKEIDVVTLMDQLSSEGSLNEAGGPQYLAELSTSVPTTRNVQYYTDIVFKHALKRKLIQTADSIANDGYNDELELDTILSDAERRILELSSTRESDGFKDIRDVLGQVYETAEELDQNSGQTPGIPTGYRDLDQMTAGFNRNDLIILAARPSVGKTAFALNIAQKVATHEDMYTVGIFSLEMGADQLATRMICSSGNVDSNRLRTGTMTEEDWSRFTIAVGKLSRTKIFIDDTPGIRINDLRSKCRRLKQEHGLDMIVIDYLQLIQGSGSRFSDNRQQEVSEISRTLKAIARELECPVIALSQLSRGVEQRQDKRPMMSDIRESGSIEQDADIVAFLYRDDYYNRGEGDEDDDDADDAGFEPQTNDDNGEIEIIIAKQRNGPTGTVKLHFMKQYNKFTDIDYAHADMS

SEQ ID NO: 277 - DNA, 644 bp, Artificial Sequence
  Description of Artificial Sequence: synthetic nucleic acid sequence
gtggttaaacgagaaaaacttggaggtgctcatatgtcatcaatcgtagtagttgggacacaatggggagacgaaggtaaaggtaaaataacagactttttagcagagcaagcagacgtaattgctagattttctggtggtaacaatgcgggacatacgattcaatttggtggagaaacttacaaattacacttagtaccatcaggtatcttttataaagataaattagcagtaatcggtaacggtgtagttgtagatccagtcgcattattaaaagaattagatgggttaaatgaacgtggcatttcaactgacaacctacgcatctcaaatcgcgcacaagtcattttaccttatcacctagctcaagacgaatatgaagaacgtcgtcgtggcgataataaaatcggtacaacgaaaaaaggtattggcccagcatacgtagataaagcacaacgtatcggtattcgcatggcagatttattagaaaaggaaacattcgaacgccgacttaaagaaaatattgaatataaaaatgcatactttaaaggcatgtttaacgaaacttgtccaacattcgatgaaatctttgacgaatactatgctgcaggtcaacgtttaaaagactatgtgacagacacagc

SEQ ID NO: 278 - protein, 215 aa, Artificial Sequence
  Description of Artificial Sequence: synthetic amino acid sequence
VVKREKLGGAHMSSIVVVGTQWGDEGKGKITDFLAEQADVIARFSGGNNAGHTIQFGGETYKLHLVPSGIFYKDKLAVIGNGVVVDPVALLKELDGLNERGISTDNLRISNRAQVILPYHLAQDEYEERRRGDNKIGTTKKGIGPAYVDKAQRIGIRMADLLEKETFERRLKENIEYKNAYFKGMFNETCPTFDEIFDEYYAAGQRLKDYVTDTA

SEQ ID NO: 279 - DNA, 306 bp, Artificial Sequence
  Description of Artificial Sequence: synthetic nucleic acid sequence
atgaagattttagttcgtgatagcttacctaccgcaatcgtaaagcgactccaatcttcttcagtcatcgtcccagttcttaaacgattggaatcaacgttaccagaactacaaatcatacgtgtcgccaattggtcggcgcccatctcaagtgagaagataccgacagtatacatatcttcatgtgtggcaaccttttgcgcaatatttaaggcaaaggcagtcttacctactgaaggacgtgccgctagaataattaaatcattacgattaaaaccagcagtcatttggtctaagtcacgataa

SEQ ID NO: 280 - protein, 101 aa, Artificial Sequence
  Description of Artificial Sequence: synthetic amino acid sequence
MKILVRDSLPTAIVKRLQSSSVIVPVLKRLESTLPELQIIRVANWSAPISSEKIPTVYISSCVATFCAIFKAKAVLPTEGRAARIIKSLRLKPAVIWSKSR

SEQ ID NO: 281 - DNA, 1005 bp, Artificial Sequence
  Description of Artificial Sequence: synthetic nucleic acid sequence
atgaaacgaggtgtaacaatattgaattggcaacgtaaatgtatactaactactttgttggttttaagtagtttatttttagtattttcgactatcacatatgcgagtgaacgtgattttaaagacagtcttaaaatcactacacataacgtgtatttcttacctactgctatctaccctaattggggacaatctcagcgcgctgatttaatttcaaaagcagattacattcaaaatcaagatgtcgtgattctaaatgaattatttgataaaaaagcttcaaaaagattgttaacacgtctacattcacagtacccttatcaaacacctatcgttggtaaaggtacagaaggttggcaaaatacttctggtacttatagaaaaattaaaaaagtaagtggtggcgttggtattgtgagtaaatggcctatcgtacaacaagaacaacatatttataaaaaaggttgtggggctgatatggcaggtaataaaggctttgcctacattaaaattaataagaatggcaaataccaccatattatcggaacacatctacaagctgaagatccaacatgctttaaaggaaaagataaagacattagacagagtcaaatgagtgaaattaaacagtttatcaaagacaagaatatccctaaaaatgaacccgtctatatcggtggtgacttaaatgtcattaaagattcagatgaatatcaacaaatggcaaataacttaaatgtttcattacctactcaattcgatggtaatgcatatagttgggatactagcagtaatagtattgcgaaatataattatcctaaattagaacctcaacacttagattatattttattagatcatgaccatgcacaaccaagctcatggcataatgatacacatagagtgaagtcaccagaatggtccgtgaaatcttggggaaaaacatacaaatacaatgattactcagatcattacccactctcaggctatgcatcaaatgaatag

SEQ ID NO: 282 - protein, 334 aa, Artificial Sequence
  Description of Artificial Sequence: synthetic amino acid sequence
MKRGVTILNWQRKCILTTLLVLSSLFLVFSTITYASERDFKDSLKITTHNVYFLPTAIYPNWGQSQRADLISKADYIQNQDVVILNELFDKKASKRLLTRLHSQYPYQTPIVGKGTEGWQNTSGTYRKIKKVSGGVGIVSKWPIVQQEQHIYKKGCGADMAGNKGFAYIKINKNGKYHHIIGTHLQAEDPTCFKGKDKDIRQSQMSEIKQFIKDKNIPKNEPVYIGGDLNVIKDSDEYQQMANNLNVSLPTQFDGNAYSWDTSSNSIAKYNYPKLEPQHLDYILLDHDHAQPSSWHNDTHRVKSPEWSVKSWGKTYKYNDYSDHYPLSGYASNE

SEQ ID NO: 283 - DNA, 522 bp, Artificial Sequence
  Description of Artificial Sequence: synthetic nucleic acid sequence
atgcttatcgcagtgatatttgcaatctttacaatgggaatgaagcaacaacggaaaatggaagacattatgaaatcagttacgcatgctatttatccaatcggcatgatgttactcatcatcggtggtggtggtacatttaaacaagtgctcatcgatggtggcgtaggtgatacaatcgctaagatgtttgaaggaacaagcatgtcgcccattttattagcatggattgtagctgcagtcttaaggatttcattaggatcagctacagttgctgccgtatcaacaacaggcattgtgttaccacttttagaacattcagatgttaatgtagctttggtcgttcttgcaataggtgcaggtagcgtaattctctctcacgtcaatgatgctggattctggatgtttaaagaatatttcgggctgacagttaaagaaacatttttaacatggtcgttattagagacaattatttcagtatctggtattttatttattttatttatcagtttatttgtatag

SEQ ID NO: 284 - protein, 173 aa, Artificial Sequence
  Description of Artificial Sequence: synthetic amino acid sequence
MLIAVIFAIFTMGMKQQRKMEDIMKSVTHAIYPIGMMLLIIGGGGTFKQVLIDGGVGDTIAKMFEGTSMSPILLAWIVAAVLRISLGSATVAAVSTTGIVLPLLEHSDVNVALVVLAIGAGSVILSHVNDAGFWMFKEYFGLTVKETFLTWSLLETIISVSGILFILFISLFV

SEQ ID NO: 285 - DNA, 795 bp, Artificial Sequence
  Description of Artificial Sequence: synthetic nucleic acid sequence
atgccaaaagaaatgttaccaatattagataaaccaacaattcaatatattgtagaagaagcttttaatgcaggaatagaagatattattatagtgactggcaagcataaacgtgcaattgaggatcactttgacaatcaaaaagaactagagatagtacttgaaagtaaaggaaaagcagatttacttgaaaaagtacaatattcaacagatttagctaatattttttacgtgcgacaaaaagaacaaaaagggctaggacatgcaattcatactgcaaaacagtttataggtaacgaaccatttgcagtgttattaggagatgacattgtagagtctgatacaccagctattaaacaattaatggatgtttatgaagaaacaggccattcagtaataggtgttcaagaagtgccagaatctgatacacatcgctatggtgtgattgatccttctgctaaagagggaagtcgatatgaagtacgtcaatttgtagaaaagccgaaacaaggtactgccccgtctaatttagcaatcatgggtcgttatgtattaacaccagaaatttttgattatcttgaaacacaacaagaaggtgctggaaatgaaattcaattaactgatgcgattgaacgaatgaatagcaaacaacaagtgtatgcatatgattttgagggtaatcgttatgatgttggagaaaaattagggtttgttaaaacaacgattgaatatgctttaaaagatccagaaatgagtcaagacttaaaagcattcattaaacaactagatatttaa

SEQ ID NO: 286 - protein, 264 aa, Artificial Sequence
  Description of Artificial Sequence: synthetic amino acid sequence
MPKEMLPILDKPTIQYIVEEAFNAGIEDIIIVTGKHKRAIEDHFDNQKELEIVLESKGKADLLEKVQYSTDLANIFYVRQKEQKGLGHAIHTAKQFIGNEPFAVLLGDDIVESDTPAIKQLMDVYEETGHSVIGVQEVPESDTHRYGVIDPSAKEGSRYEVRQFVEKPKQGTAPSNLAIMGRYVLTPEIFDYLETQQEGAGNEIQLTDAIERMNSKQQVYAYDFEGNRYDVGEKLGFVKTTIEYALKDPEMSQDLKAFIKQLDI

SEQ ID NO: 287 - DNA, 471 bp, Artificial Sequence
  Description of Artificial Sequence: synthetic nucleic acid sequence
atgttaacgctatttacttttcatagtggattaactttatctattgaggccactggagatacgtatgttgatgatcatcatataactgaagatataggtatagttattggacaattacttcttgaattaataaagactcaacaaagttttacaagatatggttgctcatatgtacccatggatgaggcgcttgctcgaacagtagtggacattagtggtcgtccatatttctcatttaatagcaagttgagcgctcaaaaggtaggaacttttgacactgaactagttgaagaattttttagagcattgataattaatgcgcgattaaccgttcacattgacttattaagaggtggaaatacacatcatgagattgaggcaatatttaaatcttttgcaagagcattaaagatttctcttgcacaaaatgaagatggacgtattccatcgtctaaaggagtaattgaatga

SEQ ID NO: 288 - protein, 156 aa, Artificial Sequence
  Description of Artificial Sequence: synthetic amino acid sequence
MLTLFTFHSGLTLSIEATGDTYVDDHHITEDIGIVIGQLLLELIKTQQSFTRYGCSYVPMDEALARTVVDISGRPYFSFNSKLSAQKVGTFDTELVEEFFRALIINARLTVHIDLLRGGNTHHEIEAIFKSFARALKISLAQNEDGRIPSSKGVIE

SEQ ID NO: 289 - DNA, 477 bp, Artificial Sequence
  Description of Artificial Sequence: synthetic nucleic acid sequence
gtgcaaaaagctgaagctatcgtacttccaggtgttggacattttcaggatgcgatgcattctatagaagaaaaaagcattaaagatatgcttaaaaatatacatgataaaccgataattggaatatgtttaggtatgcaattactttttcaacatagcgcagaaggtgacgttagtggattggaacttgtcccgggaaatatagtgccaatccaatcatctcatcctattcctcatttgggttggaatgaattaaagagtacacatcccttactgcaaagtgatgtgtattttgttcattcatatcaagcagaaatgtcagaatatgtagtagcttatgctgactatggtacaaagattccgggagtcattcaataccgaaattatataggtatccagtttcatcctgaaaaaagtggaacgtatggattagagattctaaatcaagcgcttaaaggagggtttattaatgattga

SEQ ID NO: 290 - protein, 158 aa, Artificial Sequence
  Description of Artificial Sequence: synthetic amino acid sequence
VQKAEAIVLPGVGHFQDAMHSIEEKSIKDMLKNIHDKPIIGICLGMQLLFQHSAEGDVSGLELVPGNIVPIQSSHPIPHLGWNELKSTHPLLQSDVYFVHSYQAEMSEYVVAYADYGTKIPGVIQYRNYIGIQFHPEKSGTYGLEILNQALKGGFIND

SEQ ID NO: 291 - DNA, 744 bp, Artificial Sequence
  Description of Artificial Sequence: synthetic nucleic acid sequence
gtgattccatgtttagatgttaaagatggacgcgtcgtaaagggtatccagttccagtcattaagagatatcggtaatccagttgatttggctctttattataatgaagccggtgcagatgaactagtctttcttgatatttcgaagacggaagcaggacatgatcttatgatagaagtgatagaagcaacggcaaaacaattatttatccctttaacagtaggaggagggattcaaaatttagatgatattacgcaactattaaatcacggagcagataaaatatcactcaattcaagcgctttaaaacatccagaattaattcgacaagcaagcgagaaatttggtcgtcaatgtatttgtattgctattgatagcttttatgataaagacagaaaggattatttctgtactacgcacggtggtaaaaaattaactgatgtcagggtatatgattgggtacaagaagtagagcttttaggtgctggggaattgcttataactagcatgcatcatgatggaatgaaacaaggttttgatattgaacatttagcaaaaattaaacaattagttaatattccgattattgcctctgggggtggaggaaatgcacaacattttgttgaactatttcaacaaacagatgtttcggcaggtttagcggcaagtattttacatgatcaagaaactacagtggcagaaattaaagataaaatgcgtgaaggaggtatccttgtgagatga

SEQ ID NO: 292 - protein, 247 aa, Artificial Sequence
  Description of Artificial Sequence: synthetic amino acid sequence
VIPCLDVKDGRVVKGIQFQSLRDIGNPVDLALYYNEAGADELVFLDISKTEAGHDLMIEVIEATAKQLFIPLTVGGGIQNLDDITQLLNHGADKISLNSSALKHPELIRQASEKFGRQCICIAIDSFYDKDRKDYFCTTHGGKKLTDVRVYDWVQEVELLGAGELLITSMHHDGMKQGFDIEHLAKIKQLVNIPIIASGGGGNAQHFVELFQQTDVSAGLAASILHDQETTVAEIKDKMREGGILVR

SEQ ID NO: 293 - DNA, 321 bp, Artificial Sequence
  Description of Artificial Sequence: synthetic nucleic acid sequence
atgtaccggcgatggtatctttttcaactacagctacttgcttaccactttgctttaatgttaacgcagcatgccaagctgcatgaccacttcctaaaaatactacatcatattgtttcattaacactcatcctttcttatttttctatgagatgttttaatgtttgctctagttcttcaaacacatatttcgtttcatcatactcagtcgtatcaaattcttgtggtaagcaacttgaaattgcttcaaaaacagcttcttgttgttgttgcccattgtcagttaacgtaattatcaactgtcgtttatcagattgttga

SEQ ID NO: 294 - protein, 106 aa, Artificial Sequence
  Description of Artificial Sequence: synthetic amino acid sequence
MYRRWYLFQLQLLAYHFALMLTQHAKLHDHFLKILHHIVSLTLILSYFSMRCFNVCSSSSNTYFVSSYSVVSNSCGKQLEIASKTASCCCCPLSVNVIINCRLSDC

SEQ ID NO: 295 - DNA, 321 bp, Artificial Sequence
  Description of Artificial Sequence: synthetic nucleic acid sequence
atgagtgataatacaccaccaataaagaacatcctcattacatcaaagatactaatgtttttaaatgcattagattcgaagaagaagattaatcctgaaataggaactaatagtgcgccaataaatatcatacctggtatggcattggcattaccaaatatatttgttaatatccataacgctaggaaagtgatacctaaagctaaaaatacacgtgagaacacccaaggtcttccccactcctcggaaacttcattaatatgtggcgtcgtacgttttgttccagcaataaatacatcatccgcttcatctttggtgtga

SEQ ID NO: 296 - protein, 106 aa, Artificial Sequence
  Description of Artificial Sequence: synthetic amino acid sequence
MSDNTPPIKNILITSKILMFLNALDSKKKINPEIGTNSAPINIIPGMALALPNIFVNIHNARKVIPKAKNTRENTQGLPHSSETSLICGVVRFVPAINTSSASSLV

SEQ ID NO: 297 - DNA, 756 bp, Artificial Sequence
  Description of Artificial Sequence: synthetic nucleic acid sequence
atgtttaaagtagttatttgtgatgatgaaaggattataagagaaggcttaaagcaaatggttccatgggaggactatcatttcaccactgtttatactgccaaagacggcgtggaagcattgtctttaattcgccaacatcaacctgaactcgtcattactgatatacgaatgcctcgaaaaaatggtgttgacctactagatgacatcaaagaccttgattgccagattatcattttatcgagttatgacgacttcgaatatatgaaagccggtatacaacatcatgttcttgattatttactaaagccagtagaccacactcagttagagcatattctagacatattagttcaaaggttattagaacgcccacattctaccaatgatgacgcggcatatcatactgcctttcaaccattattaaaaattgattacgatgactattatgtcaatcaaattttgtctcaaatcaagcaacattatcacaagaaagtgactgttcttgacttaattaatcctattgatgtaagtgagtcatacgccatgaggacgtttaaagaacatgtaggcattacgatagttgattatctaaatcgttatcgtattttaaaatcattacatcttttagaccagcactacaagcattatgaaattgctgaaaaagtaggtttttctgagtataaaatgttttgctatcattttaaaaaatatttacatatgtcaccaagtgattataataagcaatcaaaatag

SEQ ID NO: 298 - protein, 251 aa, Artificial Sequence
  Description of Artificial Sequence: synthetic amino acid sequence
MFKVVICDDERIIREGLKQMVPWEDYHFTTVYTAKDGVEALSLIRQHQPELVITDIRMPRKNGVDLLDDIKDLDCQIIILSSYDDFEYMKAGIQHHVLDYLLKPVDHTQLEHILDILVQRLLERPHSTNDDAAYHTAFQPLLKIDYDDYYVNQILSQIKQHYHKKVTVLDLINPIDVSESYAMRTFKEHVGITIVDYLNRYRILKSLHLLDQHYKHYEIAEKVGFSEYKMFCYHFKKYLHMSPSDYNKQSK

SEQ ID NO: 299 - DNA, 1185 bp, Artificial Sequence
  Description of Artificial Sequence: synthetic nucleic acid sequence
atgcaaacagtcggaattataccttcgccaggtatagcacatcaacatgcaaaaaaaataattccaaatgttaaacagttattgtcaaagcgtactaaacatagtcaatggaatttcgacatcaaagtcgatctcatgataggatctgcagaggatgtacatgaaagtgttgaaaaagcagcacaaattaaagaggaacatcagtgggattacgttgtttgtctgacagatttgcctagtatttcagataataaagtggttgtcagcgactttaatagtgacaaacatgttgcaatgctatcattaccgtcactaggttttattgatttgaagcgcaagctagttaaaacgatgacttcattgattgaacaattatattataatcaaccgaaagacaaaaatgcgccacatccttttgtacgcgtgaaggctgtagaacctgacgaagacgccacatcaaaacaacgatatattaatattttatttatcataagttggattcagttaattggtggactgacacgagcaaatcagccttggaaaaacatctttaattttaagaaaatcatttcagttgcctttgcaacaggaacttatgtctcaatattttcaatgccatgggaattaagcgtgatttattcaccgcttcgacttatcatattgatggtgattgctatacttgggatggctggatggctattctatgcgcatcaattgattgaaaagaaaactgctaaatctcagcgtgtatatcgatatatttataattcaaccacacttgttacactaagtttgattacactcataaattatgtcattttatatttattgttaatcatcagtattacactctttgtccctgtggaattatttaatagttggacgagtgcccaatcacaatttacgttctcaaattatatgagattgatttggtttgtatcatcattaggacttttagctggagctatgggatcaactgttgaaaatgaagagaaaatacgtcgtattacttattcttatagacaatatcatcgttataaagaagctgagcaagaacaaaaagaacaagaaacttctcgtgatgtatcacaacaaaatgtcgaacaacaaacttcaagtaaagatgaaaataatgaacaatatgaaggtaaaaaacaaggacatagagaggaggatgacgcatga

SEQ ID NO: 300 - protein, 394 aa, Artificial Sequence
  Description of Artificial Sequence: synthetic amino acid sequence
MQTVGIIPSPGIAHQHAKKIIPNVKQLLSKRTKHSQWNFDIKVDLMIGSAEDVHESVEKAAQIKEEHQWDYVVCLTDLPSISDNKVVVSDFNSDKHVAMLSLPSLGFIDLKRKLVKTMTSLIEQLYYNQPKDKNAPHPFVRVKAVEPDEDATSKQRYINILFIISWIQLIGGLTRANQPWKNIFNFKKIISVAFATGTYVSIFSMPWELSVIYSPLRLIILMVIAILGMAGWLFYAHQLIEKKTAKSQRVYRYIYNSTTLVTLSLITLINYVILYLLLIISITLFVPVELFNSWTSAQSQFTFSNYMRLIWFVSSLGLLAGAMGSTVENEEKIRRITYSYRQYHRYKEAEQEQKEQETSRDVSQQNVEQQTSSKDENNEQYEGKKQGHREEDDA

SEQ ID NO: 301 - DNA, 1092 bp, Artificial Sequence
  Description of Artificial Sequence: synthetic nucleic acid sequence
gtgggtctagtcgtcgctccaggtgttactgaacgccttgcagaaaatctcatacaagaaatgcctaaaatgttatctacgcattatgatcatcagcaagaatggatttttgatttagttactgatccgcttactggttttgctgaatctgtagatgaaatttttgagaaagtagccgattatcacgataagagacaatgggattatgtgatagcaattacagatttaccgatgtttgctgacaaacaagtgatggcattagatattaatatggaaaatggtgcagctatattctcatatccggcatttggctggcgtccagtaaaaaaacgtttcaagcatgcgatttataatattattcaagaattaaatgaagctgaacaagaaagtcgtaattatgataataataatcaaatagaaaattcagtaaaaaaacaatttccgctctctaaaatagacaaagaaacaatatatatgaaagaaacagactcttatcacttaagatatttatcaagttcacgttctagaggcatgtttcgccttgttagtggaatgacatttgcgaataatccattaaatatgatggcaagtttaagtaatatagtagctattgcatttactacaggtgcatttggacttgtatttacaacgatgtggcaaatggcttataacttttcaatgtggcgtttatttggaatttcaattattgcgattattggaatgctaatatggataatgatgtcacatgatttatgggaaccagttaataaaagcaaccataagcgtattacttggttatacaatcttacaacaataatgacattgatttttgccattataatttattatattattctttatttactattcttaattgctgaaatcgtattattgccatcaggatttttaggtcagcaagttggattaaaaggtcctgcaggcattgatttatatttaagtattccatggtttgcagcttcaatttcgacagttgcaggtgcaataggtgctggtttacttaatgatgaactcattaaagaaagcacatatggatatcgtcagcgtgtaagatacgaagaacaacgtcgataa

SEQ ID NO: 302 - protein, 363 aa, Artificial Sequence
  Description of Artificial Sequence: synthetic amino acid sequence
VGLVVAPGVTERLAENLIQEMPKMLSTHYDHQQEWIFDLVTDPLTGFAESVDEIFEKVADYHDKRQWDYVIAITDLPMFADKQVMALDINMENGAAIFSYPAFGWRPVKKRFKHAIYNIIQELNEAEQESRNYDNNNQIENSVKKQFPLSKIDKETIYMKETDSYHLRYLSSSRSRGMFRLVSGMTFANNPLNMMASLSNIVAIAFTTGAFGLVFTTMWQMAYNFSMWRLFGISIIAIIGMLIWIMMSHDLWEPVNKSNHKRITWLYNLTTIMTLIFAIIIYYIILYLLFLIAEIVLLPSGFLGQQVGLKGPAGIDLYLSIPWFAASISTVAGAIGAGLLNDELIKESTYGYRQRVRYEEQRR

SEQ ID NO: 303 - DNA, 630 bp, Artificial Sequence
  Description of Artificial Sequence: synthetic nucleic acid sequence
atgttctttattggtggtgtattatcactcattagtacaatgattttatatcaatttgttacatttagtactgaatcgcaatattatggaattatgactataacagatgcgttcatagtaggatttgttgaagagcttggaaaagcaactgttgttattttatttattaattatttaaaaacaaataaaatactcaatggattacttatcggtgctgctgttggtgcagggttcgcggtgtttgaatcagctggttatatctttaggtttggatttaatttatttgatggagttaataatattactgaaatcactatacaaagaggttggacagctttaggtagtcacctcgtttgggcagctattgttggtgctgcggcagtaatagtgaaagaaacaaagcatttcgaatgggcgaatatcatcgataaacgttttatatttttcttttttgtggcagtgacattacacggaatatgggatacggaaataacacttttaagtagtggttatttaaaatatatcttattaattatgattgcatggctatttatatttatacttatgaaagcagggctaactcaggtgaatcagttgcgtgatgaatacaatcgtttagaggaaaggtga

SEQ ID NO: 304 - protein, 209 aa, Artificial Sequence
  Description of Artificial Sequence: synthetic amino acid sequence
MFFIGGVLSLISTMILYQFVTFSTESQYYGIMTITDAFIVGFVEELGKATVVILFINYLKTNKILNGLLIGAAVGAGFAVFESAGYIFRFGFNLFDGVNNITEITIQRGWTALGSHLVWAAIVGAAAVIVKETKHFEWANIIDKRFIFFFFVAVTLHGIWDTEITLLSSGYLKYILLIMIAWLFIFILMKAGLTQVNQLRDEYNRLEER

SEQ ID NO: 305 - DNA, 750 bp, Artificial Sequence
  Description of Artificial Sequence: synthetic nucleic acid sequence
atgaaattctgccctcattgtggaaatccgataaaaaaggaacagtcattttgtaataaatgtggaaaacatttaaagacatcgacacaaagaaaaagtgaaaatcaaattgaacatatgcgtgaacagcaatcgtatatttcttgtgaggaaagacaacatcatgattcaacattttataaagaacaaaaacatactggttggctaattgtattatcaattatatttgtcttgttgatagcagcgctattgtatggtgcgtactatacttacaatcattatattagtgatgagcaaagtcatcaaacaacacagtctcagcaatcaaatgaaagtggtcaaaataaggatcaatccactggtccaagcattgatgtttttagtgatgactttgatcaaggttatatgaagtcagcttcaacaagtggatatagaggtgtttataatggaatgacacgtgaagaagttgaagataaatttggaacatccaatggttctgtagaaagtttgaagtggagttacgaaaaatatggtgatttagctgtagcctacgatgataatgaagttgttagcgtaggtgtagcacctaatcatatttcagaagatcaatttttaagtatgtataatgaaccggatgatagaaattcaagccaactcatttatgatagtaacaaagataatgacttctctgtgttagctaatgttaaaaatggatatgttactgtcattgaaaatgtaaatcaaatttaa

SEQ ID NO: 306 - protein, 249 aa, Artificial Sequence
  Description of Artificial Sequence: synthetic amino acid sequence
MKFCPHCGNPIKKEQSFCNKCGKHLKTSTQRKSENQIEHMREQQSYISCEERQHHDSTFYKEQKHTGWLIVLSIIFVLLIAALLYGAYYTYNHYISDEQSHQTTQSQQSNESGQNKDQSTGPSIDVFSDDFDQGYMKSASTSGYRGVYNGMTREEVEDKFGTSNGSVESLKWSYEKYGDLAVAYDDNEVVSVGVAPNHISEDQFLSMYNEPDDRNSSQLIYDSNKDNDFSVLANVKNGYVTVIENVNQI

SEQ ID NO: 307 - DNA, 468 bp, Artificial Sequence
  Description of Artificial Sequence: synthetic nucleic acid sequence
gtgaaagataaatatccgcaattacgcattaaaatgaaaaaaccggaacttacgttagaggaacaaggtgagaaatataatcctgctttatggaagaatgatcctaaccaatgttgctacatacgcaagattaaaccactagaagacgtattatctggtgctgtagcttggatatcaggtcttagacgagcacaatcaccaacacgagcacatacaaatttcattaacaaagatgaaagatttaagtcaattaaagtgtgtcccttaatctattggacagaagaagaagtatggtcttatatacgtgataaggatttaccatataatgaattacatgatcaaaattatccaagtattggttgtattccatgtacatcacccgtatttgattctaatgattcacgtgctggtcgttggtccaattctagtaagactgaatgtggattacatgtagctgataaaccataa

SEQ ID NO: 308 - protein, 155 aa, Artificial Sequence
  Description of Artificial Sequence: synthetic amino acid sequence
VKDKYPQLRIKMKKPELTLEEQGEKYNPALWKNDPNQCCYIRKIKPLEDVLSGAVAWISGLRRAQSPTRAHTNFINKDERFKSIKVCPLIYWTEEEVWSYIRDKDLPYNELHDQNYPSIGCIPCTSPVFDSNDSRAGRWSNSSKTECGLHVADKP

SEQ ID NO: 309 - DNA, 753 bp, Artificial Sequence
  Description of Artificial Sequence: synthetic nucleic acid sequence
gtggttcatatggggaaagtatatttagttggagctggacctggtgatccagaattaataacgttaaaaggtttaaaagccattaaagaagccgatgtcatcctttatgaccgacttgtaaataaagaaatacttaattatgcttctccttctactaagttcttctattgcggtaaggatcctcacaggcactccttaccgcaggaagaaacaaataaaatgatggtaaccttagccaaaaaagggcacatagttacacgtttaaagggtggcgatccatttgtttttggacgtggcggagaagaagcagaggaattagcatgtcataatatccactttgaaattatacctggaattccagtaacacatcgtgattatagttcttctgtagcatttgtaactgcagtgaataaacctggtatggataaaggcaaatactggcaacatttggccaatggtcctgaaactttatgtatttatatgggggttaagagactcagtgaaatttgtgagttgttaatacaatatggtcgttcgtcagaaacaccagtagctctcgtgcatatgggaacgtcaaaacagcaaatgacagtgactgggacactcgatacaattcaagaacgagcacatcatattcagaatccagcaatgattattgtaggcgaagtggttaagatgagagaaaaaattaattggtttgtagaacaggcaactgttcaaaatgaaacgttaacggaaatgtcatcaacttag

SEQ ID NO: 310 - protein, 250 aa, Artificial Sequence
  Description of Artificial Sequence: synthetic amino acid sequence
VVHMGKVYLVGAGPGDPELITLKGLKAIKEADVILYDRLVNKEILNYASPSTKFFYCGKDPHRHSLPQEETNKMMVTLAKKGHIVTRLKGGDPFVFGRGGEEAEELACHNIHFEIIPGIPVTHRDYSSSVAFVTAVNKPGMDKGKYWQHLANGPETLCIYMGVKRLSEICELLIQYGRSSETPVALVHMGTSKQQMTVTGTLDTIQERAHHIQNPAMIIVGEVVKMREKINWFVEQATVQNETLTEMSST

SEQ ID NO: 311 - DNA, 606 bp, Artificial Sequence
  Description of Artificial Sequence: synthetic nucleic acid sequence
atgcccttaatgattgatttaagtaacaagaaagtcgtcattgtaggtggaggtaaagtggcaacacgtcgtgctaaaactttattagcttatacaaaacatattcatgttgtaagtccaacaattaccgatacattacaaaaatatctagaaacgaagcaaatcacttatgaaaagaaacacttcgaaccacaagatgttgagaatgctgatgtggtcatcgcggctactaatcaatctgatgttaacaacgatgtgggggcagctttgtctaagaacgtattatttaatcatgcaggacaagcagacctaggtaatgtaacgttccctaatttcttaaaaagagataaattaacaataagtgtatcaactgatggtgcaagtcctaaattaggtcaacgaattattaaagatttaaaagatacatacaatgaagactattcaatgtatattcagtttttatatgaaagtagacaatatattaaatcacttaaaattgagccatctgataaacaagcgttactcgagcaaattttgtcagacaaatatttagatgagaagaagcaacaagatttcatccgatggctaaaatcacaagtcaaatga

SEQ ID NO: 312 - protein, 201 aa, Artificial Sequence
  Description of Artificial Sequence: synthetic amino acid sequence
MPLMIDLSNKKVVIVGGGKVATRRAKTLLAYTKHIHVVSPTITDTLQKYLETKQITYEKKHFEPQDVENADVVIAATNQSDVNNDVGAALSKNVLFNHAGQADLGNVTFPNFLKRDKLTISVSTDGASPKLGQRIIKDLKDTYNEDYSMYIQFLYESRQYIKSLKIEPSDKQALLEQILSDKYLDEKKQQDFIRWLKSQVK

SEQ ID NO: 313 - DNA, 834 bp, Artificial Sequence
  Description of Artificial Sequence: synthetic nucleic acid sequence
atgggatttggcgcttcatcgtcatcaatattattaacttacggtatagcaccggcagtagtgtcagcaaccgttcatttttctgaaattgcaacaacagctgcatctgggacatcacattggagatttgataatgttcataaaccaacaatgttgaagttagctatacctgggtcaataagcgcctttatcggtgcaggtgttttgacatttattcatggtgattatattaaaccattcattgctttattcttgttaagtatgggattttatattttgtatcaatttctatttaaacgtgcacatgaacatcatcatcatgtgggaaatttgagtagttttaaagtaattccacaaggttttgtggcaggatttttagacgcaatcggtggtggtggttggggaccggttaatacgccgctcctgctttcaagtaaaaaaattcaaccacgatatgcgattggaacagtctcagcaagtgaattttttgttacgtcatctgccgctttaagtttcattatctttttaggagtcactcaaattaattggtttgctgtaattgctttaagtctcggtggaatggtagcagcacctatttcagcgtatttagttaaagtgttacccattaacattcttgcaatttgtgtcggtggtttaattatttttacaaatagtaatgcattattaagctattttgtaaaagataacactatttcaaatacagttcgattcattattattcttgcaattattattttgcttgtttttcaagtcgttcgaaacaagaaattgtctttttcttataagaaaagccgagtaaacaaatataattaa

SEQ ID NO: 314 - protein, 277 aa, Artificial Sequence
  Description of Artificial Sequence: synthetic amino acid sequence
MGFGASSSSILLTYGIAPAVVSATVHFSEIATTAASGTSHWRFDNVHKPTMLKLAIPGSISAFIGAGVLTFIHGDYIKPFIALFLLSMGFYILYQFLFKRAHEHHHHVGNLSSFKVIPQGFVAGFLDAIGGGGWGPVNTPLLLSSKKIQPRYAIGTVSASEFFVTSSAALSFIIFLGVTQINWFAVIALSLGGMVAAPISAYLVKVLPINILAICVGGLIIFTNSNALLSYFVKDNTISNTVRFIIILAIIILLVFQVVRNKKLSFSYKKSRVNKYN

SEQ ID NO: 315 - DNA, 435 bp, Artificial Sequence
  Description of Artificial Sequence: synthetic nucleic acid sequence
atgtctaacaatgaaacaataaccaattatacaattaaacctcatggaggagaactcatcaatcgtgttgttgaaggaaacgaacgtgaacgtttgattgaggaagcattaaattttaaaccgattactttaaatccttggggaatatcggatctagagctcataggtattggcggatttagtccccttacaggatttatgaacaaggaagactacactaaggttatagaggaaacacatttaagcaatggcttagtttggagtattcctatcactttacctgtaacagaatccgaagcagataaacttgaaataggtgatgatattgctttatatggtgaagatggtcagttatatggaacgcttaaattagaagaaaagtacacatatgataaagaaaaagaagcgcgtttggtgtacggaactactgaagaa

SEQ ID NO: 316 - protein, 145 aa, Artificial Sequence
  Description of Artificial Sequence: synthetic amino acid sequence
MSNNETITNYTIKPHGGELINRVVEGNERERLIEEALNFKPITLNPWGISDLELIGIGGFSPLTGFMNKEDYTKVIEETHLSNGLVWSIPITLPVTESEADKLEIGDDIALYGEDGQLYGTLKLEEKYTYDKEKEARLVYGTTEE

SEQ ID NO: 317 - DNA, 1356 bp, Artificial Sequence
  Description of Artificial Sequence: synthetic nucleic acid sequence
atgggaaaatattttggtactgatggtgttcgtggtgtcgctaaccaagaactcacacctgaattggcttttaaactaggtagatacggaggatatgttctcgcacataataagggtgaaaagcatcctcgagttttagtaggaagagatacaagagtttcaggagaaatgctagaatctgcattaattgctggtttaatttcaattggcgcagaagtgatgcgcttaggtgttatttcaacaccgggtgtggcttatttgactaaagaaatggaagcagcattaggtgttatgatttctgcgtcacataatccggttgctgataatggaattaaattttttggttcagatggctttaaattgtcagatgatcaagaaaatgaaattgagcaattattagatcaaaccaatcctgatttaccacgaccagtaggagaggatattgtacattattcagattattttgaaggtgcacaaaagtatctaagttatcttaaatcaactgttgatgttaattttgagggtcttaaaattgtattagatggtgcaaacgggtcaacttcttctttagccccattcttgtttggcgatttagaagcggatactgagacaattggatgtaatccagatggttataacattaatgaacaatgtggctctactcatccagaaaaattagctgaagctgtgttagaaactgaaagtgactttggtttagcttttgatggagatggcgatcgaattattgcggtagatgaaaatggacaaattgtagatggagatcaaattatgttcattattggtcaagagatgtataaaaaccaagaactcaatggaaatatgatagtttcgacagtaatgagtaaccttggtttctacaaagctctagaaaaagaaggtattcagtcaaacaaaactaaagttggagatcgctatgttgtcgaggaaatgagaagaggaaattataatcttggtggtgaacaatccggtcatatcgtattaatggattacaatactactggtgatggattattaacgggtgttcagttggcttccgttattaaaatgagtggtaaaactctaagcgagttagcttctcaaatgaaaaagtacccacaatctttaattaatgtgagagtgactgacaaatatcgtgttgaagagaatattcatgttcaagagataatgacgaaagttgaaacagagatgaatggtgaaggaagaattcttgttcgtccttctggaactgaacctttagtacgtgtaatggttgaggctgcaactgacgcggatgctgaaagatatgctcaaagtatcgctgacgttgttgaagacaaaatgggcttagataaataa

SEQ ID NO: 318 - protein, 451 aa, Artificial Sequence
  Description of Artificial Sequence: synthetic amino acid sequence
MGKYFGTDGVRGVANQELTPELAFKLGRYGGYVLAHNKGEKHPRVLVGRDTRVSGEMLESALIAGLISIGAEVMRLGVISTPGVAYLTKEMEAALGVMISASHNPVADNGIKFFGSDGFKLSDDQENEIEQLLDQTNPDLPRPVGEDIVHYSDYFEGAQKYLSYLKSTVDVNFEGLKIVLDGANGSTSSLAPFLFGDLEADTETIGCNPDGYNINEQCGSTHPEKLAEAVLETESDFGLAFDGDGDRIIAVDENGQIVDGDQIMFIIGQEMYKNQELNGNMIVSTVMSNLGFYKALEKEGIQSNKTKVGDRYVVEEMRRGNYNLGGEQSGHIVLMDYNTTGDGLLTGVQLASVIKMSGKTLSELASQMKKYPQSLINVRVTDKYRVEENIHVQEIMTKVETEMNGEGRILVRPSGTEPLVRVMVEAATDADAERYAQSIADVVEDKMGLDK

SEQ ID NO: 319 - DNA, 1017 bp, Artificial Sequence
  Description of Artificial Sequence: synthetic nucleic acid sequence
atgttacaaactacaaaccaatacaaagagatacatgaccatgaaatagttattgttaagcgagacacagtagaaattaaagatcttgaggggcacattcaacaacgtgatacgtatacggcagaaatagatgctgctgatgcagaaaaaggcgtatatgatcattacatgttaaaagaaattcatgaacagcctgcagtgatgcgtcgcattattcaagaatatcaagatgaaaaaggtaatttaaaaatcgattcagagattattaatgatgtagcagatgctgatcgtatttacatcgttgcagctggtactagttatcatgctggattggttggtaaagaatttattgaaaaatgggcaggtgtacctactgaggttcatgtagcttctgaatttgtatataatatgccacttctttctgaaaaaccactatttatttatatttcacaatctggtgaaacagctgatagtcgtgctgtattagttgaaacaaataagttaggtcacaaatcattaacaattactaatgttgctggttcaacattatcacgtgaagcggatcatacattacttttacatgctggacctgagattgcagtcgcatctacaaaagcatatacagcgcaaattgctgttttatctatcttatctcaaattgttgctaaaaatcatggtcgtgaaaccgatgttgatttattaagagaactagctaaggttactacagctattgaaacaattgttgacgatgcacctaagatggagcaaattgcaacggatttcttaaaaactactcgtaatgcattcttcattggacgaacaattgattataatgttagtttagaaggtgcattaaaattaaaagaaatttcttatattcaagctgaaggatttgcaggtggggaattaaagcacggaacaatcgctttgattgaagatggcacacctgttataggtttagctacacaagaaaacgttaatctatcaattcgtggaaatatgaaagaagtactttag

SEQ ID NO: 320 - protein, 338 aa, Artificial Sequence
  Description of Artificial Sequence: synthetic amino acid sequence
MLQTTNQYKEIHDHEIVIVKRDTVEIKDLEGHIQQRDTYTAEIDAADAEKGVYDHYMLKEIHEQPAVMRRIIQEYQDEKGNLKIDSEIINDVADADRIYIVAAGTSYHAGLVGKEFIEKWAGVPTEVHVASEFVYNMPLLSEKPLFIYISQSGETADSRAVLVETNKLGHKSLTITNVAGSTLSREADHTLLLHAGPEIAVASTKAYTAQIAVLSILSQIVAKNHGRETDVDLLRELAKVTTAIETIVDDAPKMEQIATDFLKTTRNAFFIGRTIDYNVSLEGALKLKEISYIQAEGFAGGELKHGTIALIEDGTPVIGLATQENVNLSIRGNMKEVL

SEQ ID NO: 321 - DNA, 1290 bp, Artificial Sequence
  Description of Artificial Sequence: synthetic nucleic acid sequence
atgaaatttactgaaagcgaacgtcttcagcaactttctaatgaatatattttgggaggtgtgaattcaccttcaaggtcgtataaagcagtaggtggtggggcaccagtagtaatgaaagaaggtcatggcgcttacttatatgatgtagatggtaataaatatatcgactatctacaagcttatggtccaataataactggtcatgcacacccacatatcaccgaagctatccaagatcaagcagcaaaaggcgtactttatggtacccctactgaattagaaataaatttctcaaaaaaacttagagaagcagttccttctttagaaaagattcgtttcgtgaactctggtactgaagcagttatgacaacaattagagttgctcgtgcttatactaaaagaaacaaaatcattaagtttgcaggctcttatcatggtcattctgatttagttttagtggcagctggaagtggaccttctcaacttggttctccagattctgctggtgtcccccaaagtgttgcacaagaggttattacagtaccgtttaatgatatagaatcatatagagaagctattgattattggaaagacgacattgctgcagtattagtagagccgattgtgggtaattttgggatggtcatgccacaaccaggtttcttagaagaagtaaataaaatttctcatgataatggaacattagttatctatgatgaagttatcactgcttttcgtttccattatggtgcagctcaagatttattaggtgttaaaccagacctcactgcttttggtaagattgttggcggtggtttaccaattggaggctatggtggtcgacaagatattatggagcacgttgcaccattaggtccagcttatcaagcaggaacaatggccggtaacccgttatctatgagagcaggtattgctttattagaggtacttgaacaagaaggtgtttatgataaacttgatcaattaggtcgtcgtcttgaagaagggttacaaaaattaatagataagcatcatattacagcaacaataaatcgaatctatggctcactgacattgtatttcacaaatgaaaaagttacacattatgaacaagttgaaaactctgatggagatgctttcgctcaattctttaaattaatgttgaaccaaggcattaatctcgcgccttctaaatttgaagcatggttcttaactacagaacatactgaagaagatatcgatcgcacactagaagcagctgattatgcatttagtaaaatgaaataa

SEQ ID NO: 322 - protein, 429 aa, Artificial Sequence
  Description of Artificial Sequence: synthetic amino acid sequence
MKFTESERLQQLSNEYILGGVNSPSRSYKAVGGGAPVVMKEGHGAYLYDVDGNKYIDYLQAYGPIITGHAHPHITEAIQDQAAKGVLYGTPTELEINFSKKLREAVPSLEKIRFVNSGTEAVMTTIRVARAYTKRNKIIKFAGSYHGHSDLVLVAAGSGPSQLGSPDSAGVPQSVAQEVITVPFNDIESYREAIDYWKDDIAAVLVEPIVGNFGMVMPQPGFLEEVNKISHDNGTLVIYDEVITAFRFHYGAAQDLLGVKPDLTAFGKIVGGGLPIGGYGGRQDIMEHVAPLGPAYQAGTMAGNPLSMRAGIALLEVLEQEGVYDKLDQLGRRLEEGLQKLIDKHHITATINRIYGSLTLYFTNEKVTHYEQVENSDGDAFAQFFKLMLNQGINLAPSKFEAWFLTTEHTEEDIDRTLEAADYAFSKMK

SEQ ID NO: 323 - DNA, 1044 bp, Artificial Sequence
  Description of Artificial Sequence: synthetic nucleic acid sequence
atgtctatcgcttctttacttcctgataatattggtctaaaaacgttagcaggtgtcagtgcagtagttgccatgcaaccgagtgtttatcgctcaatcaaaactgtttctgaacaagctattggtaatgtgattggtgcattacttgcagtaacaatggtaacgatattcaataataatttcattatcatgggcgttaccgttattttactcattgcaattttgttccaatttaatcttgcccatgtagcaacacttgcaagcgtaactgcacttataattatggggcaacacactggttctttctatgttgtcgcattttttagatttgtactagtgatgattggtgtattgagttcttctgttgtcaatctaatttttttacctcctaagtttgaaacaaaaatttattataattctatgaatatttcttctgatatatttgtttggtttaaacttgtactcaatgacacatcagaatttcataatattaaacaggatggtgatcaactaaactcacgcatcaataaattagaaaagattttcgactattacaatgaagaaagaccattaacaaaaaaacatatttatcaacagaatagaaaaaaaatactatttagagaagtagttagaacgaccagacaagcatatgaagtgctaaaacgaatgtcacgatatcaaaatgatttatatcaactaaataatcaattacttttacaaatcaaattagaacttgattcattagttactttacatgaacaaatatttaagagtctatcaaaaaaagctagatatgatgtcactcaattagattatgaagttgacaatcctcagaagaaaaacttgatggatgcttttcagcaagaattaattaaaaacccacatcagacgcaatattcttatagcaatatgatgcaaattattgctgaaattgaagaatacagatatcaacttgaacacttagatagaatccgtttaagtttctttacctatcaccgttctgatactgatatagacatttcaaatgaggactttgacttataa

SEQ ID NO: 324 - protein, 347 aa, Artificial Sequence
  Description of Artificial Sequence: synthetic amino acid sequence
MSIASLLPDNIGLKTLAGVSAVVAMQPSVYRSIKTVSEQAIGNVIGALLAVTMVTIFNNNFIIMGVTVILLIAILFQFNLAHVATLASVTALIIMGQHTGSFYVVAFFRFVLVMIGVLSSSVVNLIFLPPKFETKIYYNSMNISSDIFVWFKLVLNDTSEFHNIKQDGDQLNSRINKLEKIFDYYNEERPLTKKHIYQQNRKKILFREVVRTTRQAYEVLKRMSRYQNDLYQLNNQLLLQIKLELDSLVTLHEQIFKSLSKKARYDVTQLDYEVDNPQKKNLMDAFQQELIKNPHQTQYSYSNMMQIIAEIEEYRYQLEHLDRIRLSFFTYHRSDTDIDISNEDFDL

SEQ ID NO: 325 - DNA, 1647 bp, Artificial Sequence
  Description of Artificial Sequence: synthetic nucleic acid sequence
atgctcatacctttattgattaaatatgctatagatggcgtgattaataatcattcgcttacaaatcaagaaaaatttagtcaccttggtgtagcaataggaattgcattatttattttcttaattgttcgcccgccgattgagtttattagacaatatttagctcaatggacaagtaataaaatactatatgatattcgtaaacaattgtataatcacttgcaagcactaagtgttcgcttttatgcaaataatcaagtcggtcaagtcatttcaagagtgattaatgatgtcgaacaaacaaaagactttattcttactggattgatgaatatctggcttgactgtataacgattattatcgcactttctattatgttcttccttgatgtaaaattgacgtttgctgcaatttttatttttccattttatattttaactgtttattttttctttggaagattacgaaaacttacacgtgtgcgctcacaagctctagcagaagtacaaggtttcttacatgagcgggttcaaggaatgtctgttattaaaagttttgctattgaagacaatgaagctaaaaattttgataaccataacaagaattttttacaacgagccttccaacatacaagatggaacgcatattcttttgctgctattaatactgttacagatttaggcccaataattgtgattggcgtgggttcatatttggcaattacaggatcgattactgtcggaactctagcagcatttgtcggttatctagaacaattatttggaccacttagaagactagtatcttcatttactacacttacacaaagttttgcatctatggacagagtatttcagttaatggatgaggattacgacatcaaaaatggcattggagcacagccaattaaaatcagtaagggtcaaattgatttaaaacatgtgagtttcaaatataatgaaaatgaaaaagaagtattacacgatattaatttaacaattaacaaaggcgaaactgtagcatttgtaggtatgagtggtggtggaaaatctactttgattaatcttataccaagattttatgatgttactcaaggtgaaatacttatcgatcatcataatgttaaagatttcctaactggtagtttaaggaatcaaataggcttagtacaacaagataatattcttttttctgatacggttaaggagaatattttgttgggtaggcctgatgcgactgatgatgaagtcgtagaagctgcaaaaatggcgaatgcccatgattttatttcaaatttaccgaatggatatgatactgaagtaggagaacgaggagttaaattatctggtggacaaaaacaaaggttgtcaattgcacgtatctttttaaataatcctcctgttttaatattagatgaagcaacaagtgcattggatttagagagtgaagctattattcaagaagcacttgatgttttaagtaaggatagaacaacattaattgttgcacatcgtctatctaccattactcatgcagatagaatagttgtaatggaaaatggacgaattgttgagactggcacacaccaacaattaattaataaacgtggtgcttatgagcatctttatagtattcaaaatttataa

SEQ ID NO: 326 - protein, 548 aa, Artificial Sequence
  Description of Artificial Sequence: synthetic amino acid sequence
MLIPLLIKYAIDGVINNHSLTNQEKFSHLGVAIGIALFIFLIVRPPIEFIRQYLAQWTSNKILYDIRKQLYNHLQALSVRFYANNQVGQVISRVINDVEQTKDFILTGLMNIWLDCITIIIALSIMFFLDVKLTFAAIFIFPFYILTVYFFFGRLRKLTRVRSQALAEVQGFLHERVQGMSVIKSFAIEDNEAKNFDNHNKNFLQRAFQHTRWNAYSFAAINTVTDLGPIIVIGVGSYLAITGSITVGTLAAFVGYLEQLFGPLRRLVSSFTTLTQSFASMDRVFQLMDEDYDIKNGIGAQPIKISKGQIDLKHVSFKYNENEKEVLHDINLTINKGETVAFVGMSGGGKSTLINLIPRFYDVTQGEILIDHHNVKDFLTGSLRNQIGLVQQDNILFSDTVKENILLGRPDATDDEVVEAAKMANAHDFISNLPNGYDTEVGERGVKLSGGQKQRLSIARIFLNNPPVLILDEATSALDLESEAIIQEALDVLSKDRTTLIVAHRLSTITHADRIVVMENGRIVETGTHQQLINKRGAYEHLYSIQNL

SEQ ID NO: 327 - DNA, 453 bp, Artificial Sequence
  Description of Artificial Sequence: synthetic nucleic acid sequence
gtgagtgcggaacttgaatctattgatcatgaacttgaagagtcaattgcttcattaagaaaagcgggcgttcgcattacaccccaaagacaagcaattatgcgttatcttatatcttcacattcacatccaacagcagatgaaatatatcaagcactttcacctaaatttcctaatataagtgttgctactatctataataatctaagagtttttaaagatattggtatagtcaaagagttaacatatggtgattcatctagtaggtttgattttaatacacataatcactaccatattatatgtgaaaaatgtggtaaaatcgttgacttccattatccacaattagatgaagtagagcaattagctcaacatgtaacagattttgatgttactcatcatcggatggaaatatatggagtatgtaaagaatgtaaagaagaaggaaattga

SEQ ID NO: 328 - protein, 150 aa, Artificial Sequence
  Description of Artificial Sequence: synthetic amino acid sequence
VSAELESIDHELEESIASLRKAGVRITPQRQAIMRYLISSHSHPTADEIYQALSPKFPNISVATIYNNLRVFKDIGIVKELTYGDSSSRFDFNTHNHYHIICEKCGKIVDFHYPQLDEVEQLAQHVTDFDVTHHRMEIYGVCKECKEEGN

SEQ ID NO: 329 - DNA, 345 bp, Artificial Sequence
  Description of Artificial Sequence: synthetic nucleic acid sequence
gtgacaaaccggaggaaggtggggatgacgtcaaatcatcatgccccttatgatttgggctacacacgtgctacaatggacaatacaaagggtagcgaaaccgcgaggtcaagcaaatcccataaagttgttctcagttcggattgtagtctgcaactcgactatatgaagctggaatcgctagtaatcgtagatcagcatgctacggtgaatacgttcccgggtcttgtacacaccgcccgtcacaccacgagagtttgtaacacccgaagccggtggagtaaccatttggagctagccgtcgaaggtgggacaaatgattggggtgaagtcgtaacaaggtag

SEQ ID NO: 330 - protein, 114 aa, Artificial Sequence; identical to SEQ ID NO: 256
  Description of Artificial Sequence: synthetic amino acid sequence

SEQ ID NO: 331 - DNA, 792 bp, Artificial Sequence
  Description of Artificial Sequence: synthetic nucleic acid sequence
atgaaaacagaaagttttactagagcagcagaaaatttatatacttcgcagccttctgtgagtcgtgatattaaacgtttagaattaaaatataatgttaaaatatttgaatttaaatctccatatttaaaactaactagagatggcgaaaagctattacaatacgcattgcaacgggaaagtattgaacaagaattatggcaaaacttaacatcggaatctgaaatcatctcaggcaccttaacaattggaagcagttatacatatggtgaatatttattatcagaacagcttaccagtcttatgcaacaataccctaagttacatattcatttacgtgttaataattcagattctgttataaatgatattaaacacaacagagtagatataggtattgtagaaaaggaaattcaagacaatgcaataaaatgtaaggaaataatggaagacgaaatggtgtatatttacaaaaaatcgattcaacctagaatggatatatgtttcgttagagaaaaagggtctggaacaaggttttatcaggaagtaggtctttctgagttgaaattaaatccatatttgatagaaattaacaatattaagattattaaacaaatggtagaggctggaaatgggtttgcaattatttcaaaatcagcacttcatccagaagattatgaaaaattaatgataacaactttaaatgtgaaacgtcactattaccttgctcaacatgttgataaatatataggtgaaaatattagagctgtcattgaaatgattatgaagtag

SEQ ID NO: 332 - protein, 263 aa, Artificial Sequence
  Description of Artificial Sequence: synthetic amino acid sequence
MKTESFTRAAENLYTSQPSVSRDIKRLELKYNVKIFEFKSPYLKLTRDGEKLLQYALQRESIEQELWQNLTSESEIISGTLTIGSSYTYGEYLLSEQLTSLMQQYPKLHIHLRVNNSDSVINDIKHNRVDIGIVEKEIQDNAIKCKEIMEDEMVYIYKKSIQPRMDICFVREKGSGTRFYQEVGLSELKLNPYLIEINNIKIIKQMVEAGNGFAIISKSALHPEDYEKLMITTLNVKRHYYLAQHVDKYIGENIRAVIEMIMK

SEQ ID NO: 333 - DNA, 804 bp, Artificial Sequence
  Description of Artificial Sequence: synthetic nucleic acid sequence
atggattatagagtactactttattataaatatgtaactatagatgaccctgaaacttttgcagccgaacatttgaaattttgtaaggaacatcatttaaaaggaagaatactagtttcaacggaaggcattaatggaacattatctggaacaaaagaagatactgataaatatatagagcatatgcatgcagatagtcgttttgctgatttaacttttaaaattgatgaagctgaaagtcatgcgtttaaaaagatgcacgtgcgtccaagacgtgaaattgttgcacttgacttagaagaagatattaatccacgtgaaattaccggtaaatactattctcctaaagaatttaaagccgcactagaagatgaaaatactgttatattagatgctcgaaatgattatgaatacgatttaggacatttccgtggagctattcgtcctgatataacacgattccgtgacttacctgaatgggtgcgtaataataaagaacaactcgacggaaaaaatattgtcacatattgtacaggtggcattcgttgtgaaaaattttctggttggttagtaaaagaaggatttgaaaacgtaggtcagttgcatggtggtattgctacatacggtaaagaccctgaaactaaagggctatattgggatggtaagatgtatgtatttgatgaacgtattagtgtcgatgtgaatcaaattgataaaacagtcatcggcaaagagcattttgatggtactaaatactgtcttattctaaacctagtatatcagtattttttacaatcgttctaa

SEQ ID NO: 334 - protein, 267 aa, Artificial Sequence
  Description of Artificial Sequence: synthetic amino acid sequence
MDYRVLLYYKYVTIDDPETFAAEHLKFCKEHHLKGRILVSTEGINGTLSGTKEDTDKYIEHMHADSRFADLTFKIDEAESHAFKKMHVRPRREIVALDLEEDINPREITGKYYSPKEFKAALEDENTVILDARNDYEYDLGHFRGAIRPDITRFRDLPEWVRNNKEQLDGKNIVTYCTGGIRCEKFSGWLVKEGFENVGQLHGGIATYGKDPETKGLYWDGKMYVFDERISVDVNQIDKTVIGKEHFDGTKYCLILNLVYQYFLQSF

SEQ ID NO: 335 - DNA, 333 bp, Artificial Sequence
  Description of Artificial Sequence: synthetic nucleic acid sequence
gtgttagcagaggttaagttgtcgtctaaaaacaaaaaagcgatagcgttagccattggtgcactgtcagtagataaatctattcgaaaccaaggtttaggtcaagccctgttaaaagctgtagaagaacgtgctaaagaacaaggctattgtgctatttttgtaaataatcatcctcagtactttgagaaatctgattatgaagcagcccatttatataatatacatatagaagaaaaacgaaatcatcaatcattattagtaaaatttctaaaaccagttcaaaatgaatggtctggaatgacggtgtattatccggaagtactggattga

SEQ ID NO: 336 - protein, 110 aa, Artificial Sequence
  Description of Artificial Sequence: synthetic amino acid sequence
VLAEVKLSSKNKKAIALAIGALSVDKSIRNQGLGQALLKAVEERAKEQGYCAIFVNNHPQYFEKSDYEAAHLYNIHIEEKRNHQSLLVKFLKPVQNEWSGMTVYYPEVLD

SEQ ID NO: 337 - DNA, 1056 bp, Artificial Sequence
  Description of Artificial Sequence: synthetic nucleic acid sequence
atggatcaagcaatagcgtttggagacgaacgacttactttacaagatgctttaaatgttacaggtagtgttgatgaagcggcattaaatgagttatttaatgacattgtaaaaagtgatgttaaagccgcatttaatagatatcatcattttatttcagaaggtaaagaagtcaacagactcattaatgatatgatttactttgttagagatacaattatgaataaaacgtctaacgaatccgttcattttgaatcacttattcatttcgacttagatatgttatacaggatgatagatatcatcaatgatacactagtatccattaggttcagtgtaaatcaaagtgttcattttgaagtgttgctagttaaacttgcagaaatgattaagacacagcctcaaactgtacaaaatgtagcaacagcatcggtagctaatgaaccagataatgagatgttattacaacgtttagaacaacttgaaaatgagcttaaaaccttaaaagaacaagggatcaaaactaataaagttagtcaacaacctaagaaaccaacacgtacgattcaacgatctaaaaatacgttttctatgcaacaaatagcgaaagtattagacaaagcaaacaaagatgatatcaaattgttgaagaaccattggcaagaagtgattgatcatgcaaaaagtaatgataaaaagtctttagtaagtttgctactgaattcagaaccagtagcagctagtgaagatcatgtgttagttaaatttgatgaagaaattcattgtgaaatagtaaataaagatgatgaaaagagaaacaatattgaaagtgtagtttgtaatatagttaataaaactgtcaaagtagttggagtgccggctgaccaatggctgagagtgagagcagagtacttacaaaatcgtaacaccaatgaaacacatcaaagcgaaaaacaaagcacacaacagtctcaacaaatagatattgctcaaaaagccaaaatattgaagtgtttacgacacgaccagatacaatctatggtacttctttcttag

SEQ ID NO: 338 - protein, 351 aa, Artificial Sequence
  Description of Artificial Sequence: synthetic amino acid sequence
MDQAIAFGDERLTLQDALNVTGSVDEAALNELFNDIVKSDVKAAFNRYHHFISEGKEVNRLINDMIYFVRDTIMNKTSNESVHFESLIHFDLDMLYRMIDIINDTLVSIRFSVNQSVHFEVLLVKLAEMIKTQPQTVQNVATASVANEPDNEMLLQRLEQLENELKTLKEQGIKTNKVSQQPKKPTRTIQRSKNTFSMQQIAKVLDKANKDDIKLLKNHWQEVIDHAKSNDKKSLVSLLLNSEPVAASEDHVLVKFDEEIHCEIVNKDDEKRNNIESVVCNIVNKTVKVVGVPADQWLRVRAEYLQNRNTNETHQSEKQSTQQSQQIDIAQKAKILKCLRHDQIQSMVLLS

SEQ ID NO: 339 - DNA, 1620 bp, Artificial Sequence
  Description of Artificial Sequence: synthetic nucleic acid sequence
gtgaatgaaattacgacaagtgataaagaacaagaagtcaaattgtatcaaaatgaagcatcaaaaaaatctgatttagaacgtacggacttagctaaagaaaaaacaggtgtgtttactggaacatttgcaattaatccgctctctggcgataaattacctatttggatagcagattatgttttatcaacttacggtactggtgcagtaatggctgtgcctggacatgatgagcgagatcatgaatttgctacgaagtttaatttaccaattatcgaagttatagagggtggcgaagttcaaaaatatgcatacacaggtgaaggaaaacacattaattctggagaattagacggtctagaaaatgaagcggcaataagtaaagcgatagaattgcttgaatctaaaggtgctggtgagaaaaaagtcaattataaattacgtgattggttatttagtaggcaacgttattggggagagccaattcctattatacattgggaagatggatcaatgactacagttcctgaagatgaattgcctttactacttcctgaaacagatgaaattaagccatcaggtaccggtgaatctccacttgcaaatatagatgcgttcgtaaacgttatcgatgaaaagacaggtatgaaggggcgccgagaaaccaatacaatgcctcaatgggctggcagttgctggtactatttacgttacattgatccacataacgaaaaaatgatagcagatcctgaaaaattaaagcattggctacctgttgatttatatattggaggcgtggaacatgcagtacttcacttattatatgcaagattctggcataaagtgttatatgacttaggtgttgtaccaacaaaagaaccattccaaaaactatacaatcagggaatgattttaggcgaaggcaatgaaaaaatgagtaagtctaaaggtaatgtgattaatccagatgatattgttgcatcacatggtgctgatacattacgactatatgaaatgtttatgggacctttagatgctgcgatcgcatggagtgaaaaaggtttagatggttctagaagattcttagatcgtgtttggagacttatcattactgatgaaaattcaatcaataaaaaaattgtagattctaacaatcattcacttgataaggtttacaatcaaactgtgaaaaaagtaacagaagattttgatacacttagttttaatactgcaatcagtcaattaatggtgtttattaatgagtgttataaaactaatgaagtttacaaaccttatatcgaagggtttgtaaaaatgttatcgcctattgcaccacacattggtgaagaattatgggatcgattagggcatgaaaataccattacttatcaaccatggccaacatttgatgaaagtttattagtagatgatgaagttgaaatcgtagttcaagtcaatggtaaagttagagcaaaaatcaatattccaaaagatttatctaaagaagaaatgcaagacttagccttgtctaatgataatgttaaaatgagtattgaaggaaaagaagttaaaaaagttattgctgtacctcaaaagctagttaatatagttgctaaataa

SEQ ID NO: 340 - protein, 539 aa, Artificial Sequence
  Description of Artificial Sequence: synthetic amino acid sequence
VNEITTSDKEQEVKLYQNEASKKSDLERTDLAKEKTGVFTGTFAINPLSGDKLPIWIADYVLSTYGTGAVMAVPGHDERDHEFATKFNLPIIEVIEGGEVQKYAYTGEGKHINSGELDGLENEAAISKAIELLESKGAGEKKVNYKLRDWLFSRQRYWGEPIPIIHWEDGSMTTVPEDELPLLLPETDEIKPSGTGESPLANIDAFVNVIDEKTGMKGRRETNTMPQWAGSCWYYLRYIDPHNEKMIADPEKLKHWLPVDLYIGGVEHAVLHLLYARFWHKVLYDLGVVPTKEPFQKLYNQGMILGEGNEKMSKSKGNVINPDDIVASHGADTLRLYEMFMGPLDAAIAWSEKGLDGSRRFLDRVWRLIITDENSINKKIVDSNNHSLDKVYNQTVKKVTEDFDTLSFNTAISQLMVFINECYKTNEVYKPYIEGFVKMLSPIAPHIGEELWDRLGHENTITYQPWPTFDESLLVDDEVEIVVQVNGKVRAKINIPKDLSKEEMQDLALSNDNVKMSIEGKEVKKVIAVPQKLVNIVAK

SEQ ID NO: 341 - DNA, 2706 bp, Artificial Sequence
  Description of Artificial Sequence: synthetic nucleic acid sequence
atggcttctaatattaaagaacaagcaaagaaacaattcgaattaaatggccaatcatatacttactatgacttacaaacattagaagaaaaagggctagctaaaatttctaaattaccatactcaattcgcgtattgttagaatctgtgttacgacaagaggatgattttgttataacagatgatcatatcaaagcattaagtaaattcggaaatgcaggtaacgaaggtgaagttccattcaaaccttctagagttattttacaagactttacaggtgtgccagcagtagtagatttggcttctttacgtaaagctatgaatgatgttggtggagatattaataaaatcaacccagaagtacctgtggatttagttatcgaccattcagttcaagttgatagttacgctaatccagaagcattagaacgtaatatgaaattagaatttgaacgtaactatgaacgttatcaatttttaaactgggcaacaaaagcttttgataactataatgcagtacctcctgctacaggtattgtccatcaagtaaacttagagtatttagcaaatgtagtacatgtaagagatgttgatggtgaaaaaacagcatttcctgacactttagtaggtactgattcacatactacaatgattaatggtattggtgttctaggttggggcgttggtggtatcgaagccgaagcaggtatgttaggacaaccatcatatttcccaattcctgaagttatcggagtgcgtttaactcactctttaccacaaggctcaacagctacggatttagctttacgtgtgactgaagaattacgtaaaaaaggtgtagttggaaaatttgttgaattcttcggtccaggtgttcaacatttaccattagcagacagagctacaattgctaacatggctccagaatatggtgcaacgtgtggtttcttcccagtagatgaagaatcattgaaatatatgaaacttacaggccgtgacgaagaacatattgaattggttaaagaatatttacaacaaaaccatatgttctttgatgtagaaaaagaggatcctgaatatacagatgttattgatttagacttatctacagtagaggcatcactttctggtccaaagcgtccacaagacttaattttcttaagtgatatgaaaaaagaatttgaaaaatcagtaactgctcctgctggtaatcaaggacatggacttgatcaaagtgaatttgataaaaaagcagaaattaattttaatgatggatctaaagcaacaatgaaaacaggagatatagcaattgctgctattacctcatgtactaacacttctaatccatatgttatgttaggtgctggtttagttgctaaaaaagctgtagaaaaaggattgaaagtaccagagtttgttaagacgtcacttgctccaggttcaaaagttgttacaggatatttaagagattctggattacaacagtatttagatgatttaggtttcaatcttgttggttatggttgtactacatgtattggtaactcagggccactattacctgaaattgaaaaggcagttgcggatgaagatttattagtaacttcagttttatcaggtaatcgtaattttgaggggcgaatccatccattagtgaaagcaaactatttagcctcaccacaacttgttgtagcttatgcgcttgctggtacagtagatattgatttacaaaatgaaccaattggtaaaggtaaagatggtaaagatgtatatttacaagacatttggccttcaatacaagaagtttctgatactgtagataaagttgttacacctgaactattcttagaagaatataaaaatgtatatcataacaatgaaatgtggaatgaaatagatgtaaccgatgaaccattatatgatttcgatcctaattcaacatatattcaaaatccaacatttttccaaggattatctaaagagccgggtaaaattgaaccacttaaaagtttgagagttatgggtaaatttggtgattctgttacaacagaccatatttctccagcaggtgctatcggtaaagatacaccagcaggaaaatacttattagatcatgatgttgcaattcgcaactttaactcttatggttcccgtcgcggtaaccacgaagttatggtacgtggtacatttgccaatattcgtatcaaaaaccaacttgctccaggtactgaaggcggatttacaacatattggcctaccggagaaataatgcctatatatgatgcagcaatgaaatataaagaagatggaactggcttagttgtcttagctggtaatgactatggaatgggatcttctcgtgactgggctgcaaaaggtaccaatttattaggagttaaaactgtcattgcacaaagctatgaacgtattcatcgctctaacttagttatgatgggtgtactaccgcttcaattccaacaaggagaatctgcagaagcactgggtcttgatggaaaagaagaaatatctgtagatattaatgaagatgtacagccacatgatcttgtaaatgtgactgcaaaaaaagaaaatggtgaaatcattaatttcaaagctattgtacgttttgattcactagtagaattagattattatcgtcatggtggtattttacaaatggtactaagaaataaacttgcgcagtaa

SEQ ID NO: 342 - protein, 901 aa, Artificial Sequence
  Description of Artificial Sequence: synthetic amino acid sequence
MASNIKEQAKKQFELNGQSYTYYDLQTLEEKGLAKISKLPYSIRVLLESVLRQEDDFVITDDHIKALSKFGNAGNEGEVPFKPSRVILQDFTGVPAVVDLASLRKAMNDVGGDINKINPEVPVDLVIDHSVQVDSYANPEALERNMKLEFERNYERYQFLNWATKAFDNYNAVPPATGIVHQVNLEYLANVVHVRDVDGEKTAFPDTLVGTDSHTTMINGIGVLGWGVGGIEAEAGMLGQPSYFPIPEVIGVRLTHSLPQGSTATDLALRVTEELRKKGVVGKFVEFFGPGVQHLPLADRATIANMAPEYGATCGFFPVDEESLKYMKLTGRDEEHIELVKEYLQQNHMFFDVEKEDPEYTDVIDLDLSTVEASLSGPKRPQDLIFLSDMKKEFEKSVTAPAGNQGHGLDQSEFDKKAEINFNDGSKATMKTGDIAIAAITSCTNTSNPYVMLGAGLVAKKAVEKGLKVPEFVKTSLAPGSKVVTGYLRDSGLQQYLDDLGFNLVGYGCTTCIGNSGPLLPEIEKAVADEDLLVTSVLSGNRNFEGRIHPLVKANYLASPQLVVAYALAGTVDIDLQNEPIGKGKDGKDVYLQDIWPSIQEVSDTVDKVVTPELFLEEYKNVYHNNEMWNEIDVTDEPLYDFDPNSTYIQNPTFFQGLSKEPGKIEPLKSLRVMGKFGDSVTTDHISPAGAIGKDTPAGKYLLDHDVAIRNFNSYGSRRGNHEVMVRGTFANIRIKNQLAPGTEGGFTTYWPTGEIMPIYDAAMKYKEDGTGLVVLAGNDYGMGSSRDWAAKGTNLLGVKTVIAQSYERIHRSNLVMMGVLPLQFQQGESAEALGLDGKEEISVDINEDVQPHDLVNVTAKKENGEIINFKAIVRFDSLVELDYYRHGGILQMVLRNKLAQ

SEQ ID NO: 343 - DNA, 468 bp, Artificial Sequence
  Description of Artificial Sequence: synthetic nucleic acid sequence
atgatatacagtttgactgaaattgaagcaagatatcaagaaaccgataaaatgggggttatctatcacggtaactacgcaacatggtttgaagttgcgagaacagactatataagaaagcttggcttcagttatgcctctatggaagaacaaggtgttatttcaccagttgtagatttaaaagtgcaatataaaaaatcaatttactatcctgaaaaggtgacagtaaaaacatgggtggaaaaatattctagattacgttcaacttattgttatgaggtttataatgaaaatggagagttagctactactggttcaacagaacttatctgtattaaagcagatacatttaaacccatacgcttggatagatattttcctgagtggcatgagacttatagtaaagttaaccagttaaataaagaaggtaaagatgctgaggttacgtttggcattaatcatttataa

SEQ ID NO: 344 - protein, 155 aa, Artificial Sequence
  Description of Artificial Sequence: synthetic amino acid sequence
MIYSLTEIEARYQETDKMGVIYHGNYATWFEVARTDYIRKLGFSYASMEEQGVISPVVDLKVQYKKSIYYPEKVTVKTWVEKYSRLRSTYCYEVYNENGELATTGSTELICIKADTFKPIRLDRYFPEWHETYSKVNQLNKEGKDAEVTFGINHL

SEQ ID NO: 345 - DNA, 1995 bp, Artificial Sequence
  Description of Artificial Sequence: synthetic nucleic acid sequence
atgaataaacaaaataattattcagatgattcaattcaggtacttgaaggactagaagcagttaggaagagacctggtatgtacattggatcaactgataaacgaggattacatcatcttgtatatgaagttgtcgataactccgtcgatgaagtattaaatggttatggtgatgcgattacagtaacaattaatcaggatggtagtatttctatagaagataatggtcgaggtatgccaacaggtatacatgcgtctggcaaacctactgcagaagttatatttactgttttacatgctggaggtaaatttggacaaggaggttataaaacatctggaggtctccatggggtgggtgcttctgtagtaaatgcccttagtgaatggcttgaagttgaaattcatagagatggtaatatctacacacaaaatttcaaaaatggtggtattccagcgacaggtttagtaaaaactggaaaaacaaaaaaaactggtactaaagttacatttaaaccagactcagaaatatttaagtcaacgacgacttttaattttgatattttaagtgagcgtttacaagaatctgcatttttacttaaagatttaaaaattacacttactgatttacgtagtggaaaagaacgagaagaaatttaccattacgaagaaggaattaaagaatttgttagttatgtcaatgaaggtaaagaagtattacatgatgttactacatttgcagggcattccaatggaatagaggtagacgtagcattccaatataatgttcagtactctgagagcatattaagttttgtaaataatgttcgtacaaaggacggaggtactcatgaagttggtttcaaaacggcgatgactcgtgtttttaatgaatatgcacgtcgtataaacgaactgaaagataaagataaaaatttagacggtaatgatatacgcgaaggtttaacagcgataatttcagtacgtataccagaagaacttcttcaatttgaagggcaaacgaaatcaaaacttggcacttcagaagcaaggagtgctgtagactctgttgtttcagaaaaattaccatattacttagaagaaaagggccaattatctaaatcattagttaaaaaagcaattaaagctcaacaagcacgcgaggctgctcgtaaagctagagaagatgcacgctccggaaagaaaaataaacgtaaagatacattgttatcaggtaagttaactcctgcgcaaagtaaaaatactgataaaaacgagttatatctagttgagggtgattcagcgggaggttctgcaaaattgggacgcgaccgtaaattccaagctattttacctcttcgtggaaaggttattaatacagaaaaggcacgtttagaggatatttttaaaaatgaagaaattaatacgattattcatactattggtgctggtgttggtactgactttaaaattgaggatagtaattacaacagaattattatcatgacagatgctgatacggatggtgcacatattcaagtattattgcttacatttttctttaaatatatgaaaccacttgttcaagctggacgtgtctttattgcgttaccgcctttatacaaattagaaaaaggcaaaggtaagaataaaaaagttgagtacgcttggactgatgaagaattagaaaatttacaaaagcaattaggaaaaggtttcatattacagcgttataaaggtcttggtgaaatgaatccagaacaattatgggaaactaccatgaatccagaaactcggacattaattagagttcaagttgaagatgaagttcgttcatcaaaacgtgtcactactttgatgggggataaggttgccccacgaagagagtggattgaaaaacacgttgaatttggtatgcaagaagatcaaagcattttggataataaagaagtccaaatactagagaatgaaaaatatattgaggaggaaacgaattga

SEQ ID NO: 346 - protein, 664 aa, Artificial Sequence
  Description of Artificial Sequence: synthetic amino acid sequence
MNKQNNYSDDSIQVLEGLEAVRKRPGMYIGSTDKRGLHHLVYEVVDNSVDEVLNGYGDAITVTINQDGSISIEDNGRGMPTGIHASGKPTAEVIFTVLHAGGKFGQGGYKTSGGLHGVGASVVNALSEWLEVEIHRDGNIYTQNFKNGGIPATGLVKTGKTKKTGTKVTFKPDSEIFKSTTTFNFDILSERLQESAFLLKDLKITLTDLRSGKEREEIYHYEEGIKEFVSYVNEGKEVLHDVTTFAGHSNGIEVDVAFQYNVQYSESILSFVNNVRTKDGGTHEVGFKTAMTRVFNEYARRINELKDKDKNLDGNDIREGLTAIISVRIPEELLQFEGQTKSKLGTSEARSAVDSVVSEKLPYYLEEKGQLSKSLVKKAIKAQQAREAARKAREDARSGKKNKRKDTLLSGKLTPAQSKNTDKNELYLVEGDSAGGSAKLGRDRKFQAILPLRGKVINTEKARLEDIFKNEEINTIIHTIGAGVGTDFKIEDSNYNRIIIMTDADTDGAHIQVLLLTFFFKYMKPLVQAGRVFIALPPLYKLEKGKGKNKKVEYAWTDEELENLQKQLGKGFILQRYKGLGEMNPEQLWETTMNPETRTLIRVQVEDEVRSSKRVTTLMGDKVAPRREWIEKHVEFGMQEDQSILDNKEVQILENEKYIEEETN

SEQ ID NO: 347 - DNA, 2259 bp, Artificial Sequence
  Description of Artificial Sequence: synthetic nucleic acid sequence
atgtattcaagtgggaatacgtatgataaaaatttccgtaaaagtgcgaaaactgtcggtgatgtaataggtcaatatcatcctcatggagactcttcagtatatgatgctatggtgcgcttaagtcaagattggaagttacgtcatgttctaattgaaatgcatggtaataatggtagtatcgataacgatcctccagctgctatgcgttacacagaagctaaacttagtcaattatcagaagaactattaagggatattaataaggaaacagtatcatttattccaaactatgatgacacaactttggaaccaatggtattaccagcgagatttcctaatttattaattaatggatctacggggatttcttcaggatatgctactgatatcccgccgcataacctcgccgaagtaatacaaggcacattgaagtatatcgatcaacctgatattacaattaatcaactgatgaaatatatcaaagggcctgactttcctacaggtggtatcattcaaggaatagaaggtataaaaaaagcgtatgagaccggtaaaggaaaggttgtcgtgcgttcacgagtagatgaagagcctttaagaagtggacgtaaacaattaattgtgactgaaattccgtatgaagtgaataaaagtagtttagttaaaagaattgacgaattacgtgccgataaaaaggttgatggtattgtagaagttcgagatgagactgatagaactggattacgaattgcaatcgaattaaaaaaagatgctaatagcgaatcaatcaaaaactatttatataagaattcggatttacaaatttcatataattttaatatggttgctattagtgaaggtcgccctaagttgatgggattacgtgaaattatagaaagttatttaaatcatcaaattgaagtggttacaaatagaacgcgttatgacttagagcaagctgaaaaacgtatgcatattgtggaaggattaatgaaagctttatctatacttgatgaagttattgcattgatacgtaattctaaaaataaaaaagatgctaaagataatttagttgcagagtatgactttactgaagctcaagcagaagctattgtcatgttacagctgtatagattaacaaatactgacattgaagctttgaaaaaagaacatgaagagttagaagctttaataaaagaattaagaaatatcttagataatcatgaggcacttttagcagtaattaaagatgaactaaatgaaattaaaaagaaatttaaagtggatcgactatctacaatcgaagctgaaatttccgaaatcaaaattgataaagaagttatggtgcctagtgaagaagtgattttaagtttgacgcaacatggctatataaaacgtacatctacacgtagttttaacgcaagtggtgtgactgaaatcggtttgaaggacggcgaccgtttattaaaacatgaaagcgtgaatactcaagatactgttcttgtatttacaaataaaggtagatatttgtttatacctgttcataaattagccgatatccgttggaaagagcttggtcaacacatatcacaaattgtgccaatagatgaagatgaagaagtggtaaatgtatacaacgaaaaagattttaaaaatgaagccttttatattatggctacaaaaaacggcatgattaagaaaagtagtgcttcacaatttaaaactactcggtttaataaaccactcataaatatgaaggttaaagacaaagatgaacttattaatgtcgttcgattagagtctgatcagttaattactgttctaacccataaaggcatgtcattaacttattcaactaatgaattatcggatacaggcttaagagcagctggtgttaaatcaattaatcttaaagatgaagactatgttgttatgacagaagatgtgaacgactcagattccataataatggttacacaacgtggtgctatgaagcgtattgattttaatgttcttcaagaagctaaacgcgcacaacgtggaattactttactaaaagaattaaagaaaaaaccgcatcgaattgtggcaggtgcagtagttaaagaaaatcacacgaaatatattgtattctctcaacatcatgaagaatatggtaatatcgatgatgtacacttatctgaacaatatactaatggatcatttattattgatactgatgattttggagaagtagaaagtatgattctagagtaa

SEQ ID NO: 348 - protein, 752 aa, Artificial Sequence
  Description of Artificial Sequence: synthetic amino acid sequence
MYSSGNTYDKNFRKSAKTVGDVIGQYHPHGDSSVYDAMVRLSQDWKLRHVLIEMHGNNGSIDNDPPAAMRYTEAKLSQLSEELLRDINKETVSFIPNYDDTTLEPMVLPARFPNLLINGSTGISSGYATDIPPHNLAEVIQGTLKYIDQPDITINQLMKYIKGPDFPTGGIIQGIEGIKKAYETGKGKVVVRSRVDEEPLRSGRKQLIVTEIPYEVNKSSLVKRIDELRADKKVDGIVEVRDETDRTGLRIAIELKKDANSESIKNYLYKNSDLQISYNFNMVAISEGRPKLMGLREIIESYLNHQIEVVTNRTRYDLEQAEKRMHIVEGLMKALSILDEVIALIRNSKNKKDAKDNLVAEYDFTEAQAEAIVMLQLYRLTNTDIEALKKEHEELEALIKELRNILDNHEALLAVIKDELNEIKKKFKVDRLSTIEAEISEIKIDKEVMVPSEEVILSLTQHGYIKRTSTRSFNASGVTEIGLKDGDRLLKHESVNTQDTVLVFTNKGRYLFIPVHKLADIRWKELGQHISQIVPIDEDEEVVNVYNEKDFKNEAFYIMATKNGMIKKSSASQFKTTRFNKPLINMKVKDKDELINVVRLESDQLITVLTHKGMSLTYSTNELSDTGLRAAGVKSINLKDEDYVVMTEDVNDSDSIIMVTQRGAMKRIDFNVLQEAKRAQRGITLLKELKKKPHRIVAGAVVKENHTKYIVFSQHHEEYGNIDDVHLSEQYTNGSFIIDTDDFGEVESMILE

SEQ ID NO: 349 - DNA, 1392 bp, Artificial Sequence
  Description of Artificial Sequence: synthetic nucleic acid sequence
atgttaccagagatgtttagagcattaactgaaaagccagaaactttaagtagtggtgagaagggtatttcaccatttcaagcttttgcgattagtgctgggtcaagagtaggaactggaaatattgccggtgttgcaactgctattgttcttggtggccccggtgcagtcttctggatgtggattattgcttttattggtgcagctagtgcatttatggaagcaacgcttgctcaagtttataaggtacatgacaaagaaggtggattccgtggcggaccagcctattacataacaaaagggctaaaccaaaaatggcttggaattgtatttgctgttttaattacagttacatttgcttttgtatttaatactgttcaagcgaatacaattgctgaatcattaaatacacaatacaatattagcccggtaattactggaatagtacttgcagttattacaggtattatcatctttggtggtgttcgtagcatagctacactatcttcacttattgtgcctattatggctattgtttatataggtatggttttaatcattttattactcaatatagatcaaattgtacctatgattggcactattattaaaagtgcattcggagttcagcaggttactggtggtgctgtaggagctgctattcttcaaggtattaaacgtggtttattctcaaacgaagctggtatgggatctgcacctaatgctgctgctacatctgctgtgccccatcccgttaaacaaggtttaattcaatcattaggtgtattctttgacactatgcttgtttgtacagctacagcaattatgattttattatattctggtttgcaatttggtgatagcgcgcctcaaggtgtagcagttacgcaatcagcgttgaacgaacatttaggttcagcaggaggtattttcttaactgtagcagttaccttatttgcattttcatctgttgtaggtaactattactatggacaatccaatattgaatttttatctaacaataagatgatattatttatttttagatgttttgtagtacttttagtatttgtaggtgctgttgctaaaacagaaacagtttggagtactgccgatttatttatgggtcttatggcaatagtaaatatcatatcaattataggtttgtcgaatattgcgtttgcagtgatgaaagattatcaaagacaggagataatcataaaaattagatactacagtcatagtcagattaattgtcttaggactaatgcttttttcttttcggtgataagagaggacattctcatattcaaaaggtgttttcatccatcttataaaatcaacaaagttatcaaaactaacttctttatagcatatctttttactttctaa

SEQ ID NO: 350 - protein, 463 aa, Artificial Sequence
  Description of Artificial Sequence: synthetic amino acid sequence
MLPEMFRALTEKPETLSSGEKGISPFQAFAISAGSRVGTGNIAGVATAIVLGGPGAVFWMWIIAFIGAASAFMEATLAQVYKVHDKEGGFRGGPAYYITKGLNQKWLGIVFAVLITVTFAFVFNTVQANTIAESLNTQYNISPVITGIVLAVITGIIIFGGVRSIATLSSLIVPIMAIVYIGMVLIILLLNIDQIVPMIGTIIKSAFGVQQVTGGAVGAAILQGIKRGLFSNEAGMGSAPNAAATSAVPHPVKQGLIQSLGVFFDTMLVCTATAIMILLYSGLQFGDSAPQGVAVTQSALNEHLGSAGGIFLTVAVTLFAFSSVVGNYYYGQSNIEFLSNNKMILFIFRCFVVLLVFVGAVAKTETVWSTADLFMGLMAIVNIISIIGLSNIAFAVMKDYQRQEIIIKIRYYSHSQINCLRTNAFFFSVIREDILIFKRCFHPSYKINKVIKTNFFIAYLFTF

SEQ ID NO: 351 - DNA, 450 bp, Artificial Sequence
  Description of Artificial Sequence: synthetic nucleic acid sequence
gtgtatacttatactattaaaattagaaatgagattattatgaaaatagtagaagtaaaatctaagaatggtaccaattttatgattttagatggtaataatgaacctatagtagatgcagtaagatatttgaagtatctggatagtgttaagaaaagtttaaataccaagaaaacctatgcctatgcactaaaaaatttttttgtttacttagaaagtaaaaagatatgctataaagaagttagttttgataactttgttgattttataagatggatgaaaacaccttttgaatatgagaatgtcctctcttatcaccgaaaagaaaaaagcattagtcctaagacaattaatctgactatgactgtagtatctaatttttatgattatctcctgtctttgataatctttcatcactgcaaacgcaatattcgacaaacctataattga

SEQ ID NO: 352 - protein, 149 aa, Artificial Sequence
  Description of Artificial Sequence: synthetic amino acid sequence
VYTYTIKIRNEIIMKIVEVKSKNGTNFMILDGNNEPIVDAVRYLKYLDSVKKSLNTKKTYAYALKNFFVYLESKKICYKEVSFDNFVDFIRWMKTPFEYENVLSYHRKEKSISPKTINLTMTVVSNFYDYLLSLIIFHHCKRNIRQTYN

SEQ ID NO: 353 - DNA, 372 bp, Artificial Sequence
  Description of Artificial Sequence: synthetic nucleic acid sequence
atgatagtaattactgatgcaataccaataattattccaatcatcgtaaagatattacgtcgtttgttttttaaaatggaacgaatagcaactgatatgacatttgaaaagttattcacgtgtcaacacctcttcctcttgcacacgcccatccaaaatatggataatacgatcagctttttccgccacttcacgatcatgcgttaccataataatagttgtattctgttctttgttcagttttacgaaaagctccataatatcttgagatgtcttcgaatcaagagcgccagtaggttcatcggcaataataaacttagggtcattaataattgcccgggcaatagctacacgttgttgctgccctcctga

SEQ ID NO: 354 - protein, 123 aa, Artificial Sequence
  Description of Artificial Sequence: synthetic amino acid sequence
MIVITDAIPIIIPIIVKILRRLFFKMERIATDMTFEKLFTCQHLFLLHTPIQNMDNTISFFRHFTIMRYHNNSCILFFVQFYEKLHNILRCLRIKSASRFIGNNKLRVINNCPGNSYTLLLPS

SEQ ID NO: 355 - DNA, 930 bp, Artificial Sequence
  Description of Artificial Sequence: synthetic nucleic acid sequence
gtggtttattttgttgagttaaatatattagaatgtgagggagtatttgaattgaagaaattagcagtgatatgtgcgtttacaatattaatattagctggttgtggtcttggtgatagtgataataatggaagctcaacgataaatgatgatcaacaatcaggatataaaagtaacagagattcaaaatcaagtataagtagaaatcaaacagaagataatcagcaggacacacaacaagatacccattcgaatagatactatgctcaagtttggttaactgctttagatagttatagaggtgaaagtgaccttccttttgacgatttagaaattgtacatcaaaatatttctaataaagttttagatccctatcacccagacgaatcagccaaactacctgaaggaacagaattgttaacagcaagtgttactgcagcaggttcagtttattataaaagtaatggagatggcacaattacaatatatagtgtaccatcacatttccaagggagttggcgtgacgctgattactctaaaagagaatctcaacgcattatagatgatgctcgtacagttaagttatacaacgctagtgaaagtgaaatcaataagataagtcagatgatgaggactgaattttcagttggtgataatttaacagatgaagatgatacttctgaatctgaagatcaatcaagtagttctgatgaagcaacggtgacacgaagtaatgttatcgatatagttgaagactacgaagggcatcaattagatacagacacatatatttacaaagaaccagaaaaagatagcgatggtagttgggggttctcatttacagataaagaaggccatttagaaggatcttatattatcgataaagatggagaagtaacgaagtatgatgaagatggagagccagaataa

SEQ ID NO: 356 - protein, 309 aa, Artificial Sequence
  Description of Artificial Sequence: synthetic amino acid sequence
VVYFVELNILECEGVFELKKLAVICAFTILILAGCGLGDSDNNGSSTINDDQQSGYKSNRDSKSSISRNQTEDNQQDTQQDTHSNRYYAQVWLTALDSYRGESDLPFDDLEIVHQNISNKVLDPYHPDESAKLPEGTELLTASVTAAGSVYYKSNGDGTITIYSVPSHFQGSWRDADYSKRESQRIIDDARTVKLYNASESEINKISQMMRTEFSVGDNLTDEDDTSESEDQSSSSDEATVTRSNVIDIVEDYEGHQLDTDTYIYKEPEKDSDGSWGFSFTDKEGHLEGSYIIDKDGEVTKYDEDGEPE

SEQ ID NO: 357 - DNA, 309 bp, Artificial Sequence
  Description of Artificial Sequence: synthetic nucleic acid sequence
atgatggccaacacctttaatataaccaatacattttccatacgagcggcttcgttcattccgcgtgataatagtaatgcagttaaaataatcactacagcagcaatgatatcaatgacaccaccgttacttccaaatggattagataatgatttaggtaaagaaatgcccaatggtgcaataagacctcttaagttagcagaaaagcctgaagcaacgaaagcaacagcaataaagtattctgctaaaagcgcccaaccggcaacccatccgaataattcaccaaaaagaacattaatccatgaataa

SEQ ID NO: 358 - protein, 102 aa, Artificial Sequence
  Description of Artificial Sequence: synthetic amino acid sequence
MMANTFNITNTFSIRAASFIPRDNSNAVKIITTAAMISMTPPLLPNGLDNDLGKEMPNGAIRPLKLAEKPEATKATAIKYSAKSAQPATHPNNSPKRTLIHE

SEQ ID NO: 359 - DNA, 687 bp, Artificial Sequence
  Description of Artificial Sequence: synthetic nucleic acid sequence
atggaagaacttttcagccaaatcgacagaaacattaaggatttaaacggaattttagtgacacatgaacacatcgaccatattaaaggtcttggtgttttagcacgtaaatataaacttccgatttacgcgaatgagaatacatggaaagcgatagagaagaaagatagccgcattccaatggatcagaaatttatctttaatccatatgaaacgaaatctcttgcaggatttgatatagaatcatttaacgtgtcacatgacgcgattgatccacaattctacatcttccacaataactataagaaatttacgatgataactgacactggttacgtttcagatcgtatgaaaggtatgattcaaggtagtgatgtctttatgtttgaaagtaatcacgatgtcgatatgttacgcatgtgtcgctatccatggaagacgaaacaacgtattttaagtgatatgggtcacgtatccaatgaagacgcgggtcttgcgatgagtgatgtcattacaggtaatacgaaacgtatatacctctctcatttgtcacaagacaataatatgaaagacctcgcacgcatgagtgttggacaagtgctcaacgaacacgatatcgatacagagaaagaagtattgctttgcgataccgataaagcacaagccacaccgatttatacactataa

SEQ ID NO: 360 - protein, 228 aa, Artificial Sequence
  Description of Artificial Sequence: synthetic amino acid sequence
MEELFSQIDRNIKDLNGILVTHEHIDHIKGLGVLARKYKLPIYANENTWKAIEKKDSRIPMDQKFIFNPYETKSLAGFDIESFNVSHDAIDPQFYIFHNNYKKFTMITDTGYVSDRMKGMIQGSDVFMFESNHDVDMLRMCRYPWKTKQRILSDMGHVSNEDAGLAMSDVITGNTKRIYLSHLSQDNNMKDLARMSVGQVLNEHDIDTEKEVLLCDTDKAQATPIYTL

SEQ ID NO: 361 - DNA, 531 bp, Artificial Sequence
  Description of Artificial Sequence: synthetic nucleic acid sequence
gtgtataacttgtggataactcgaataaatcatgtacttttggaggataaaatgaagattactatcttatcagttggaaaactaaaagaaaaatattggaagcaagccattgcagaatatgaaaaaagattaggaccttacacgaaaatcgaattaatagaagtaccagatgaaaaagcacctgaaaatatgagcgacaaagaaatagaacaagttaaagaaaaagaaggccaacgcctactcaataagattaactcccaatctacagtaatcacgttggaaatcaaaggcaaaatggtgtcttcagaaggactcgctaaagaactgcaaacacgcatgacacaaggtcaaagcgactttacatttgtcataggtggctccaatggtttacaccaagacgtcttacaacgcagcaactacgcactatcattcagcaacatgaccttcccacatcaaatgatgcgtgtaatattgattgaacaaatttatcgcgcattcaaaatcatgagaggtgaagcgtatcataaatga

SEQ ID NO: 362 - protein, 176 aa, Artificial Sequence
  Description of Artificial Sequence: synthetic amino acid sequence
VYNLWITRINHVLLEDKMKITILSVGKLKEKYWKQAIAEYEKRLGPYTKIELIEVPDEKAPENMSDKEIEQVKEKEGQRLLNKINSQSTVITLEIKGKMVSSEGLAKELQTRMTQGQSDFTFVIGGSNGLHQDVLQRSNYALSFSNMTFPHQMMRVILIEQIYRAFKIMRGEAYHK

SEQ ID NO: 363 - DNA, 849 bp, Artificial Sequence
  Description of Artificial Sequence: synthetic nucleic acid sequence
atgaaaaagagatttttatctatatgtacaatgacaattgcagcgttagcaactactacaatggtaaatacttcttatgcaaaaaccgatacagaaagccataatcattcctcacttggcacagaaaacaaaaatgttttagatattaatagttcgagtcataatatcaaaccaagtcaaaataaaagttacccaagtgtaatattacctaataataatagacatcaaatttttaatactacacaaggtcattatgatgctgttagttttatttatataccaatagatggtggatatatgagtggttcaggtgttgttgtaggtgaaaatgaaatattaactaataaacacgttgttaatggagctaagggtaatccaagaaatattagtgtccatccttcagctaaaaatgaaaatgattatcctaatggcaaatttgtgggtcaagaaatcataccgtatcctggtaatagtgatttagcaatcttaagagtgtcaccaaacgaacataatcaacatattggtcaagtagttaaacctgcaactataagtagcaatacagacactagaattaatgaaaacatcactgttactggttaccctggtgacaaaccattagccacaatgtgggaaagtgtaggtaaagttgtctatattggtggcgaggaattaagatatgacctaagtactgtaggtggaaactctggatctccagtatttaatggtaaaaatcaagttattggaatacattatggtggcgtagataataaatacaatagcagtgtttatattaatgatttcgttcaacaattcctaagaaacaatatacctgatataaatattcagtaa

SEQ ID NO: 364 - protein, 282 aa, Artificial Sequence
  Description of Artificial Sequence: synthetic amino acid sequence
MKKRFLSICTMTIAALATTTMVNTSYAKTDTESHNHSSLGTENKNVLDINSSSHNIKPSQNKSYPSVILPNNNRHQIFNTTQGHYDAVSFIYIPIDGGYMSGSGVVVGENEILTNKHVVNGAKGNPRNISVHPSAKNENDYPNGKFVGQEIIPYPGNSDLAILRVSPNEHNQHIGQVVKPATISSNTDTRINENITVTGYPGDKPLATMWESVGKVVYIGGEELRYDLSTVGGNSGSPVFNGKNQVIGIHYGGVDNKYNSSVYINDFVQQFLRNNIPDINIQ

SEQ ID NO: 365 - DNA, 789 bp, Artificial Sequence
  Description of Artificial Sequence: synthetic nucleic acid sequence
atgagtcattcgcaaataaatggaaagcgattttttaacaacattttgaatgcagtaggagcaggggtagttattgcactgttacctaatgccttattaggtgaattattaaaattcttcaaagaaggtaatcatgtactagaaacgatttttcagctagtaacaatcatacaatcttttatggcttttattataggggttcttgctgcgcaccaatttaaatttaaaggtacaggtgctgcaattattggtatttcagcaatgctaggttctggagctgtacactataatggacaaacaattgaattaaaaggaattggagatattataaatgtaattttagtagttatattagcgtgtttcatttatatgtttttagaggggaaattaggttccttagaaatgattattttacccgttttagttcctgtaattagtggattaatagggttattaacattaccttacgttcaagttattacgcagtcactaggaaaattagtaaacaggtttacagaattaaatccattattaatgtctatattaatttgtgtaacattttctttattaatggtaactccaatctcgttagttgctatagcaacagcaattaaccttactggtttaggaagtggtgctgcaaatatgggaatagttgcagcttgtgtaacctttttatttggatctttaagagttaattctcttggagttaacgtggtattactcataggtgctgctaaaatgatgattcctgtgtacttaaagcaaagcaaacatacattcaattag

SEQ ID NO: 366 - protein, 262 aa, Artificial Sequence
  Description of Artificial Sequence: synthetic amino acid sequence
MSHSQINGKRFFNNILNAVGAGVVIALLPNALLGELLKFFKEGNHVLETIFQLVTIIQSFMAFIIGVLAAHQFKFKGTGAAIIGISAMLGSGAVHYNGQTIELKGIGDIINVILVVILACFIYMFLEGKLGSLEMIILPVLVPVISGLIGLLTLPYVQVITQSLGKLVNRFTELNPLLMSILICVTFSLLMVTPISLVAIATAINLTGLGSGAANMGIVAACVTFLFGSLRVNSLGVNVVLLIGAAKMMIPVYLKQSKHTFN

SEQ ID NO: 367 - DNA, 1239 bp, Artificial Sequence
  Description of Artificial Sequence: synthetic nucleic acid sequence
gtggcaggtcttgtagcctttacttatgcagaaatggcatctacaatgccttttgctggttcagcttattcatggattaatgttctttttggtgaattattcggatgggttgccggttgggcgcttttagcagaatactttattgctgttgctttcgttgcttcaggcttttctgctaacttaagaggtcttattgcaccattgggcatttctttacctaaatcattatctaatccatttggaagtaacggtggtgtcattgatatcattgctgctgtagtgattattttaactgcattactattatcacgcggaatgaacgaagccgctcgtatggaaaatgtattggttatattaaaggtgttggccatcattttatttgtgattgttgggctaactgcgattaatttcagtaactatataccttttattccagaacataaagttactgaaactggcgactttggaggttggcaaggtatttatgctggagtttcaatgatttttttagcttatattggttttgactctattgctgctaattcagctgaagcgattaatccacagaagacaatgcctagaggaatcttagggtcactcatagtagcaattgtattgtttgtggccgtagcacttgttcttgttggcatgttccactactctcaatacgctgataatgcagagccagtaggttgggcattacgagaaagtggtcatggtattattgctgcaattgttcaagcaatttctgtcatcggtatgttcactgcattaatcggtatgatgcttgcaggttcacgtctattatattcatttggacgagatggtttactcccttcttggttaagtcaattgaatcacaaacatttacctaatcgagcacttgtcatacttacaatcattggcgtagttatcggatcaatgttcccgtttgctttcttagcacaattgatttccgcaggtacccttgttgcattcatgtttgtgtcactagcaatgtatcgattaagaaaacgtgaagggaaagatttacctaagccagagtttaaattacctttatatcctattttgcctgcaattacatttatattagtattgctagtattttggggattaagttttgaagctaagttgtatacactgatatggtttattgtaggtataattatttatttaatttatggaattagacattccaaaaagaatgatgaagaagcgtatcaagtacctagagaataa

SEQ ID NO: 368 - protein, 412 aa, Artificial Sequence
  Description of Artificial Sequence: synthetic amino acid sequence
VAGLVAFTYAEMASTMPFAGSAYSWINVLFGELFGWVAGWALLAEYFIAVAFVASGFSANLRGLIAPLGISLPKSLSNPFGSNGGVIDIIAAVVIILTALLLSRGMNEAARMENVLVILKVLAIILFVIVGLTAINFSNYIPFIPEHKVTETGDFGGWQGIYAGVSMIFLAYIGFDSIAANSAEAINPQKTMPRGILGSLIVAIVLFVAVALVLVGMFHYSQYADNAEPVGWALRESGHGIIAAIVQAISVIGMFTALIGMMLAGSRLLYSFGRDGLLPSWLSQLNHKHLPNRALVILTIIGVVIGSMFPFAFLAQLISAGTLVAFMFVSLAMYRLRKREGKDLPKPEFKLPLYPILPAITFILVLLVFWGLSFEAKLYTLIWFIVGIIIYLIYGIRHSKKNDEEAYQVPRE

SEQ ID NO: 369 - DNA, 432 bp, Artificial Sequence
  Description of Artificial Sequence: synthetic nucleic acid sequence
atgcattggttaaaaatattttatcatttattatgcgcaaccacgattagcgtgatattacttattataactatattaatggatgcgttactacaaaacacacacttaactcagttattactcaatattgattttttaatcaaccctgatgaagtgccaacaattattgaagtactgattcatttaagtattggaatattgatttatctcgcctttttaattatctatcattattcaaaatccttgtatcatctagcatacttacctttagtattgatatttactttgatgtatccacttctcgtttttcttgcgcaacgtccatttttttcctttagttggaacgaatttgcatggtggttagttgcacatctttttttcatcattttaatggcgacttgtctacctatcatttcgaaaaaaattttatga

SEQ ID NO: 370 - protein, 143 aa, Artificial Sequence
  Description of Artificial Sequence: synthetic amino acid sequence
MHWLKIFYHLLCATTISVILLIITILMDALLQNTHLTQLLLNIDFLINPDEVPTIIEVLIHLSIGILIYLAFLIIYHYSKSLYHLAYLPLVLIFTLMYPLLVFLAQRPFFSFSWNEFAWWLVAHLFFIILMATCLPIISKKIL

SEQ ID NO: 371 - DNA, 1122 bp, Artificial Sequence
  Description of Artificial Sequence: synthetic nucleic acid sequence
atgattggaataattattggtattgcatcagtaattactatcatgtcgttggggaacggttttaagaagtcaacgactgagcaattcaatgatgctggtgctggtaaaaatcaagcttcaatttcttacatgacagaaaatatggaagcgcctaaaaataatccatttaagcaagaggatatgagtgttgttgaacaggttaatggtgttaagagtgctaaagtaaaagaggataaggatagcacatattcagtcaaaattacgaatacacatggcagtagtgatgctagtttaaaaaaggttgataaactgacagatgtagatgaaggaaaaggatttacgaatgatgataatgaagtgctagaaaaagtagccgttatagataaaaaaattgctaaaaaagtattcaataatcaggcaatgggtcaatctatttatataaatggagaagggtttaaagtcgtaggcgtctctgaaagctcagaagtcgatgaaagtgggatgcctattgagtcattaattcaaataccttcaaaaacatttaataaatatatgggcaatttgacacaaggtatgcctcaattattagttacagttgaaaaaggttcagataagaaagacgtaggtaaaaaggtcgaaaaagtgttgaataaaaaaggaactggcgtatctgaaggtcaatatagttatgaagataatgaagcggtgatgaaaacgataggttcagtcttagacacgattacttactttgtcgcagctgttgcgggaatatcactctttattgcaggtattggtgtgatgaatgtcatgtatatttcagtcactgaacgaacagaagagattgcaattcgtcgtgcatttggcgctaaaggtcgagatattgaaatacaattcttagtagaaagtgttgtgttatgtctcataggtggtatcatcggattaattctaggtattattattgctacattgattgatctcgtgacacctgaaatggttaagagttccgtcagtctaggttccgtcatcctagctgtaggtgtatcaacattgataggcatcattttcggttggatacctgcacgttcagcttctaaaaaagaattaattgatattattaaataa

SEQ ID NO: 372 - protein, 373 aa, Artificial Sequence
  Description of Artificial Sequence: synthetic amino acid sequence
MIGIIIGIASVITIMSLGNGFKKSTTEQFNDAGAGKNQASISYMTENMEAPKNNPFKQEDMSVVEQVNGVKSAKVKEDKDSTYSVKITNTHGSSDASLKKVDKLTDVDEGKGFTNDDNEVLEKVAVIDKKIAKKVFNNQAMGQSIYINGEGFKVVGVSESSEVDESGMPIESLIQIPSKTFNKYMGNLTQGMPQLLVTVEKGSDKKDVGKKVEKVLNKKGTGVSEGQYSYEDNEAVMKTIGSVLDTITYFVAAVAGISLFIAGIGVMNVMYISVTERTEEIAIRRAFGAKGRDIEIQFLVESVVLCLIGGIIGLILGIIIATLIDLVTPEMVKSSVSLGSVILAVGVSTLIGIIFGWIPARSASKKELIDIIK

SEQ ID NO: 373 - DNA, 666 bp, Artificial Sequence
  Description of Artificial Sequence: synthetic nucleic acid sequence
atggcgagatatatcagtgacagtgcacatcatattacacatcatcaagatatcttagcgaatcttattggttatccaagagatgaatgggtttttcctatacaaacacatgatagtcgtatcgttgaagttacaagtgaacataaaggaacaaatattgatgaactaactgatgatttacatggcatagatggaatgtatacttttgattctcacattcttcttactatgtgttatgcggattgcgtacctgtatatttttatagtgaaccacatggatatataggattagcacatgcaggttggcgaggaacatatggtcaaatagtaaaagaaatgctaaaaaaagtggattttgattatgaagacttaaagattgtaattggtccagcaacttcaaattcttatgaaatcaatgatgatataaaaaataagtttgaggaattaaccattgattcaactttatatattgagaccagaggtaaaaatcaacatggtattgatttgaaaaaggctaacgcacttcttctagaagaagctggagttccatcaaaaaacatatacgttacggaatatgcaacttcagaaaacttagatttattcttttcatatcgtgttgaaaaaggacagacgggacgtatgttagcatttattggacggaagtaa

SEQ ID NO: 374 - protein, 221 aa, Artificial Sequence
  Description of Artificial Sequence: synthetic amino acid sequence
MARYISDSAHHITHHQDILANLIGYPRDEWVFPIQTHDSRIVEVTSEHKGTNIDELTDDLHGIDGMYTFDSHILLTMCYADCVPVYFYSEPHGYIGLAHAGWRGTYGQIVKEMLKKVDFDYEDLKIVIGPATSNSYEINDDIKNKFEELTIDSTLYIETRGKNQHGIDLKKANALLLEEAGVPSKNIYVTEYATSENLDLFFSYRVEKGQTGRMLAFIGRK

SEQ ID NO: 375 - DNA, 669 bp, Artificial Sequence
  Description of Artificial Sequence: synthetic nucleic acid sequence
atggatgttaaagagaatcttgctaagattgaaaaggaaattgatgcaagcattaaaaaaagtgcgcattcagcacaacctcacgtgattgcagtaacaaaatatgttacaatagagcgagctagagaagcgtataaagtagggataagacatttcggtgaaaatcgattagatggattcaaagagaagaaagaatctctaccaagcgatgttaaattacatttcattggttctttacaatcaaggaaagtaaaagatattataaatgaagtcgattattttcatgctttagatcgtttaagtctagctaaggagattaataaaagagcaaatcatgttataaaatgtttcttacaagtaaatgtttctggagaagaatctaaacatggcatagctcttgaagaagtgaatcaatttataaatcaaattaaagaatatgaaaatatccaaattattggattaatgacgatggcaccattgactgatgatttatcgtacataagaaatttatttaaagaattaagacataaaagaaatgaaattcaacaattcaatttagcacatgcaccttgtacagaattatctatgggaatgagtaatgattatcaaatggcagttgaagaaggtgcaacctttgtcagaattgggactaaacttgtaggagaatag

SEQ ID NO: 376 - protein, 222 aa, Artificial Sequence
  Description of Artificial Sequence: synthetic amino acid sequence
MDVKENLAKIEKEIDASIKKSAHSAQPHVIAVTKYVTIERAREAYKVGIRHFGENRLDGFKEKKESLPSDVKLHFIGSLQSRKVKDIINEVDYFHALDRLSLAKEINKRANHVIKCFLQVNVSGEESKHGIALEEVNQFINQIKEYENIQIIGLMTMAPLTDDLSYIRNLFKELRHKRNEIQQFNLAHAPCTELSMGMSNDYQMAVEEGATFVRIGTKLVGE

SEQ ID NO: 377 - DNA, 354 bp, Artificial Sequence
  Description of Artificial Sequence: synthetic nucleic acid sequence
atgaataataattcaaaaaataattctagaaacgttgtaacaatgaaccaagcatcacaatcatatgccgctcaggaaagttcaaaaatgtgtctgtttgaaccacgtgtcttttcagatactcaagatattgccgacgaattaaaaaacagacgtgcaactttagtaaatttacaacgcattgatcaagtatcagcaaagcgtattattgattttttaagtggtacggtatacgcaattggtggagatattcaacgcgtgggtactgatattttcttatgcacacctgataatgttgaagtagccggtagtataactgatcacatcgagaatatggagcaacactacgaataa

SEQ ID NO: 378 - protein, 117 aa, Artificial Sequence
  Description of Artificial Sequence: synthetic amino acid sequence
MNNNSKNNSRNVVTMNQASQSYAAQESSKMCLFEPRVFSDTQDIADELKNRRATLVNLQRIDQVSAKRIIDFLSGTVYAIGGDIQRVGTDIFLCTPDNVEVAGSITDHIENMEQHYE

SEQ ID NO: 379 - DNA, 1257 bp, Artificial Sequence
  Description of Artificial Sequence: synthetic nucleic acid sequence
atgggatatcaattggataaacgtcaatttgaaattttagatatgctagtgagatttaatactgaaagtccacctggacgtaatacagatccattgcaagatgaaatcgaaacgttacttaaacaactggatttttcaatacagagagaacagttatacgacaatgatagtgtgatagtagctaccttaaaagggcacaatcctaaagcgccaaaactgatattgaatggacatgttgatgtagcttctgtagatgacgatcaatattggcagtatccaccttttaaacttaccaacaaagaagaatggttatacggtcgtggcgttagcgatatgaaaggtggtatgtcttcattattctacgtcttggagcaattacatcaagaggggcaacgtccagaaggtgatattattgttcaatcagtagtcggtgaagaagtaggtgaagcaggaactaaacgtgcatgtgaaataggacctaaaggtgacttagcccttgtcttagatacgagtgagaatcaagcacttgggcaaggtggcgtgattaccggatggattacagttaaaagtaaaaatacaatacatgatggtgcgcgtagtcaaacgatacatgctggtgggggcttgtttggtgcaagtgccattgaaaaaatgacaaaggtgattcaatcgcttaatgaacttgaaaggcattgggctgtcatgaagaagagccctggaatgcctccaggtgcgaatacaattaacccagctgtcatagaaggtggacgtcaccctgcatttattgcagatgaatgtcgattatggattactgttcattacttaccgaacgaaagttatgaatctgtagttaatgaaatagagcaatatttaaataaggttgcagaagcagatgtatggctcagagagaatccacttgaatttgaatggggtggtacatccatgattgaggataaaggagaaatcttcccaagtttcactgttccgacacatcatccaggttttaagcaattagaagaagcacatgaacatattcataataaaaagcttgaacatggtatgagtacaactgtaactgatggaggttggacagcacattttggcattcccacgatattatatggcccaggtagtttagaagaggcacatagtgtagatgagaaaataaaagcaaaggaattagctcaatatagtgatgttttatatacatttttaaaagagtggtatgcacacccacaatcctataaatcatcatag

SEQ ID NO: 380 - protein, 418 aa, Artificial Sequence
  Description of Artificial Sequence: synthetic amino acid sequence
MGYQLDKRQFEILDMLVRFNTESPPGRNTDPLQDEIETLLKQLDFSIQREQLYDNDSVIVATLKGHNPKAPKLILNGHVDVASVDDDQYWQYPPFKLTNKEEWLYGRGVSDMKGGMSSLFYVLEQLHQEGQRPEGDIIVQSVVGEEVGEAGTKRACEIGPKGDLALVLDTSENQALGQGGVITGWITVKSKNTIHDGARSQTIHAGGGLFGASAIEKMTKVIQSLNELERHWAVMKKSPGMPPGANTINPAVIEGGRHPAFIADECRLWITVHYLPNESYESVVNEIEQYLNKVAEADVWLRENPLEFEWGGTSMIEDKGEIFPSFTVPTHHPGFKQLEEAHEHIHNKKLEHGMSTTVTDGGWTAHFGIPTILYGPGSLEEAHSVDEKIKAKELAQYSDVLYTFLKEWYAHPQSYKSS

SEQ ID NO: 381 - DNA, 916 bp, Artificial Sequence
  Description of Artificial Sequence: synthetic nucleic acid sequence
atggaacgtttagaaaacaaaatcgcagtgattactggtgcgagtactggtattggacaagcatcggccgtggcgttagcaaaagaaggagcacatgtgttagcgcttgatatatcagatcaattagaagaaactgtgcagtctattaatgataatggtgggaaagcaactgcatatcgcgtagacatttcagatgataaacaagtcaaacaattctcagaaaaaatagcacaagaatttggacatgtagatgttatttttaacaatgcgggtgtagataatggcgccggacgtattcatgaatatccagttgaagtgtttgataaaattatggctgttgatatgagaggaacttttttagtaactaaatttttattacctttaatgatgaaacaaggtggttctattattaatacagcttcattctctgggcaagctgcggatttataccgttcagggtataatgctgctaagggcggtgtcattaattttacaaaatctatcgctatagaatatggacgtgaaaatattcgtgctaatgctatagcacctggaacaatcgaaacaccacttgttgataatttagcaggtacatcagatgaagaagccggacaaacattccgagaaaatcaaaaatgggtaacaccattaggtcgactaggaacaccggatgaagttgggaaacttgtagcctttttagcttccgatgatagttcatttataactggtgaaactattcgtattgatggtggcgtgatggcttatacatggctacaacacgcattttcattttttgtcgttgttttttcttattttcttgtgacgtatattggttaccgatatgttctacttttttattcattgcttgtcacctccttaagcatttcactcttcattaatacgttcttctttaatc

SEQ ID NO: 382 - protein, 306 aa, Artificial Sequence
  Description of Artificial Sequence: synthetic amino acid sequence
  MOD_RES (306): variable amino acid
MERLENKIAVITGASTGIGQASAVALAKEGAHVLALDISDQLEETVQSINDNGGKATAYRVDISDDKQVKQFSEKIAQEFGHVDVIFNNAGVDNGAGRIHEYPVEVFDKIMAVDMRGTFLVTKFLLPLMMKQGGSIINTASFSGQAADLYRSGYNAAKGGVINFTKSIAIEYGRENIRANAIAPGTIETPLVDNLAGTSDEEAGQTFRENQKWVTPLGRLGTPDEVGKLVAFLASDDSSFITGETIRIDGGVMAYTWLQHAFSFFVVVFSYFLVTYIGYRYVLLFYSLLVTSLSISLFINTFFFNX

SEQ ID NO: 383 - DNA, 336 bp, Artificial Sequence
  Description of Artificial Sequence: synthetic nucleic acid sequence
atggtgctcgtacaatttccaccttggtttgattgtaacgtccaaaatataaattacatcttatatgtgagaaaacaattaactgatattccgatgagcattgaatttagacatcaatcatggtttgacaatcagtataaagaacaaactttatccttcttaacacaacatcaaatcattcatgcagtggtagatgaacctcaagttaaagaggggagcgttcctttagtaaataggattactagtgaaattgcttttgtacgttatcatggacgtaatcattatggttggactaaaaaagatatgactgatcaagaatggcgagatgtaagataa

SEQ ID NO: 384 - protein, 111 aa, Artificial Sequence
  Description of Artificial Sequence: synthetic amino acid sequence
MVLVQFPPWFDCNVQNINYILYVRKQLTDIPMSIEFRHQSWFDNQYKEQTLSFLTQHQIIHAVVDEPQVKEGSVPLVNRITSEIAFVRYHGRNHYGWTKKDMTDQEWRDVR

SEQ ID NO: 385 - DNA, 1152 bp, Artificial Sequence
  Description of Artificial Sequence: synthetic nucleic acid sequence
atgaagcatgaacaagaattagaacgcatctccggtctcactcaagaagaagctgtgaaagaacagcttcaaagagttgaagaagaactgtcacaagatattgcaatacttgttaaagaaaaagaaaaagaagcgaaagaaaaagttgataagacagctaaagaattacttgctacaactgtacaaagattagcagccgaacatacaactgaatcaactgtttcagtcgtaaatctgcctaacgatgaaatgaaaggtcgtatcataggtagagaaggtagaaatatacgcacattagaaacacttactggcatagatttaattattgatgacacaccagaagcagttattttatcaggttttgacccaattagacgtgaaattgctagaactgcactagttaatttggtttctgatggacgtattcatcctggacgtattgaagatatggtcgaaaaagctagaaaggaagtagacgatatcattagagatgctggagaacaagctacctttgaaataaatgtacacaatatgcatcctgatttagtgaaaattttgggtcgattaaattatcgaactagttatggtcagaatgtacttaaacattcaattgaagttgcccacctttcaggtatgcttgcagcagaattaggagaggatgttactttagctaaacgtgctggattattacatgatgttggtaaagccattgatcatgaagttgaaggtagtcacgtagaaataggtgttgaattagctaagaaatataatgaaaataacataattattaatgctattcactcacatcatggtgatgttgaaccaacctctatcatttctattttagttgcagcagctgatgcattatcagcagcgcgaccaggtgcacgtaaagagacacttgaaaattatattagaagacttgagagactcgaaacgttatctgaaagttatgatggggtagaaaaagcatttgctatacaagctggtagagagattcgtgtagtcgtctcacctgaagaaattgatgatttaaaatcatatagattggcaagagatattaagaaccaaattgaagaagagttacaatatcctggacatatcaaagtgacagttgttcgagagactagagcaatagaatatgctaaataa

SEQ ID NO: 386 - protein, 383 aa, Artificial Sequence
  Description of Artificial Sequence: synthetic amino acid sequence
MKHEQELERISGLTQEEAVKEQLQRVEEELSQDIAILVKEKEKEAKEKVDKTAKELLATTVQRLAAEHTTESTVSVVNLPNDEMKGRIIGREGRNIRTLETLTGIDLIIDDTPEAVILSGFDPIRREIARTALVNLVSDGRIHPGRIEDMVEKARKEVDDIIRDAGEQATFEINVHNMHPDLVKILGRLNYRTSYGQNVLKHSIEVAHLSGMLAAELGEDVTLAKRAGLLHDVGKAIDHEVEGSHVEIGVELAKKYNENNIIINAIHSHHGDVEPTSIISILVAAADALSAARPGARKETLENYIRRLERLETLSESYDGVEKAFAIQAGREIRVVVSPEEIDDLKSYRLARDIKNQIEEELQYPGHIKVTVVRETRAIEYAK

SEQ ID NO: 387 - DNA, 795 bp, Artificial Sequence
  Description of Artificial Sequence: synthetic nucleic acid sequence
atgagaatattgtttataggtgacatcgttggtaaagtgggcaggaaaatgattactacttatttacctaaaattaaacaaacttatcacccaacagtttctatagtaaacgctgaaaatgccgcacacggtaaaggattaacagaaaaaatttacaaacaacttttgagagaaggcgtggatttcatgactatgggtaatcatacatatggtcaaagagaaatttacgattttattgatgatgctcatcgaatggtgagacctgcaaattttcctgatgaagctccaggaacaggtatgagaataataaaaattaacgatattaaattggctattattaatttacaaggccgttcatttatgcaagacattgatgatccatttaaaaaggctgaccagctaatcgaagaagctcaaaaatctacaccatatatatttgtagattttcatgctgaaactacatctgaaaaaaatgctatgggttggtatttagatggtagagtgagcgctgttgttggtactcacacacatattcaaacttctgatgatcgtatattacctcatggcacaggatatatcacagatgtcgggatgacaggttattacgatggtattttaggtatcaatagagatgaagttattcaacgttttattactagtttgccacaaaggcatgttgttccagatgatgggcgaggcgtattatcaggagttatcatagatttagataaagaaggtaaaacgactcaaataaaaagactgttaataaatgaggaccatcctttccaaatttaa

SEQ ID NO: 388 - protein, 264 aa, Artificial Sequence
  Description of Artificial Sequence: synthetic amino acid sequence
MRILFIGDIVGKVGRKMITTYLPKIKQTYHPTVSIVNAENAAHGKGLTEKIYKQLLREGVDFMTMGNHTYGQREIYDFIDDAHRMVRPANFPDEAPGTGMRIIKINDIKLAIINLQGRSFMQDIDDPFKKADQLIEEAQKSTPYIFVDFHAETTSEKNAMGWYLDGRVSAVVGTHTHIQTSDDRILPHGTGYITDVGMTGYYDGILGINRDEVIQRFITSLPQRHVVPDDGRGVLSGVIIDLDKEGKTTQIKRLLINEDHPFQI

SEQ ID NO: 389 - DNA, 1815 bp, Artificial Sequence
  Description of Artificial Sequence: synthetic nucleic acid sequence
gtggtttattttgttatcatagagtatgaattaataccacaggaggcatgtgatatgaaatcacaaatatcatggaaagtgggcggtcagcaaggcgaaggtattgaatctaccggtgaaatctttgctactgcgatgaatagaaaaggttattttttgtatggatatagacacttttctagtcgtataaaaggtggccatactaataataagataagagtttcaaaatcgcctgtgcatgcgattagtgatgatttggatatactcattgcttttgaccaggaaacgattgaattaaatcatcatgaaatgagagaagatagtattataattgcggatgctaaagcaaaaccccaaaagccagagaactgtgtggctcaattaattgagttaccattcactagcacggcaaaggaacttggaacagcattaatgaagaatatggtggcaattggtgcgacatctgcactgatggatttaaatacatcaacttttgaaactttaatcgataacatgttttcaaaaaaaggtaataaagtcgttgatatgaatatacaagcccttaatatgggttatgatttaatgaagcaacaagttaccaacgttaatggagactttacattagagaatggtagcggtcatcctcatttatatatgataggtaatgacgcaatcggattaggagcaatagcagctggatcaagatttatgtccgcttatccaattacgccagcttctgaaattatggaatacatgattgccaatctacctaaagttgatggtactgttgttcaaactgaagatgaaatagcagcagcaacgatggcgattggagctaactatgctggcgtacgaggctttacagcgagtgcgggtccaggtctttctttaatgatggaatctattggattgtctggtatgactgaaacgccattagtcattattaatactcaaagaggtggtccttctactggcttaccaacaaagcaagaacaatcagatttaatgcaaatgatttatggtacccatggtgatattccgaaaattgtcgttgctcctacagatgctgaagatgcgttttatcttactatggaagcatttaatttagctgaagaataccaatgtccagtcattctgttaagtgatttacaattatcattaggaaaacaaactgttaaaacactcgattataataaaatcgatattcgtcgtggagaaataatacagtcagatatcgagagagctgaagatgataaagcatactttaaaagatatgcattaacagctagtggcgtatcaccacgaccaataccaggtgttaaaggtggtatacatcatgtaacaggtgttgaacataatgaagaagggaagccaagtgaggcgcctatgaatcgtcagaatcagatggaaaaacgaatgcgcaaaactgaaagcttggttatcaataatcctgtgttactcaatgaacatgaagacgaagcagatatactgtatataggatttatatctactaaaggtgctattggagaaggtgcagaaagactagaacgacatggtgtaaaagtgaatacgatgcatattcgacaattacatcctttccctaaagatattgttcaacaagctattaataaagcttcgaaagtaatagttgcagaacataattatcaaggacaattatcaagtattttaaaaatgaacacacaagttaatgataaattagttaatcaaacaaaatacgatgggaaacctttcttaccttatgaaattgaagaaaaaggtttggaaattgctaaagagttaaaggagttggtgtaa

SEQ ID NO: 390 - protein, 604 aa, Artificial Sequence
  Description of Artificial Sequence: synthetic amino acid sequence
VVYFVIIEYELIPQEACDMKSQISWKVGGQQGEGIESTGEIFATAMNRKGYFLYGYRHFSSRIKGGHTNNKIRVSKSPVHAISDDLDILIAFDQETIELNHHEMREDSIIIADAKAKPQKPENCVAQLIELPFTSTAKELGTALMKNMVAIGATSALMDLNTSTFETLIDNMFSKKGNKVVDMNIQALNMGYDLMKQQVTNVNGDFTLENGSGHPHLYMIGNDAIGLGAIAAGSRFMSAYPITPASEIMEYMIANLPKVDGTVVQTEDEIAAATMAIGANYAGVRGFTASAGPGLSLMMESIGLSGMTETPLVIINTQRGGPSTGLPTKQEQSDLMQMIYGTHGDIPKIVVAPTDAEDAFYLTMEAFNLAEEYQCPVILLSDLQLSLGKQTVKTLDYNKIDIRRGEIIQSDIERAEDDKAYFKRYALTASGVSPRPIPGVKGGIHHVTGVEHNEEGKPSEAPMNRQNQMEKRMRKTESLVINNPVLLNEHEDEADILYIGFISTKGAIGEGAERLERHGVKVNTMHIRQLHPFPKDIVQQAINKASKVIVAEHNYQGQLSSILKMNTQVNDKLVNQTKYDGKPFLPYEIEEKGLEIAKELKELV

SEQ ID NO: 391 - DNA, 618 bp, Artificial Sequence
  Description of Artificial Sequence: synthetic nucleic acid sequence
atggacaaatttaaatctatgacagaattaaaagaattgactaaagaaggaaaagattgggaaatagagtgtgaaaatcgttctagcatagtcactatattagcattacatggcggtggaattgaacctgccacaactgaattagcctatacaattgcacattgtggcgactataactatttttcctttaaaggtatgagaagtaaggggaataatgagttacatgtgacttccacacattatgatgaccaaattgcattagatttagtgagaggtagccaaagaactgtagccatccatggttgtgaaggtaatgaaagtgtggcttatataggaggtagtgatgacagactaattgagttaatcaccgaatctcttgaagatataggaattagcgtgcgagaagcaccacatcatatttctggaactcaagaaaataatattgttaatatgactcaaacccaaggaggagtgcaattagaactgacagctcagttaagaaaggagctatttaaaaatagaaaaagttcacgcaaaaaccgtgaaaataaagataattgggatgatttaatgtacgactttgctgatgcaatgaaaaaagctatagaacgtgcataa

SEQ ID NO: 392 - protein, 205 aa, Artificial Sequence
  Description of Artificial Sequence: synthetic amino acid sequence
MDKFKSMTELKELTKEGKDWEIECENRSSIVTILALHGGGIEPATTELAYTIAHCGDYNYFSFKGMRSKGNNELHVTSTHYDDQIALDLVRGSQRTVAIHGCEGNESVAYIGGSDDRLIELITESLEDIGISVREAPHHISGTQENNIVNMTQTQGGVQLELTAQLRKELFKNRKSSRKNRENKDNWDDLMYDFADAMKKAIERA

SEQ ID NO: 393 - DNA, 603 bp, Artificial Sequence
  Description of Artificial Sequence: synthetic nucleic acid sequence
atgaaaaatgtttctaaagctttgatttggtttgttataagcttcatcatctttcacgcaatattatttgtgatgtggggagaacatcaagaatactggtatttatatactggcattatgttaatagctggaataagttatgttttttaccaaagagacattgcatctaaacgattattaacttccataggcatgggtataataacgagtgtcgcacttattattatacaattaattttttcacttatttcatcagaattatcatacgcatctttaatcaaagaattatcacgaacgggtgtctactttaaatggcaaatgctcgttactttattatttgtgataccttgtcatgaattatatatgagaactgttttacaaaaggaattaataaaatataacttaccgaaatgggctagcattttaattgttgcaatatgttcaagttcattatttatatacttagataattggtggattgtattctttatttttgtagctcaattcattctatctcttagctatgaatatacgagacgtattgctacgactacaattggtcaaattgtggctatcattttattattgatattccacggataa

SEQ ID NO: 394 - protein, 200 aa, Artificial Sequence
  Description of Artificial Sequence: synthetic amino acid sequence
MKNVSKALIWFVISFIIFHAILFVMWGEHQEYWYLYTGIMLIAGISYVFYQRDIASKRLLTSIGMGIITSVALIIIQLIFSLISSELSYASLIKELSRTGVYFKWQMLVTLLFVIPCHELYMRTVLQKELIKYNLPKWASILIVAICSSSLFIYLDNWWIVFFIFVAQFILSLSYEYTRRIATTTIGQIVAIILLLIFHG

SEQ ID NO: 395 - DNA, 864 bp, Artificial Sequence
  Description of Artificial Sequence: synthetic nucleic acid sequence
gtgttaataatgaatgtcttccaaatgagagataaattgaaagcgcgtttaaaacatttagacgtagaattcaagtttgatagagaagaagaaacgttacgtattgtaagaattgacaatcacaaaggtgtaacgattaaacttaacgctatcgtcgcaaaatatgaagaacaaaaagaaaaaattatagatgaaatttgttattatgtcgaggaagcaatcgctcagatgggtgatgaagtgattaataatgttgaggacatacaaattatgccggttataagagctacaagtttcgacaaagaaactaaggaaggtcatgcatttgtgttaacagaacatactgctgaaactaatatatattacgctcttgatctagggaaatcttatcggctaatagatgaaaatatgttacaaacgttaaatttaactgctcaacaagtgaaagaaatgtcactatttaatgttcgtaagttagagtgtcgctatagtacggatgaagttaaaggtaatattttttacttcatcaacacaaatgatggatatgatgcaagtcgtattttaaatacttcttttttaaatcatattcaacaccaatgtgaaggtgaaatgcttgttggtgtgccacatcaagatgtattaattcttgcagatattagaaataaaacaggttatgatgttatggctcatttgactatggaattctttactaaaggacttgttccgattacttctttatcatttggttatgataacggacatctagagccaatatttattttggggaaaaataataaacaaaaaagagatcctaacgttattcaacgtttagaagcgaacagaaaaaaattcaaaaaagattaa

SEQ ID NO: 396 - protein, 287 aa, Artificial Sequence
  Description of Artificial Sequence: synthetic amino acid sequence
VLIMNVFQMRDKLKARLKHLDVEFKFDREEETLRIVRIDNHKGVTIKLNAIVAKYEEQKEKIIDEICYYVEEAIAQMGDEVINNVEDIQIMPVIRATSFDKETKEGHAFVLTEHTAETNIYYALDLGKSYRLIDENMLQTLNLTAQQVKEMSLFNVRKLECRYSTDEVKGNIFYFINTNDGYDASRILNTSFLNHIQHQCEGEMLVGVPHQDVLILADIRNKTGYDVMAHLTMEFFTKGLVPITSLSFGYDNGHLEPIFILGKNNKQKRDPNVIQRLEANRKKFKKD

SEQ ID NO: 397 - DNA, 1210 bp, Artificial Sequence
  Description of Artificial Sequence: synthetic nucleic acid sequence
atgagctggtttgataaattatttggcgatgacaacggttcgaatgacgatttgttacgcaaaaataaaaatagacgtcagtctcagcaatcaaaacaaaataatcaagactcattactgcctcaaaataatgatatttatagtcgaccaagaggtaaatttagatttccaatacaagtttctgaaaatgaatatacgcaaaaaaatgaaaattataatgaacataaccaagaagaaacaaacgatataatgagatcatataaccagcatgataatcctgaatttgattcttctggtaaaagacatcgacgccgacgccaagcgtattcaaaacacgatcaatctaagattacacaacaaaagcaatttgcagataacaattatacaaataataacagtgtttttaatcaaaacgacaataagaaatcttcacaacaacgtaaatcaatacaatctgaaaatatcaaaaacaaagcaaacactaagaatacgtcgacatctcctgaatttacatatttaaatcatagttttaaatcaagcgaggtaccctcagcgatttttggtacaaaaaaacgaagaccgattgagaatggtgtcataccgccagaacataaggaattaaatgataaagagattgttcaacaggatgaagtctcgcattcaacgaaatcaatagatgcatcaaaaaatgtttctaatagtaacgataacaatattgaaaaaaatcaacagaaaaaacaacaaacaactgctcaaactgagtcatcatcagaaaatatgcataatgttgaaaagtcaaattatcaaactactaagcgtaaaacaccaaattactctaaagtagataatacgattaatattgaaaatatctatgcttcacaaattgtagaagaaatcagaagagaaagagaacgtaaagttctacagaaacgacgttttaagaaagccttacaacaaaaacgtcaacaaaatcaacagtcagaagaggattcaattcaaaaagctattgatgaaatgtatgctaagcaagcccaacattacacaggcgaaagttcattggatttagaaaatgaaagtaatcaagattcgtcatctaatagtctagagaaacaatcaaatagcagcaacattgacaataaagaagcccaaaataacacacctttatttaactacgaagaaattgacttagatacgacatcagatgttcttc

SEQ ID NO: 398 - protein, 404 aa, Artificial Sequence
  Description of Artificial Sequence: synthetic amino acid sequence
  MOD_RES (404): variable amino acid
MSWFDKLFGDDNGSNDDLLRKNKNRRQSQQSKQNNQDSLLPQNNDIYSRPRGKFRFPIQVSENEYTQKNENYNEHNQEETNDIMRSYNQHDNPEFDSSGKRHRRRRQAYSKHDQSKITQQKQFADNNYTNNNSVFNQNDNKKSSQQRKSIQSENIKNKANTKNTSTSPEFTYLNHSFKSSEVPSAIFGTKKRRPIENGVIPPEHKELNDKEIVQQDEVSHSTKSIDASKNVSNSNDNNIEKNQQKKQQTTAQTESSSENMHNVEKSNYQTTKRKTPNYSKVDNTINIENIYASQIVEEIRRERERKVLQKRRFKKALQQKRQQNQQSEEDSIQKAIDEMYAKQAQHYTGESSLDLENESNQDSSSNSLEKQSNSSNIDNKEAQNNTPLFNYEEIDLDTTSDVLX

SEQ ID NO: 399 - DNA, 408 bp, Artificial Sequence
  Description of Artificial Sequence: synthetic nucleic acid sequence
atgatgaaaaataaattaacattaaaagagaatctatttatcggctcaatgctgtttggtcttttttttggtgctggaaatctcatttttccaattcacttaggtcaaactgcgggggcaaatgtatggaccgccaatttaggatttcttatcacggctatcggactaccttttttaggaattatagcgataggtgtatctaaaacaaacggggtctttgaaatttcctcaaggataagtaaaatatatggttatttgttcacaattggcttgtatcttgttataggtccgttttttgcgttgccaagacttgcgacgacgtcatttgaaatagcattttcaccatttatttcatctggtacggcccaagcgttgttgctatttttagtattttattcttcggagtag

SEQ ID NO: 400 - protein, 135 aa, Artificial Sequence
  Description of Artificial Sequence: synthetic amino acid sequence
MMKNKLTLKENLFIGSMLFGLFFGAGNLIFPIHLGQTAGANVWTANLGFLITAIGLPFLGIIAIGVSKTNGVFEISSRISKIYGYLFTIGLYLVIGPFFALPRLATTSFEIAFSPFISSGTAQALLLFLVFYSSE

SEQ ID NO: 401 - DNA, 861 bp, Artificial Sequence
  Description of Artificial Sequence: synthetic nucleic acid sequence
gtgcttgcatttatccgtcctatgggtggaattagtcatgcgccagtaagtgctgattatagcaatagcgtgttactcaaagggtttatcgatggatataatacattagacgctttggcatcattagcatttggtattatcattgttactacaattaaaaagttggggattactaatccgaatacaatcgctaaagaaactttaaaatcaggtacgattagtattatagctatgggcgttatttatactttattagctttaatgggtacgatgagtttaggtcgttttaaagtaagtgaaaatggtggtattgcgcttgctcagattgcacaacattatttaggggattacggaattattattttgtcactaatcatcattgtggcatgtctgaaaacagcaataggattgatcacagccttttcggaaacatttacagagttattccctaaatctaactatctttggttagctactggggtgagtatattagcttgtatatttgctaatgtaggtttaacaaaaattattatgtattcaacaccagtgttgatgttcatttatcctttagcgattactttaattttattagcattacttagtccattatttaaacattctaaaattgtctatcgatttacaacattatttacaatggtggcggcatttgtagatggtgtgaaagcaagtccagagttctttgttaatacaaaatttgcacaaacaatcattggatttggtgaaaattatctcccattctttaacattggtatgggatggattgttccagcacttattggtttcattattggtattattgtatactttatgactgctaaaaaatcgtcccacgtacaataa

SEQ ID NO: 402 - protein, 286 aa, Artificial Sequence
  Description of Artificial Sequence: synthetic amino acid sequence
VLAFIRPMGGISHAPVSADYSNSVLLKGFIDGYNTLDALASLAFGIIIVTTIKKLGITNPNTIAKETLKSGTISIIAMGVIYTLLALMGTMSLGRFKVSENGGIALAQIAQHYLGDYGIIILSLIIIVACLKTAIGLITAFSETFTELFPKSNYLWLATGVSILACIFANVGLTKIIMYSTPVLMFIYPLAITLILLALLSPLFKHSKIVYRFTTLFTMVAAFVDGVKASPEFFVNTKFAQTIIGFGENYLPFFNIGMGWIVPALIGFIIGIIVYFMTAKKSSHVQ

SEQ ID NO: 403 - DNA, 399 bp, Artificial Sequence
  Description of Artificial Sequence: synthetic nucleic acid sequence
atgccacacctaggtacaaatgctgttgatattttagttgattttgtaaatgaaatgaaacaagaatataaaaatattaaagaacatgataaagtacacgagttagacgctgttccaatgattgagaaacatctccacagaaaaattggtgaagaagaatcacatatctactctggatttgtaatgttaaactctgtattcaatggtggtaaacaagttaattctgttcctcataaagcgacagctaaatataatgtaagaactgttccagaatatgacagtactttcgtgaaggatttatttgaaaaagtcattcgtcatgtgggcgaagattatttaactgtagatatacctagcagtcacgatccagtggcaagtgatcgttggagatttaattaa

SEQ ID NO: 404 - protein, 132 aa, Artificial Sequence
  Description of Artificial Sequence: synthetic amino acid sequence
MPHLGTNAVDILVDFVNEMKQEYKNIKEHDKVHELDAVPMIEKHLHRKIGEEESHIYSGFVMLNSVFNGGKQVNSVPHKATAKYNVRTVPEYDSTFVKDLFEKVIRHVGEDYLTVDIPSSHDPVASDRWRFN

SEQ ID NO: 405 - DNA, 1476 bp, Artificial Sequence
  Description of Artificial Sequence: synthetic nucleic acid sequence
atgaatgatcatcaaaaaaatcatgcaacatctcaagatgataacacaatgtcaacaccatctaagaatagcaagcatataaaaattaaattatggcatttcatactcgttattttgggtattattcttttaacatccatcattactgtagtatcaacaattttaattagccatcaaaaaagtggtttaaataaagaacaacgtgcaaatttaaaaaaaattgaatatgtctatcaaacacttaataaagattattacaaaaagcaaagttctgataaattaactcaatctgccatagatggtatggttaaagaacttaaagatccatattcagaatatatgactgctgaagaaacaaaacaatttaatgaaggtgtatcaggtgatttcgttggcataggtgctgaaatgcaaaagaaaaatgaacagataagtgttactagcccaatgaaggattcaccagcagaaaaagctggtattcaacctaaagatatcgtcacacaagtgaatcatcattcggtagtcggtaaaccacttgatcaagttgttaaaatggtccgcggcaaaaaaggaacatatgttactttaactataaaacgtggttcgcaagaaaaggatattaagattaaacgcgataccattcacgttaagagtgtagagtatgagaagaaaggcaatgtaggcgtactaacaatcaataaattccaaagcaatacttctggtgaactcaaatctgcaatcatcaaagcgcataagcaaggcatccgtcatatcattttagatttgagaaataatccgggggggttattagatgaggcagtcaagatggctaacatctttattgataagggaaatactgtcgttcaattagaaaaaggtaaggataaggaagaattaaaaacttctaatcaagcactaaaacaagcaaaagatatgaaagtatccatcttagttaatgagggatcagctagtgcttcagaagtgtttacaggtgctatgaaagactatcataaagctaaagtttacggttctaaaacatttggtaaaggtatcgttcagaccactcgtgaatttagtgatggttcattaattaaatatacagagatgaaatggctaacgcctgatggccattatattcatggtaaaggaattagaccagatgttagtatctcaacaccaaaataccaatcactcaatgtcattccagataacaaaacttatcatcaaggtgaaaaagataaaaatgttaaaacgatgaaaataggtctaaaagctttaggttatccaattgataacgaaacaaacatatttgacgaacaattagaatctgctattaaaacatttcaacaagacaataatttaaaagttaatggcaattttgataaaaaaacaaatgataaatttactgaaaaactagttgaaaaagcgaataaaaaagatactgttttaaacgatttactaaacaaactaaaataa

SEQ ID NO: 406 - protein, 491 aa, Artificial Sequence
  Description of Artificial Sequence: synthetic amino acid sequence
MNDHQKNHATSQDDNTMSTPSKNSKHIKIKLWHFILVILGIILLTSIITVVSTILISHQKSGLNKEQRANLKKIEYVYQTLNKDYYKKQSSDKLTQSAIDGMVKELKDPYSEYMTAEETKQFNEGVSGDFVGIGAEMQKKNEQISVTSPMKDSPAEKAGIQPKDIVTQVNHHSVVGKPLDQVVKMVRGKKGTYVTLTIKRGSQEKDIKIKRDTIHVKSVEYEKKGNVGVLTINKFQSNTSGELKSAIIKAHKQGIRHIILDLRNNPGGLLDEAVKMANIFIDKGNTVVQLEKGKDKEELKTSNQALKQAKDMKVSILVNEGSASASEVFTGAMKDYHKAKVYGSKTFGKGIVQTTREFSDGSLIKYTEMKWLTPDGHYIHGKGIRPDVSISTPKYQSLNVIPDNKTYHQGEKDKNVKTMKIGLKALGYPIDNETNIFDEQLESAIKTFQQDNNLKVNGNFDKKTNDKFTEKLVEKANKKDTVLNDLLNKLK

SEQ ID NO: 407 - DNA, 504 bp, Artificial Sequence
  Description of Artificial Sequence: synthetic nucleic acid sequence
atgattagattagcaactaaagatgatttacttagtattactcaattagtcaaagaggctaaacagattatggaagaattcaacaacaaccaatgggatgatgaatatcccgcgaaagagcattttgaagaagacatcgaaaataaaacactatatgttttagacgttgatcatacaatttatggttttattgttatcgaccaaaatcaatcggagtggtatgatgacattgattggcctgttaatcgaaatggggcatacgttattcacagattagctggatcaaaacaatataaaggtgctgcgactgaacttttccaatttgccattgacttagcaaatgaacatgatattcatgtcattttaacagatacatttgccctcaataaacctgctcaaggattatttgaaaagtttggttttactaaagttgatgagatagagatagattatcatccttttgatagaggggcacctttttatgcatattataaaaacatataa

SEQ ID NO: 408 - protein, 167 aa, Artificial Sequence
  Description of Artificial Sequence: synthetic amino acid sequence
MIRLATKDDLLSITQLVKEAKQIMEEFNNNQWDDEYPAKEHFEEDIENKTLYVLDVDHTIYGFIVIDQNQSEWYDDIDWPVNRNGAYVIHRLAGSKQYKGAATELFQFAIDLANEHDIHVILTDTFALNKPAQGLFEKFGFTKVDEIEIDYHPFDRGAPFYAYYKNI

SEQ ID NO: 409 - DNA, 1074 bp, Artificial Sequence
  Description of Artificial Sequence: synthetic nucleic acid sequence
atgacaaaaattgcatatacaggtggaggaacagtaggacacgtttcagtgaatttaagtttaattcctacttcgattgaaaaaggacacgaagcattttatattggttcaaaacatggtattgaaagggaaatgatagagtcacaactccctgatattcaatattatccaatatcaagcggtaaattacgtcgttatctatcttttgaaaatgcaaaagatgtctttaaagttttgaaaggaattttagatgcacgtaaaatacttaaaaaacaaaaaccagacttacttttttcaaaaggtggttttgttagtgttccggtagttatagccgcacgttctttaaaaattccaactatcatacacgaatcagatttaactcctggattagctaataaaatttctttaaaatttgctaagaaaatatacacaacctttgaagatacacttacatatcttccaaaagataaagctgattttgttggggctactgtacgtgaggacttaaaacaagggaataaagaaagaggatatcaactcactgattttgataaaaataaaaaagtgttattagtcatgggaggaagtttaggtagtaaaaaacttaataatatcattcgtcaaaatattgaggcacttctccacgattatcaaattatacacttaactggaaaaggacttgttgatgactcaatcaataaaaaaggttatgttcaatttgaatttgttaaagacgacttaactgatttattagcaatcactgatactgttgtaagtcgtgcaggttctaacgcaatttatgaatttttaacgctacgtataccgatgttactcatccccttaggacttgatcaatcaagaggagatcaaattgataatgctaaaaactttgaatctaagggttatggtcgtcatattcctgaagatcaacttacagaagttaacttattgcaagaattaaatgatattgaattacatcgtgaatctattattaaacaaatggaaacatatcaagagagttacacgaaagaagatttatttgataaaattattcatgatgcattaaacaagtag

SEQ ID NO: 410 - protein, 357 aa, Artificial Sequence
  Description of Artificial Sequence: synthetic amino acid sequence
MTKIAYTGGGTVGHVSVNLSLIPTSIEKGHEAFYIGSKHGIEREMIESQLPDIQYYPISSGKLRRYLSFENAKDVFKVLKGILDARKILKKQKPDLLFSKGGFVSVPVVIAARSLKIPTIIHESDLTPGLANKISLKFAKKIYTTFEDTLTYLPKDKADFVGATVREDLKQGNKERGYQLTDFDKNKKVLLVMGGSLGSKKLNNIIRQNIEALLHDYQIIHLTGKGLVDDSINKKGYVQFEFVKDDLTDLLAITDTVVSRAGSNAIYEFLTLRIPMLLIPLGLDQSRGDQIDNAKNFESKGYGRHIPEDQLTEVNLLQELNDIELHRESIIKQMETYQESYTKEDLFDKIIHDALNK

SEQ ID NO: 411 - DNA, 615 bp, Artificial Sequence
  Description of Artificial Sequence: synthetic nucleic acid sequence
atgaatcgatggaaacgcatttcattgcttattgtttttacacttatttttggtataatagctttttttcatgaatcaaggcttggaaaatggatagataacgaagtatatgaatttatttattcatctgaaagtttcattaccacatctattatgttaggtgtaacaaaaattggtgaagtttgggcaatggttgcgctatccttattattagttgcttaccttatgctaaaacgcttcaagattgagacattattctttgtaatagtaatgagcttatctagtacactcaatccactattaaagaatatctttgatagggaacgtccaacattattgcgtttaattgacatttcaggctttagttttccaagcggtcatgctatgggctcaacttcattctttggaagcgctatatatgtaataaaccgtcatgattcgggtatctctaaaggcgtgttaatcggtttatgcgcacttttcattttattaatatcaacttctagagtgtatctaggcgttcattaccctacagatattattgccggcattattggtggtgtattctgccttttactcagtactttattactacctaaacagttaatagcttag

SEQ ID NO: 412 - protein, 204 aa, Artificial Sequence
  Description of Artificial Sequence: synthetic amino acid sequence
MNRWKRISLLIVFTLIFGIIAFFHESRLGKWIDNEVYEFIYSSESFITTSIMLGVTKIGEVWAMVALSLLLVAYLMLKRFKIETLFFVIVMSLSSTLNPLLKNIFDRERPTLLRLIDISGFSFPSGHAMGSTSFFGSAIYVINRHDSGISKGVLIGLCALFILLISTSRVYLGVHYPTDIIAGIIGGVFCLLLSTLLLPKQLIA

SEQ ID NO: 413 - DNA, 990 bp, Artificial Sequence
  Description of Artificial Sequence: synthetic nucleic acid sequence
gtgttatatatgtgtactgccatttctttatatacaaaacaacgttaccattatttagctagaacaatggactttgcatttgaatttaatggtatcccaaccattgttccacgccattatcactaccaatttgatctagattcagacatgcgtcttgaatatggttttgttggaacaaatttaaaagtaggacgttatagatttggtgatggtataaacgaaaaaggtttagctatttcgaaccattacttcactggtgaagcctcatacagtacccataaacgttatggttattttaacttagcacctgaggagtttattgtttgggttttaggttttaataaaagtattagcgaattaaaacaaaaggttaagaaaatcaatattatgaatgaaaaaaatacgactttgaatatcgttcctcctttacatttcatggtcactgatgaaacaggacataccgtagccatagaacctcacaatggcttattaatagttaaagataattatgttcataccttaacaaatgaacctaaattagattggcatctatctaacttaagaaattacgcttttttaacgccacagaaatcaaccaatcaattaataggtaaagtgctagtaagatcaatgggctgtgaagcaggaacaaatggcttaccgggtggttatacgtcaacagatcgttttatacgcgctacatatttaagacaccaactacgctgttcccataatgaagatgaaaatttaatgaattgttttaaagttctagaatcagtcagtatccctcaaggtgcagttatcgatgccaataaaatacattacacacaatatcaattagtgatggaaagtaaagaaagaagttattatattaagccttactttagcaatcaaattttcaaaataaaattaactgaagaccttttaagtaagaatgagatgacattcttacctattaatcacgaattaaagataacatcaatacaatag

SEQ ID NO: 414 - protein, 329 aa, Artificial Sequence
  Description of Artificial Sequence: synthetic amino acid sequence
VLYMCTAISLYTKQRYHYLARTMDFAFEFNGIPTIVPRHYHYQFDLDSDMRLEYGFVGTNLKVGRYRFGDGINEKGLAISNHYFTGEASYSTHKRYGYFNLAPEEFIVWVLGFNKSISELKQKVKKINIMNEKNTTLNIVPPLHFMVTDETGHTVAIEPHNGLLIVKDNYVHTLTNEPKLDWHLSNLRNYAFLTPQKSTNQLIGKVLVRSMGCEAGTNGLPGGYTSTDRFIRATYLRHQLRCSHNEDENLMNCFKVLESVSIPQGAVIDANKIHYTQYQLVMESKERSYYIKPYFSNQIFKIKLTEDLLSKNEMTFLPINHELKITSIQ

SEQ ID NO: 415 - DNA, 702 bp, Artificial Sequence
  Description of Artificial Sequence: synthetic nucleic acid sequence
atggataaagaaacatggtcccatgatgtaacacctattgatatgaatgttttcgaaaaacaacttgaaactgcaatatcaattggacctgatgctattaaaacaggaatgttagggacacaagacattattaaacgtgccggagatgtttttgttgaatctggtgcagactattttgtagttgatccagtaatggtttgtaaaggagaagacgaagtacttaacccaggaaacacagaagcaatgattcaatatttactacctaaagctacagttgttaccccgaatttattcgaagcaggtcaactctctggtttaggaaaattaacatcaattgaggatatgaaaaaagctgctcaagtgatttatgacaaaggcacacctcatgtcattattaaaggtggtaaagcactcgatcaagataaatcttatgacttgtactatgatggccaacaattttatcaattaactactgacatgttccaacaaagttataatcatggtgcaggatgcacatttgctgctgccacaacagcttatcttgcgaacggtaaatctccaaaagaagcaatcattgctgctaaagcatttgtagcttcagcaatcaaaaatggttggaaaatgaatgactttgtaggacctgttgatcatggtgcatataaccgtattgaacagattaacgttgaagtcactgaggtttaa

SEQ ID NO: 416 - protein, 233 aa, Artificial Sequence
  Description of Artificial Sequence: synthetic amino acid sequence
MDKETWSHDVTPIDMNVFEKQLETAISIGPDAIKTGMLGTQDIIKRAGDVFVESGADYFVVDPVMVCKGEDEVLNPGNTEAMIQYLLPKATVVTPNLFEAGQLSGLGKLTSIEDMKKAAQVIYDKGTPHVIIKGGKALDQDKSYDLYYDGQQFYQLTTDMFQQSYNHGAGCTFAAATTAYLANGKSPKEAIIAAKAFVASAIKNGWKMNDFVGPVDHGAYNRIEQINVEVTEV

SEQ ID NO: 417 - DNA, 1122 bp, Artificial Sequence
  Description of Artificial Sequence: synthetic nucleic acid sequence
atgctcattcaaaatgatgttgattttgcattagaacgtcttgtaactgtgttagtcattgcttgtccacatgctttaggcttggcaatacctttagtcactgcacgttctacttcaattggtgcacataatggtttaattattaaaaatagagagtctgtagaaatagctcaacatatcgattatgtaatgatggataaaactggtactttaactgagggtaacttttctgtgaatcattatgagagctttaaaaatgatttgagtaatgatacaatattaagccttttcgcctcattagaaagtcaatctaatcacccattagctataagtattgttgattttgcgaaaagtaaaaatgtttcatttactaatccacaagacgttaataatattccaggtgtcggattagaaggtctaattgataataaaacatataaaataacaaatgtctcttatcttgataaacataaacttaattatgacgatgacttgtttactaaattagctcaacaaggtaattcaatcagttatttaattgaggatcaacaagtcattggcatgattgctcaaggagatcaaattaaagaaagctcaaaacaaatgatagctgatttactatcaagaaatattacaccagtcatgcttacaggtgacaataatgaagtggcacacgctgtcgcaaaagaattaggtattagtgatgttcacgcacaactcatgccagaagataaggaaagcattataaaagattatcaaagtgacggtaataaagtcatgatggtcggagacggtatcaacgatgcgccgagtcttataagagccgatattggtatagcaattggtgcaggcacagatgttgcagtggattcaggtgatatcatacttgttaaaagtaatccatcagatatcattcatttcttgactctttcaaataatactatgagaaaaatggtgcaaaacttatggtggggtgcaggttataatattgttgctgtacctttagcagctggcgcattagcttttatcgggttaatattatcaccagctgtaggagcaatattaatgtctttaagtacagttatagtagcgattaatgcttttacattaaaattaaaataa

SEQ ID NO: 418 - protein, 373 aa, Artificial Sequence
  Description of Artificial Sequence: synthetic amino acid sequence
MLIQNDVDFALERLVTVLVIACPHALGLAIPLVTARSTSIGAHNGLIIKNRESVEIAQHIDYVMMDKTGTLTEGNFSVNHYESFKNDLSNDTILSLFASLESQSNHPLAISIVDFAKSKNVSFTNPQDVNNIPGVGLEGLIDNKTYKITNVSYLDKHKLNYDDDLFTKLAQQGNSISYLIEDQQVIGMIAQGDQIKESSKQMIADLLSRNITPVMLTGDNNEVAHAVAKELGISDVHAQLMPEDKESIIKDYQSDGNKVMMVGDGINDAPSLIRADIGIAIGAGTDVAVDSGDIILVKSNPSDIIHFLTLSNNTMRKMVQNLWWGAGYNIVAVPLAAGALAFIGLILSPAVGAILMSLSTVIVAINAFTLKLK

SEQ ID NO: 419 - DNA, 2301 bp, Artificial Sequence
  Description of Artificial Sequence: synthetic nucleic acid sequence
atgatacctgtgcattttatgaaggtggatcgtatacctatcacgatgaatgggaaattagatgtgcgtgcattacctgaaattaatctaaagaataatagaaattatgtagaaccacgtaacgatattgaacgcacagtttgccgtattttcgaagagattttacatgttgatcaggtaggtgttaaagataatttctttgaactaggtggacactctcttagagcaacattagttgtaaaccgtattgaagaaaggttaaaaaaacgtcttaaagtaggtgatttaatgaaatcgcctactgtagagcaacttggacaacaaattgaagaactgcaaaatgatgtctatgaagtgattcccaaagcaaatgaatcgtatcaatatgatttaagtgcgtctcaaaaaagtatgtatcttttatggaaggtcaatcctaaagacacagtgtataacattccattcttatggagattatcttctgaacttaatgttatgcaattgcaacgtgcattatctaagttgattgaacgtcatgaaatattacgaacacaatatgtaattgatgacaatgaagttaaacaacgtattgcgacacatgtttcgcctgattttgaagaggtaacgacatctctaacgaacgagcaagatattattcaatcatttatggaaccgtttgatttagaacaaccaagtcagatgcgagttaaatatatacatggaccacaacaagattatttatttatggatactcatcatagtattaatgatggtatgagtaacacgattttactatctgatttgaacgctttataccaagataaatcattacctgaacttaagcttcagtataaagattatagtgagtggatggtgcacagagacttatctaaacaacgtcacttttggttacagcaatttgaaaatcaggttccaatattaaatatgcctacggattatcctagaccaagtattaaaacaaccaacggtaatatgttgacgtttcattacaatcgtcaaatcaaacagcaattgaaatcttatgtagaacaacatcaagtgacagactttatgttctttgctagtgcaatcatggtattattgcacaaatatacacgtcaggacgatatcgctattggtagtgtaatcagtgcgcgtactcatcgcgatactgaaaatatgttaggtatgtttgctaatacacttgtatatcgtggtcgaccacatgatcaaaagacatgggatcaattgatggctgagatgaaagagatgtgtctaggggcatatgaacatcaagaatatccttttgaaagcttagtcaatgatcttgttgatgaaagagatgcttcacataatccgttatttgatgtgatgctcgtacttcaaaataatgaaacaaatcatgcgaattttggacatagtcaattgacacatattccacctcagtcaacaacagctaaatttgatttgtcatttattattgaagaagatcaagatgactatgtcgtcaatattgaatataatacagatttatataaacaagagaccattcatcatattgctgaacaacttcaaatgattattaaacatgtaatatctaccgaaaacctaaaaattcaagatattgatgaaaatgatgacttattaatttggttggacaagcatgtgaatgattgttctttagacttgccaaaaaataagtcaatacagcaacttttacatgatgtcatgaaagcgaaagcagatgatgtagcacttaaaatgaatggacaatcgatgacgtatcaagaacttgatgattattctaatagtatggctcaaacattgatacaaaatggcattcaaaaaggggaacgtgtagcccttttaactgaacgaagttttgaaatggttgctagtatgattgctgtattaaaagttggaggttcttatgtacctattgacgtcacttatcccgataaacgcattgaatttattattgaagacgctgaagtcgcagcagtgctcacatatggaaaagcaatatcctcacatataccagtaattaaaattgaagatattgataacactgaaaataataaaaggttaaatatagaatatgcagggaatttggaagatgatatgtatcatatttatacatctggaacaacaggaaagcctaaagcagtatcagtgaaacaacgtaatatattaaatttagtatgtgcttggacaaaaagactcaatttatccgatgatgaagtctatctgcagtacgctaattatgtgttcgatgcttcggcaactgatttctactgttag

SEQ ID NO: 420 - protein, 766 aa, Artificial Sequence
  Description of Artificial Sequence: synthetic amino acid sequence
MIPVHFMKVDRIPITMNGKLDVRALPEINLKNNRNYVEPRNDIERTVCRIFEEILHVDQVGVKDNFFELGGHSLRATLVVNRIEERLKKRLKVGDLMKSPTVEQLGQQIEELQNDVYEVIPKANESYQYDLSASQKSMYLLWKVNPKDTVYNIPFLWRLSSELNVMQLQRALSKLIERHEILRTQYVIDDNEVKQRIATHVSPDFEEVTTSLTNEQDIIQSFMEPFDLEQPSQMRVKYIHGPQQDYLFMDTHHSINDGMSNTILLSDLNALYQDKSLPELKLQYKDYSEWMVHRDLSKQRHFWLQQFENQVPILNMPTDYPRPSIKTTNGNMLTFHYNRQIKQQLKSYVEQHQVTDFMFFASAIMVLLHKYTRQDDIAIGSVISARTHRDTENMLGMFANTLVYRGRPHDQKTWDQLMAEMKEMCLGAYEHQEYPFESLVNDLVDERDASHNPLFDVMLVLQNNETNHANFGHSQLTHIPPQSTTAKFDLSFIIEEDQDDYVVNIEYNTDLYKQETIHHIAEQLQMIIKHVISTENLKIQDIDENDDLLIWLDKHVNDCSLDLPKNKSIQQLLHDVMKAKADDVALKMNGQSMTYQELDDYSNSMAQTLIQNGIQKGERVALLTERSFEMVASMIAVLKVGGSYVPIDVTYPDKRIEFIIEDAEVAAVLTYGKAISSHIPVIKIEDIDNTENNKRLNIEYAGNLEDDMYHIYTSGTTGKPKAVSVKQRNILNLVCAWTKRLNLSDDEVYLQYANYVFDASATDFYC

SEQ ID NO: 421 - DNA, 315 bp, Artificial Sequence
  Description of Artificial Sequence: synthetic nucleic acid sequence
gtgcaacaaaatttagggaaaatggaaagtttattactttctgcaagacattttctatggagtacagctagagggtatcaatcatatacagaggatgcacaaatatggaatgaaacctcagcaagtaaagtggtggtaatgaaccaaggtatagaaatcgttgatttagctatgagaatagttggagctaagagtctagaaatgagcagacctcttcaacggtactatagagatatacgtgctggattacataatccaccaatggaagatatggcttacactaatattgctaaaagtattacaaacaaactttaa

SEQ ID NO: 422 - protein, 104 aa, Artificial Sequence
  Description of Artificial Sequence: synthetic amino acid sequence
VQQNLGKMESLLLSARHFLWSTARGYQSYTEDAQIWNETSASKVVVMNQGIEIVDLAMRIVGAKSLEMSRPLQRYYRDIRAGLHNPPMEDMAYTNIAKSITNKL

SEQ ID NO: 423 - DNA, 360 bp, Artificial Sequence
  Description of Artificial Sequence: synthetic nucleic acid sequence
atgtcttgtgtccctaacattcctgttttaatagcatcaggtccaattgatattgcagtttcaagttgtttttcgaaaacattcatatcaataggtgttacatcatgggaccatgtttctttatccattgttacaatagatgttaaagcgaccattccatatacatcaagttcttggaacgttttaagatctgcttgcataccggcaccagcacttgtatctgaaccagctatcgttaatactttttttaaagccatcattcattcactcccattaatttctagtgtctttatcatatcatgtttatcgcgtacgctaaattattataattttaaaatgcaaatcaatcatcatacttag

SEQ ID NO: 424 - protein, 119 aa, Artificial Sequence
  Description of Artificial Sequence: synthetic amino acid sequence
MSCVPNIPVLIASGPIDIAVSSCFSKTFISIGVTSWDHVSLSIVTIDVKATIPYTSSSWNVLRSACIPAPALVSEPAIVNTFFKAIIHSLPLISSVFIISCLSRTLNYYNFKMQINHHT

SEQ ID NO: 425 - DNA, 651 bp, Artificial Sequence
  Description of Artificial Sequence: synthetic nucleic acid sequence
atgaaatggtcagaggtatttcatgatataacaacgcgccatgattttcaggcgatgcatgactttttagaaaaagaatatacgactcaaaccgtctatccagatatacaaaatatctatcaagcatttgatttaacgccgtttgaagatatcaaggttgttattttagggcaagatccttatcacggtcctaatcaagcacatggtttagcattttcagtgcaacctcatgctaaatttccaccatctttaagaaatatgtatcaagaactagaaaatgatatagggtgtcatagaacttcgcctcatttacaagactgggcaagagaaggtgtcttgttattaaatacggtattgactgttcgacaaggtgaagcacattcacatcgaaatattggatgggaaacattcacggatgaaatcatacaagctgtttctaattatcgtgagcatgttgtttttattctgtggggaagaccggctcaacaaaaggaacgattcattgatacatctaaacacttaatcattaaatcgccacatcctagtccactatcggcttttagaggattttttggttctaaaccttattcaactacaaataactatttaaaatctaaagggaaaacaccagttcagtggtgtgaaagttag

SEQ ID NO: 426 - protein, 216 aa, Artificial Sequence
  Description of Artificial Sequence: synthetic amino acid sequence
MKWSEVFHDITTRHDFQAMHDFLEKEYTTQTVYPDIQNIYQAFDLTPFEDIKVVILGQDPYHGPNQAHGLAFSVQPHAKFPPSLRNMYQELENDIGCHRTSPHLQDWAREGVLLLNTVLTVRQGEAHSHRNIGWETFTDEIIQAVSNYREHVVFILWGRPAQQKERFIDTSKHLIIKSPHPSPLSAFRGFFGSKPYSTTNNYLKSKGKTPVQWCES

SEQ ID NO: 427 - DNA, 369 bp, Artificial Sequence
  Description of Artificial Sequence: synthetic nucleic acid sequence
gtgagaataatgaacaaagaacagattctacaattgattgagcaagaattgatacaagcagatgaagctcagacagatacggaatttgaaaagcatatgtatgctatacacatgctcacatctcttgttagttctcatcaaagtcgttctacaatagagaaattaaatcattctaaaccaatgaatagtaatatcaaagatgattatgagatgaaacaacagtcttcacaaaaacatcatgtaactgcagctgaaatagaagcaatgggtggtaaagtaccacaatcaatgaaaaagcatcatacttctaataatatgatgattacagatgatcaagttggtaatggtgaatctatttttgatttttaa

SEQ ID NO: 428 - protein, 122 aa, Artificial Sequence
  Description of Artificial Sequence: synthetic amino acid sequence
VRIMNKEQILQLIEQELIQADEAQTDTEFEKHMYAIHMLTSLVSSHQSRSTIEKLNHSKPMNSNIKDDYEMKQQSSQKHHVTAAEIEAMGGKVPQSMKKHHTSNNMMITDDQVGNGESIFDF

SEQ ID NO: 429 - DNA, 372 bp, Artificial Sequence
  Description of Artificial Sequence: synthetic nucleic acid sequence
atgatgaaagtttttattattttaggtgcattaaatgcaatgatggctgtcggtactggcgcatttggagcacatgggttggaagataaattatcagataaatacatgtcaatatgggaaaaagcaacaacttatcaaatgtatcatggattaggtctgttagttataggtttaataagtggtacaacatcaattaatgtaaattgggctggttggttattattctttggtattgtctttttcagtggttccttgtatttcttagccttaacacaagttcgtattttaggtgcaattacgccaataggtggtgttctatttataattggttggcttgttcttgtgattgctacacttaaattcgctgggtaa

SEQ ID NO: 430 - protein, 123 aa, Artificial Sequence
  Description of Artificial Sequence: synthetic amino acid sequence
MMKVFIILGALNAMMAVGTGAFGAHGLEDKLSDKYMSIWEKATTYQMYHGLGLLVIGLISGTTSINVNWAGWLLFFGIVFFSGSLYFLALTQVRILGAITPIGGVLFIIGWLVLVIATLKFAG

SEQ ID NO: 431 - DNA, 405 bp, Artificial Sequence
  Description of Artificial Sequence: synthetic nucleic acid sequence
atgtttgtgagaagccattgcctcgaagttacgaatttgagaaaatggttctattactttaataggaggaataaaagaatgcaatggcttaaagttatattagccggttttattgaaatcatctgggtcactggacttgatcaagcgcactcattgtttacatggatatttaccctcttttttattgctttaagcttttttctagtcattgatgcttcgaagcacttaccagttggtacggtatatgcattttttgtcggaatcggtgctgttggtacagtgttagttgatatgattttcttcaaccaaccatttactttcactaaaatctttttaataatgacccttattttaggaataataggattaaaactgacaactgatgcaacgaaagaagggagataa

SEQ ID NO: 432 - protein, 134 aa, Artificial Sequence
  Description of Artificial Sequence: synthetic amino acid sequence
MFVRSHCLEVTNLRKWFYYFNRRNKRMQWLKVILAGFIEIIWVTGLDQAHSLFTWIFTLFFIALSFFLVIDASKHLPVGTVYAFFVGIGAVGTVLVDMIFFNQPFTFTKIFLIMTLILGIIGLKLTTDATKEGR

SEQ ID NO: 433 - DNA, 318 bp, Artificial Sequence
  Description of Artificial Sequence: synthetic nucleic acid sequence
atggcttggttatttctaatgatagccggaagttttgaaattttgggcgttgttctattaaatgaactatcacgtacaaagaataaaatttatgtcatttttttaggattagcatttatattaagttttagtacattaaaatttgcaatggtatctattcctatgggtactgcatacgctatatggacaggaattggtacagctggtggtacattaattggaatgattttttatagagaatctacacgtttaagtagaattttatgtattttattaatcatcatttcagttgttggattacgtttaataagttattaa

SEQ ID NO: 434 - protein, 105 aa, Artificial Sequence
  Description of Artificial Sequence: synthetic amino acid sequence
MAWLFLMIAGSFEILGVVLLNELSRTKNKIYVIFLGLAFILSFSTLKFAMVSIPMGTAYAIWTGIGTAGGTLIGMIFYRESTRLSRILCILLIIISVVGLRLISY

SEQ ID NO: 435 - DNA, 918 bp, Artificial Sequence
  Description of Artificial Sequence: synthetic nucleic acid sequence
gtgggacttaacttattgaaagaacattttgaggtagacatgtatgatggcgaggggcttattgataaagaaaccttaaaaaaaggggtagaacatgcagatgcattaattagtttactatcaacttctgttgataaagatattattgatagtgctaataaccttaaaattatagcgaattatggtgcaggttttaataatattgatgtcgaatatgcaagacaacaaaatatagatgttacaaatacaccacacgcttcgacaaatgctactgctgatttaacaatcggtttaattttatcagtagcgcgtagaattgtagaaggagatcatttatccagaacaacaggttttgatggttgggcacccttattcttccgaggcagagaggtatcaggaaaaactattggtattataggcttaggtgaaattggaggtgcagtagctaaacgcgcacgcgcatttgatatggatgttctgtacactggtcctcatcgtaaggaagaaaaagaacgagatatcggtgcgaaatatgtagatttagatactttacttaaaaatgcagattttattacaatcaatgcggcatataatccatcactgcatcatatgattgatactgaacaatttaataaaatgaaatctactgcctatttaattaatgcaggacgtggtccaatagtaaatgaacaatctttagttgaagcccttgataataaagctattgaaggtgctgcattggatgtatatgaatttgagccagaaatcactgatgcattaaaatcatttaaaaacgttgtgcttacacctcacattggtaatgcaacatttgaagctagagatatgatggctaaaattgttgcgaatgatacaataaaaaaattaaatggtgatgaacctcagtttattgtcaattaa

SEQ ID NO: 436 - protein, 305 aa, Artificial Sequence
  Description of Artificial Sequence: synthetic amino acid sequence
VGLNLLKEHFEVDMYDGEGLIDKETLKKGVEHADALISLLSTSVDKDIIDSANNLKIIANYGAGFNNIDVEYARQQNIDVTNTPHASTNATADLTIGLILSVARRIVEGDHLSRTTGFDGWAPLFFRGREVSGKTIGIIGLGEIGGAVAKRARAFDMDVLYTGPHRKEEKERDIGAKYVDLDTLLKNADFITINAAYNPSLHHMIDTEQFNKMKSTAYLINAGRGPIVNEQSLVEALDNKAIEGAALDVYEFEPEITDALKSFKNVVLTPHIGNATFEARDMMAKIVANDTIKKLNGDEPQFIVN

SEQ ID NO: 437 - DNA, 405 bp, Artificial Sequence
  Description of Artificial Sequence: synthetic nucleic acid sequence
atgggggctaatcactttgttaaaggtgaaaaaacacacgtagatggtgatgctgccatggactttattagaagtcgtaaagaagatggggcaggaggcgattttggtagacaagagcgtcagcaacttatcttagaagcgatggcagataagatgacaagcgcttcttcaatcactcattttaatacattaatgaatcaaattcagaaaaatgttaaaacagatttaaaattaggtgatcttaatacaattagaactaagtataaagatgctaatgaccaagttaatcgacatcagttagagggtgaaggtggtatacaaaatgacggtttgtactatttcataccaagtgatgcatctaaaaatgaaaatacacaattactaagagacaatttaaatttataa

SEQ ID NO: 438 - protein, 134 aa, Artificial Sequence
  Description of Artificial Sequence: synthetic amino acid sequence
MGANHFVKGEKTHVDGDAAMDFIRSRKEDGAGGDFGRQERQQLILEAMADKMTSASSITHFNTLMNQIQKNVKTDLKLGDLNTIRTKYKDANDQVNRHQLEGEGGIQNDGLYYFIPSDASKNENTQLLRDNLNL

SEQ ID NO: 439 - DNA, 777 bp, Artificial Sequence
  Description of Artificial Sequence: synthetic nucleic acid sequence
atgttaaagaatactcggcttcgaatgacgacattgttcataattagcatactcgtcattttagcaatactttttcttatatttgatacaaacctttttaaaaatgatgttaaacatacatttaaagaagcggtgtctcttcaaacaagtgagggaaatatccatactaaagaagttaatggtaagtttatatatgcttccaaacaagatatagagaaagctatgcaaataaaacatagtgataatgatttgaagtacatggatatatcagaaaaagtacctatgtcagagaaggaagttaaccatatcttaaaaggaaaaggtattttagaaaataagggatcaacgtttattaaagcccaagataaatatgaagtgaatatcctatatctcatcagtcatgcactagttgagacaggaaatggtcaatcagatttatcaaaaggaattaaagaaggtaaccatcactattataacttttttggtattggtgcttttgatgaagatgctgtaaagactggtaagagttttgctaaacagaagaagtggaccactcctgaaaaagcgataatgggtggcgcgtggtttgtgagataccattactttaaaaataatcaattgagcttatatcaaatgcggtggaacccacaaaatccaggccaacatcaatatgctagtgatattcagtgggccaataatatagctgatttaatggagaaatactatgataaatatggaataaaaaaagatcatataagaaaaaaatattacaaataa

SEQ ID NO: 440 - protein, 258 aa, Artificial Sequence
  Description of Artificial Sequence: synthetic amino acid sequence
MLKNTRLRMTTLFIISILVILAILFLIFDTNLFKNDVKHTFKEAVSLQTSEGNIHTKEVNGKFIYASKQDIEKAMQIKHSDNDLKYMDISEKVPMSEKEVNHILKGKGILENKGSTFIKAQDKYEVNILYLISHALVETGNGQSDLSKGIKEGNHHYYNFFGIGAFDEDAVKTGKSFAKQKKWTTPEKAIMGGAWFVRYHYFKNNQLSLYQMRWNPQNPGQHQYASDIQWANNIADLMEKYYDKYGIKKDHIRKKYYK

SEQ ID NO: 441 - DNA, 1125 bp, Artificial Sequence
  Description of Artificial Sequence: synthetic nucleic acid sequence
atgaaaatagcaatagtaggcgcaggtataggtggtttaactgctgctgcgttattagaagaacaaggtcatcaagttaaagtgtttgaaaaaaatacttctataaacgaattaagcgctggtattgggataggagataatgttttaaaaaaattagggcatcatgaccttgctaaaggcattaaaaatgctggtcaaaatcttaccgcaatgaatatttatgatgagcaaggcaccccattaatgagcgctaaattgaagtctcattccctaaatgtcgcattatctagacaaactttaattgagatcatacagtcatatgtcgaagaatcatctattcacacaggatttaaagttactaaaattgaacaaacgagttgtaaggttaccctacattttaccaaacaggaaagtgaatcgtttgatttgtgtattggtgctgatgggttacattctgtagtaagagagtctgtaggtgcacgaactaaaattcgttacaatggttacacatgttttagaggcatggttgaagatgtacaatttaatgaccaacatgttgcgaatgaatattggggtgttaaaggacgagtaggtatagtcccattaattaatcaacgtgcttattggtttattactgttcatgctaaagaaggagatccaaaatatcaatcttttggaaaaccccatcttcaagcatattttaatcactttccaaatgaagtgagaaatgtgttagaaagacaaagtgaaacaggtatattacttcatgacatatatgatttaaaaccactgaagacattcgtttatggacgtactattttaatgggcgatgctgcgcatgccactacgcctaatatgggacaaggtgctagtcaagctatggaagatgcaattgtattagtgaattgtttagaaaaatatgattttaataaagcgattgagcgttatgataaacttagagttaaacataccacaaaagtgattaggcgttcgaaaaagataggtaaaatggctcaaaagcatcataaattaactgttaaacttagaaataccgcgatgaaattaataccaaatgctttggcatcagctcaaacaaaatttttatacaaatccaaagaaaagtaa

SEQ ID NO: 442 - protein, 374 aa, Artificial Sequence
  Description of Artificial Sequence: synthetic amino acid sequence
MKIAIVGAGIGGLTAAALLEEQGHQVKVFEKNTSINELSAGIGIGDNVLKKLGHHDLAKGIKNAGQNLTAMNIYDEQGTPLMSAKLKSHSLNVALSRQTLIEIIQSYVEESSIHTGFKVTKIEQTSCKVTLHFTKQESESFDLCIGADGLHSVVRESVGARTKIRYNGYTCFRGMVEDVQFNDQHVANEYWGVKGRVGIVPLINQRAYWFITVHAKEGDPKYQSFGKPHLQAYFNHFPNEVRNVLERQSETGILLHDIYDLKPLKTFVYGRTILMGDAAHATTPNMGQGASQAMEDAIVLVNCLEKYDFNKAIERYDKLRVKHTTKVIRRSKKIGKMAQKHHKLTVKLRNTAMKLIPNALASAQTKFLYKSKEK

SEQ ID NO: 443 - DNA, 1014 bp, Artificial Sequence
  Description of Artificial Sequence: synthetic nucleic acid sequence
atgctctcaagagcaccatttggatttaaaggcaatcatatacctgctttaattggctgggtaggtcaagttggttggttatctgttaatgtttctacaggaactttaactcttctggctttattcaatacttttggttttaagactagtacatttctaattttgatgagtttagcgatttttgctgggctagttattatatctgttcttttttcacaaaaagtacttgtatcagtacaaacatttttcacatatgtatttggtgcattaaccttattagttataacaattttaattactaatactgattggaacgcccttttttctatgaaatctgggtcttggcttaaaggttttctacctgcattagcctttgtaatagtagggactggattgagttggactaacgcagctgcagattatagccgttttcaaaaaaaatcgaacagttctttatcaataatcactagtgttacagctggcgcgtttatccctttatttctcattataagtactggaattttattagctacttcagagccacaattagcaaatgcagaaaatccaatattattaattagcgaagtactaccaaattggatgacagtaatttacttaatatctgctttaggtggccttactcctatgtgttttttaggtttaaagtcctcaagattaattatgagtacttttgatttgaaagtaaaaaattctacagttattattattcattcaattattattattgccattcctatttatgtcttagtagtttccagaaattttctcgctttttttgaaatgtttttaggagttttgggtattggattagctgcttggtctgcaattttcattgttgattatgcaacattgagaaaaaatataggctatgaaaaaaaattggtttgcgatccccagtataatagtctgaatattaaaacagtaatggtctggagtatagcagtaatagtaggtgcattaataaacatttttattcttcaagttttgatataa

SEQ ID NO: 444 - protein, 337 aa, Artificial Sequence
  Description of Artificial Sequence: synthetic amino acid sequence
MLSRAPFGFKGNHIPALIGWVGQVGWLSVNVSTGTLTLLALFNTFGFKTSTFLILMSLAIFAGLVIISVLFSQKVLVSVQTFFTYVFGALTLLVITILITNTDWNALFSMKSGSWLKGFLPALAFVIVGTGLSWTNAAADYSRFQKKSNSSLSIITSVTAGAFIPLFLIISTGILLATSEPQLANAENPILLISEVLPNWMTVIYLISALGGLTPMCFLGLKSSRLIMSTFDLKVKNSTVIIIHSIIIIAIPIYVLVVSRNFLAFFEMFLGVLGIGLAAWSAIFIVDYATLRKNIGYEKKLVCDPQYNSLNIKTVMVWSIAVIVGALINIFILQVLI

SEQ ID NO: 445 - DNA, 306 bp, Artificial Sequence
  Description of Artificial Sequence: synthetic nucleic acid sequence
gtgatcggcagtgctgttattgatgtgattttaaatgttaatagtataccaagtagtggatcagacgaatttgcccactctgagaagacaatagtaggtggttgcgcatataatgtaggcgatatacttagtcagttcaaagctaattatgatttgatggtgcccgttggcgatggtcttaatggaacaattattgaaaataagttaaaaaaagaaggcaaaacttcattattaaataatatattaggtgataatggttggacgttatgtactgagagatcccctcataatttccccaaagcgtaa

SEQ ID NO: 446 - protein, 101 aa, Artificial Sequence
  Description of Artificial Sequence: synthetic amino acid sequence
VIGSAVIDVILNVNSIPSSGSDEFAHSEKTIVGGCAYNVGDILSQFKANYDLMVPVGDGLNGTIIENKLKKEGKTSLLNNILGDNGWTLCTERSPHNFPKA

SEQ ID NO: 447 - DNA, 564 bp, Artificial Sequence
  Description of Artificial Sequence: synthetic nucleic acid sequence
atgacttggaaaaagaattggtttaaagaaattgatcttaataagtatgattatatttatgtgtcaggttattcttttgaacctccttcagacgaagttttattagaagaatttagtcgtttaaacgagaaaactacaattatttttgacccctcaccaaggattaataaaatgaactgtgagagtataaggaagttgcttgaaataaacacaatagtacatgccaacgaaggtgaaatattacaattgagtagtgagaatcatgtgaaagatgcggcattagaagtaagtaaacagactaatcaacctgtgatagttacattaggcaacaaaggtactcttatagcaaataagtgtaaagttaagattttagagggggaaaaggttcctgtaactgatactataggcgctggtgattcacacacagcagcttttatagcaggtttgctagataaccaaagtattgaaaaagcttgtatatggggaaacgaagtagcatctaaaattgtgcaagaacgaggtggaaatacggatatattcaatcctatagataaagaatattaa

SEQ ID NO: 448 - protein, 187 aa, Artificial Sequence
  Description of Artificial Sequence: synthetic amino acid sequence
MTWKKNWFKEIDLNKYDYIYVSGYSFEPPSDEVLLEEFSRLNEKTTIIFDPSPRINKMNCESIRKLLEINTIVHANEGEILQLSSENHVKDAALEVSKQTNQPVIVTLGNKGTLIANKCKVKILEGEKVPVTDTIGAGDSHTAAFIAGLLDNQSIEKACIWGNEVASKIVQERGGNTDIFNPIDKEY

SEQ ID NO: 449 - DNA, 652 bp, Artificial Sequence
  Description of Artificial Sequence: synthetic nucleic acid sequence
atgtctttaagagatgacgctttagaaatgcatagagagaaccaaggtaaactagaaattacaccaaatgttaaagtgacaaataagcaacaattaagcctagcatactcacctggcgttgcagaaccttgtaaagaaatccatgaagattcaagaaaagtatatgagtacactattaaaggaaatacagttgctgttgtaacagatggaactgctgttctcggtttagggaatattggagcagaagcaagtattccagtaatggaaggaaaggcagcactgttcaaaagttttgcgggtattaatggtgtgccaatagctctagatacaactgacactcaagaaatcataaaaacagtaaaacttattgcaccaaactatggtggaattaatcttgaagatatatcagctccccgctgttttgaaattgaagaaaccttaaagaaagagaccaatatacctatttttcatgacgatcaacatggtacagctattgttactatggctgggttaatcaatgctttaaaaattgtagataaagagttaacggatataaaagttgtattaaatggtgcaggtgcagcaggtatcgctatagtgaagttacttcatgcttatggtgtgaataatatgattattcacaccataagca

SEQ ID NO: 450 - protein, 218 aa, Artificial Sequence
  Description of Artificial Sequence: synthetic amino acid sequence
  MOD_RES (218): variable amino acid
MSLRDDALEMHRENQGKLEITPNVKVTNKQQLSLAYSPGVAEPCKEIHEDSRKVYEYTIKGNTVAVVTDGTAVLGLGNIGAEASIPVMEGKAALFKSFAGINGVPIALDTTDTQEIIKTVKLIAPNYGGINLEDISAPRCFEIEETLKKETNIPIFHDDQHGTAIVTMAGLINALKIVDKELTDIKVVLNGAGAAGIAIVKLLHAYGVNNMIIHTISX

SEQ ID NO: 451 - DNA, 342 bp, Artificial Sequence
  Description of Artificial Sequence: synthetic nucleic acid sequence
gtgtcagttgtatctagagctattggcacaccattaatacccgcaaaacttttgaacagtgctgcctttccttccattactggaatacttgcttctgctccaatattccctaaaccgagaacagcagttccatctgttacaacagcaactgtatttcctttaatagtgtactcatatacttttcttgaatcttcatggatttctttacaaggttctgcaacgccaggtgagtatgctaggcttaattgttgcttatttgtcactttaacatttggtgtaatttctagtttaccttggttctctctatgcatttctaaagcgtcatctcttaaagacatttaa

SEQ ID NO: 452 - protein, 113 aa, Artificial Sequence
  Description of Artificial Sequence: synthetic amino acid sequence
VSVVSRAIGTPLIPAKLLNSAAFPSITGILASAPIFPKPRTAVPSVTTATVFPLIVYSYTFLESSWISLQGSATPGEYARLNCCLFVTLTFGVISSLPWFSLCISKASSLKDI

SEQ ID NO: 453 - DNA, 333 bp, Artificial Sequence
  Description of Artificial Sequence: synthetic nucleic acid sequence
gtgtcagtttcttataaaattgctaaaaatctattggatcacatgtacaaaaatgaggatagatttctagcattacatagaaactacgaaaaggaaaaactattatttcttactttacctattattggactcataactataataggaagttcatttctcttcgattatttaatatttaaactgaataatacgtctgtagaaatattagggtccattcctactgttatatatcaaattattatttgttttattcagtttatgttcacggctatgtttttaataatatttatttataccatttggttttttatatatggaaagtttacaaaataa

SEQ ID NO: 454 - protein, 110 aa, Artificial Sequence
  Description of Artificial Sequence: synthetic amino acid sequence
VSVSYKIAKNLLDHMYKNEDRFLALHRNYEKEKLLFLTLPIIGLITIIGSSFLFDYLIFKLNNTSVEILGSIPTVIYQIIICFIQFMFTAMFLIIFIYTIWFFIYGKFTK

SEQ ID NO: 455 - DNA, 1569 bp, Artificial Sequence
  Description of Artificial Sequence: synthetic nucleic acid sequence
atggttgacggtgtcgtactagtggttgacgcatatgaaggtacaatgcctcaaactcgttttgttcttaaaaaagctttagaacaaaacttaaaaccggttgtagttgtgaataaaattgataaaccagctgctagacctgagggagttgtagatgaagtattagacttattcattgaattggaagcgaatgatgagcaattagacttcccagttgtttatgcttcagctgtgaatggaacagcaagtttagactctgaaaagcaagacgaaaatatgcaatccctatacgagacgattattgactatgttccggcaccagtagataattcagatgaaccattacaattccaaattgctttactagattataatgattatgtaggtcgtataggcgttggacgtgtgttcagaggtaaaatgcgtgtaggtgataatgtatcactaattaaattagatggtacagttaagaactttcgtgtgacgaaaatatttggttactttggtcttaaacgtgaagaaattgaagaagcacaagcaggagacttaatagctgtttcaggtatggaagatattaacgttggtgaaacagttacaccacatgatcatcgtgacccattaccggtgttacgtattgatgaaccaaccctagaaatgacttttaaagtaaataactctccgtttgctggacgtgaaggtgattatgtaacagctcgacaaattcaagaaagattagatcaacaacttgaaacagatgtttctttaaaagttacacctactgatcaaccagattcatgggttgttgctggtcgtggtgaactacacttgtctattcttattgaaaacatgagacgtgaaggctttgaattacaggtttctaaacctcaagttattttaagagaaatcgatggtgtgttaagtgaaccatttgagcgtgtacaatgtgaagtgccttctgaaaatgccggggcagtgattgagtcattaggtgcacgaaaaggtgaaatgttagatatgatgacgaccgacaatggtttgacgcgtttaatctttatggtacctgcacgcggtatgattggttatactactgaatttatgtctatgacacgaggttatggaattattaaccatacatttgaagaatttagacctcgcgttaaagctcaaatcggtggtagacgtaacggtgcattgatttctatggaccaaggtcaagcaacatcttatgcgattattaacttagaagatcgtggtgttaactttatggaaccaggtactgaagtatatgaaggtatgattgttggtgaacataaccgtgagaacgatttaacagtaaatattactaaagcaaagcatcaaacaaacgtacgttcagctactaaagatcaaacacaaacgatgaatcgtcctagaattttaacattagaagaagcgttacaatttatcaatgatgatgaattggtggaagtaactcctgaaagtattcgcttaagaaagaaaatacttaataaatctgcccgtgaaaaagaagcaaaaagagttaaacaattaatgcaagacgaacaataa

SEQ ID NO: 456 - protein, 522 aa, Artificial Sequence
  Description of Artificial Sequence: synthetic amino acid sequence
MVDGVVLVVDAYEGTMPQTRFVLKKALEQNLKPVVVVNKIDKPAARPEGVVDEVLDLFIELEANDEQLDFPVVYASAVNGTASLDSEKQDENMQSLYETIIDYVPAPVDNSDEPLQFQIALLDYNDYVGRIGVGRVFRGKMRVGDNVSLIKLDGTVKNFRVTKIFGYFGLKREEIEEAQAGDLIAVSGMEDINVGETVTPHDHRDPLPVLRIDEPTLEMTFKVNNSPFAGREGDYVTARQIQERLDQQLETDVSLKVTPTDQPDSWVVAGRGELHLSILIENMRREGFELQVSKPQVILREIDGVLSEPFERVQCEVPSENAGAVIESLGARKGEMLDMMTTDNGLTRLIFMVPARGMIGYTTEFMSMTRGYGIINHTFEEFRPRVKAQIGGRRNGALISMDQGQATSYAIINLEDRGVNFMEPGTEVYEGMIVGEHNRENDLTVNITKAKHQTNVRSATKDQTQTMNRPRILTLEEALQFINDDELVEVTPESIRLRKKILNKSAREKEAKRVKQLMQDEQ

SEQ ID NO: 457 - DNA, 1014 bp, Artificial Sequence
  Description of Artificial Sequence: synthetic nucleic acid sequence
atggaacgattttgttgtgtaaatcaaattaactatattcaaatgaatccgttagaagccaaatttaaaacgagcgctctaagatcatggaaaactgatcaggcagatgctcataagcttgcttgtttaggaccgacgcttaaacaaacagacagcttacctatacatgagttaatattctttgaattaagagaacgcgtccgttttcatctagaaatcgagaatgaacaaaatcgacttaaatttcagatccttgaattactccatcaaacattccctggtttagaaagattgtttagtagtcgatattcaatcattgcactcaacatcgcagaaatctttactcattcagacatggttcttgatatcgacaaggaggtactgattacacatatattcaattctacagataagggaatgtcaatggataaagctacaaaatatgcacttcaattaagggtgattgctcaagaaagctatcctaatgtcgatagacattcctttctagtcgaaaaattacgcttacttattcaacaattaaaacaatctattcatcatctcaaacaattagatgatgccatgattcaattagcacaacaactcgattattttgaaaatattcattcgatacctggtattggtaagctaagcacagctatgattattggggagattggtgatattaagcgatttaaatcaaataaacaactcaatgcttttgttggcattgatatcaaacgatatcaatcaggtcatacacactgtagagataccatcaacaagcgtggtaataaaaaagcgagaaaacttttattttgggtgattatgaatataataagagggcagcatcattatgacaatcatgtcgtcgattattactacaaactaagaaagcagcctaatgagaaacctcataagactgccatcattgcttgtataaatcgattattaaaaacaattcattatcttgtaatgaatcataaattgtacgattatcaaatgtcaccacattag

SEQ ID NO: 458 - protein, 337 aa, Artificial Sequence
  Description of Artificial Sequence: synthetic amino acid sequence
MERFCCVNQINYIQMNPLEAKFKTSALRSWKTDQADAHKLACLGPTLKQTDSLPIHELIFFELRERVRFHLEIENEQNRLKFQILELLHQTFPGLERLFSSRYSIIALNIAEIFTHSDMVLDIDKEVLITHIFNSTDKGMSMDKATKYALQLRVIAQESYPNVDRHSFLVEKLRLLIQQLKQSIHHLKQLDDAMIQLAQQLDYFENIHSIPGIGKLSTAMIIGEIGDIKRFKSNKQLNAFVGIDIKRYQSGHTHCRDTINKRGNKKARKLLFWVIMNIIRGQHHYDNHVVDYYYKLRKQPNEKPHKTAIIACINRLLKTIHYLVMNHKLYDYQMSPH

SEQ ID NO: 459 - DNA, 1407 bp, Artificial Sequence
  Description of Artificial Sequence: synthetic nucleic acid sequence
atggtagttggagatttcccaattgaaacagatactattgtaataggagcaggtccaggtggatatgtcgcagccattcgcgcggctcaattaggacaaaaggtaacaatcgttgagaaaggtaatttaggtggtgtatgcttaaacgttggttgtataccttcaaaagcattactacatgcttctcatcgctttgttgaagcgcaaaattcagaaaacttaggggtaattgctgaaagcgtttcgttaaactatcaaaaagttcaagaattcaagacttctgtagttaataaattaactggcggtgttgaaggacttttaaaaggtaacaaagtagagattgttagaggtgaagcttatttcgttgataacaatagtttacgtgtcatggacgaaaagagtgctcaaacttacaatttcaaacatgcgattatagctacaggttcaagaccaattgaaattccaaattttgaatttggtaaacgtgttatcgattcaacaggagctttaaatctacaagaagtacctaacaaactagttgtagttggtggcggatatatcggttctgaattaggtactgcttttgcaaactttggctctgaagttactatccttgaaggtgcaaaagatattttaggcggatttgaaaagcaaatgacacaacctgttaaaaaaggtatgaaagaaaaaggtatcgaaatcgttactgaagcaatggcaaaatctgcagaagaaactgaaaatggtgtcaaagtaacttatgaggcaaaaggtgaggaacaaactatcgaagctgattatgtattagttacagttggccgtcgccctaatactgatgaattaggattagaagaacttggtctgaaatttgctgatcgtggattactagaagtggacaaacaaagtcgtacttctattgaaaatatctttgcgattggagatattgtacctggattaccattagctcacaaagctagttatgaaggtaaagttgctgctgaagcgatagatggtcaagccgcagaggtagactatattggtatgccagcagtttgctttacagaaccagaattagcacaagttggttatactgaagctcaagcaaaagaagaaggtttatcaattaaagcttctaaattcccttatgcagctaatggacgagctttatcattagatgatacaaatggttttgttaagttaattacacttaaagaagatgatacgcttattggagcacaagttgtaggtactggcgcatctgatattatctctgaattaggtttagctattgagtcaggtatgaatgctgaagatatcgcattaactgtacatgcacacccaactttaggtgaaatgacaatggaagctgctgaaaaagcaattggttatccaattcatactatgtaa

SEQ ID NO: 460 - protein, 468 aa, Artificial Sequence
  Description of Artificial Sequence: synthetic amino acid sequence
MVVGDFPIETDTIVIGAGPGGYVAAIRAAQLGQKVTIVEKGNLGGVCLNVGCIPSKALLHASHRFVEAQNSENLGVIAESVSLNYQKVQEFKTSVVNKLTGGVEGLLKGNKVEIVRGEAYFVDNNSLRVMDEKSAQTYNFKHAIIATGSRPIEIPNFEFGKRVIDSTGALNLQEVPNKLVVVGGGYIGSELGTAFANFGSEVTILEGAKDILGGFEKQMTQPVKKGMKEKGIEIVTEAMAKSAEETENGVKVTYEAKGEEQTIEADYVLVTVGRRPNTDELGLEELGLKFADRGLLEVDKQSRTSIENIFAIGDIVPGLPLAHKASYEGKVAAEAIDGQAAEVDYIGMPAVCFTEPELAQVGYTEAQAKEEGLSIKASKFPYAANGRALSLDDTNGFVKLITLKEDDTLIGAQVVGTGASDIISELGLAIESGMNAEDIALTVHAHPTLGEMTMEAAEKAIGYPIHTM

SEQ ID NO: 461 - DNA, 1044 bp, Artificial Sequence
  Description of Artificial Sequence: synthetic nucleic acid sequence
atgaaaaaaacagtcttatttttattattgtctctagttttagttttaacggcttgtagtaatagttcgaataataattcaacttcgaaaaagaaaaatagtgattctaaagaaactgtaaccatcaaaaatagttttgaagcaagtggtaaagaaaataatggcagtgataagaaaaaaatctctaatactgtcgaagtaccaaagaatcctaaaaatgccgttgtattagattatggagcgcttgatgtgttgaaagaattaggtgtggctgataaagtaaaaggtttacctaaaggtgaaaataaccaatctttacctaaatttttagatgaatttaaagatgataagtatattaatactggaaatttaaaagaagtgaactttgataaagttgcatcagctaaaccagatgtgatttttatttcaggaagaacagctaatcagaaaaatttagatgaatttaaaaaagctgcaccaaaagctaaagttgtatatgtaggtacaagtgatgacaacttaattaaagatatgaaaaaaaatacagaaaatttagggaaaatctacgataaagaagataaagctaaaaaaattaataaagatttagatagaaaaatatctgatatgaaagataaaactaaagactttaataagaaagtaatgtatttattggttaacgaaggtgaactatcaacgtttggaccaggaggaagatttggtggtttagtgtttgatacattaggatttaaacctgcagacaaaaaggttagcaaaagcccgcatggtcaaaatataaataatgaatatattaacaagcagaatccagatgttattttagctatggatcgtggttcagttgtaggtggtaaagcaacaacaaatcaagttttaaaaaacaaagttataaaaaatgtaaaagcagtaaaaagtaatcatatttacgaattagatccaaaactatggtatttctcttcaggatcttcaacgacaactatcaaacaaattgatgaattaaatgaagtagtagagaaagttgaaaaataa

SEQ ID NO: 462 - protein, 347 aa, Artificial Sequence
  Description of Artificial Sequence: synthetic amino acid sequence
MKKTVLFLLLSLVLVLTACSNSSNNNSTSKKKNSDSKETVTIKNSFEASGKENNGSDKKKISNTVEVPKNPKNAVVLDYGALDVLKELGVADKVKGLPKGENNQSLPKFLDEFKDDKYINTGNLKEVNFDKVASAKPDVIFISGRTANQKNLDEFKKAAPKAKVVYVGTSDDNLIKDMKKNTENLGKIYDKEDKAKKINKDLDRKISDMKDKTKDFNKKVMYLLVNEGELSTFGPGGRFGGLVFDTLGFKPADKKVSKSPHGQNINNEYINKQNPDVILAMDRGSVVGGKATTNQVLKNKVIKNVKAVKSNHIYELDPKLWYFSSGSSTTTIKQIDELNEVVEKVEK

SEQ ID NO: 463 - DNA, 747 bp, Artificial Sequence
  Description of Artificial Sequence: synthetic nucleic acid sequence
atggataaaataccattaaaagagttagataatttaagtaaaactgataccactgataaaaataaaaaagaatttcgtgcacttcagcaggatattaataactatttgatacctgagtttaaaaaatataaaaattccactcaacatttaacagcagatactaatgaggttaagcacttgaaagaggattatctaaaaactgttgaaaataaagagaaatctatatatgatttaaaagaatttgtagatttatgtaatcgctcaattaaagataatgaagatattttggattatactaaattattcgagaaaaatagaactgaagtggagtctgacattaataaagcacaaaataaagaagatgcaagtcaacttaaatcaaaattagaagaaaataatcaacaattaaaagatactgctaaaaaatatttaaattcttcaaataatgattctgattcagcgaaagaagcaatcaaaaatcatatttcaccacttattgacaaacaaattacggatattaataaaacaaatatttctgataatcatgttgataatgctagaaaaaatgcaattgagatgtattatagtttgcaaaattattatgatacgagagtagatacgattaaaactagcgaaaaattagctcaaattgatgttgaacgattgccaaaagagggaaaagatatatcagaaatggataaatcgttcaaaagagaatttaaaaaaataaaagaaagtgtaaattaa

SEQ ID NO: 464 - protein, 248 aa, Artificial Sequence
  Description of Artificial Sequence: synthetic amino acid sequence
MDKIPLKELDNLSKTDTTDKNKKEFRALQQDINNYLIPEFKKYKNSTQHLTADTNEVKHLKEDYLKTVENKEKSIYDLKEFVDLCNRSIKDNEDILDYTKLFEKNRTEVESDINKAQNKEDASQLKSKLEENNQQLKDTAKKYLNSSNNDSDSAKEAIKNHISPLIDKQITDINKTNISDNHVDNARKNAIEMYYSLQNYYDTRVDTIKTSEKLAQIDVERLPKEGKDISEMDKSFKREFKKIKESVN

SEQ ID NO: 465 - DNA, 321 bp, Artificial Sequence
  Description of Artificial Sequence: synthetic nucleic acid sequence
atggctattaagctgagttcaattgaccagtttgaacaagtattagaagaaaataaatatgtttttgtattaaaacacagtgaaacttgtccaatttctgcaaatgcgtatgatcaatttaataagtttttatatgaaagagacatagatggttattatctaatcgttcaacaagagcgtaaactatctgattatatcgcagagaaaacaaacgtaaaacacgaatcaccacaagctttttattttgtagatggtgaaatgaagtggaatgcagaccacgatgatattaacgtttctcaacttgctcaagctgaggaataa

SEQ ID NO: 466 - protein, 106 aa, Artificial Sequence
  Description of Artificial Sequence: synthetic amino acid sequence
MAIKLSSIDQFEQVLEENKYVFVLKHSETCPISANAYDQFNKFLYERDIDGYYLIVQQERKLSDYIAEKTNVKHESPQAFYFVDGEMKWNADHDDINVSQLAQAEE

SEQ ID NO: 467 - DNA, 864 bp, Artificial Sequence
  Description of Artificial Sequence: synthetic nucleic acid sequence
atgacgattgatagtggattttatcaaacacctaaatacagcttagggaactatgtatggtatgacactaataaagatggtattcaaggtgatgatgaaaaaggaatctctggagttaaagtgacgttaaaagatgaaaacggaaatatcattagtacaactacaaccgatgaaaatggaaagtatcaatttgataatttaaatagtggtaattatattgttcattttgataaaccttcaggtatgactcaaacaacaacagattctggtgatgatgacgaacaggatgctgatggggaagaagttcatgtaacaattactgatcatgatgactttagtatagataacggatactatgatgacgaatcggattccgatagtgactcagacagcgactcagattccgatagtgattcagactccgatagcgactcggattcagacagcgactcagattcagacagcgactcggattctgatagcgactcggattcagacagcgactcagactcagacagtgattcagattcagacagtgattcagattcagacagcgactcagattccgatagtgattcagactcagacagcgactcagattccgatagtgattcagactcagacagtgactcagattctgatagtgattcagactcagacagtgattcagattccgatagtgattcagactccgatagcgactcagactcggatagtgactcagactcggatagtgactcagattctgatagtgattcagactcaggcagtgattcggattccgatagtgattcagactcagacaacgactcagatttaggcaatagctcagataagagtacaaaagataaattacctgtgtaa

SEQ ID NO: 468 - protein, 287 aa, Artificial Sequence
  Description of Artificial Sequence: synthetic amino acid sequence
MTIDSGFYQTPKYSLGNYVWYDTNKDGIQGDDEKGISGVKVTLKDENGNIISTTTTDENGKYQFDNLNSGNYIVHFDKPSGMTQTTTDSGDDDEQDADGEEVHVTITDHDDFSIDNGYYDDESDSDSDSDSDSDSDSDSDSDSDSDSDSDSDSDSDSDSDSDSDSDSDSDSDSDSDSDSDSDSDSDSDSDSDSDSDSDSDSDSDSDSDSDSDSDSDSDSDSDSDSDSDSDSDSDSDSDSDSDSDSDSDSDSDSDSGSDSDSDSDSDSDNDSDLGNSSDKSTKDKLPV

SEQ ID NO: 469 - DNA, 1098 bp, Artificial Sequence
  Description of Artificial Sequence: synthetic nucleic acid sequence
atggttaataaaggagtcggtatggaaatgtttgaagctatcatatataacatatctgtcatggtggcaggtatatatttatttcataggttacaatattctgaaaataaaagaatgattttttctaaagaatatgtaacagtactaatgacattcgtttctttacttttagcggcataccctatcccatttcaaaacgaatacctcgtccatttaacatttgtacctcttttgtttttaggacgttataccaacatgatatatacactcacggctgcttttatcgtatctttagtcgatgtatttatctttggaaactcaattatttatggtattacattaatcgttattgcaggtattgtcagtgcagtgggaccattcttaaagcaaaacgatatcatttctttacttattttaaatttgattagcattatcattttgttatttttagcattattaagccctatttatgaactcgtagagattttagtgcttatccctatttcatttattattacaattgcttcagcaataacattcgttgatatatggcactttttctctttagtcaatcgttatgaaaatgaagataaatacgattatcttacaggtctaggtaatgtgaaagaatttgatagacacttaaatgaggtctcaagtaaagctgaagaaaagaaacaaagtttagccttacttctcattgatattgatggctttaaagatgtaaacgatcattattcacaccaatcaggagatgctgttctcaaacaaatgtctcaactattaaaaaactatgtcccaaaccagttcaaaatatttagaaacggtggcgaagaattttctgttgtaataagagattacacactagatcaaagcgtgaaattagcagaaaatattcgaagtggtgttgaaaaatcttctttccacctaccaaacaaagaagtaatcaagctatcagtttcaattggtgtaggatacttaactcaagaagatcgtaaatctcaacgtaaagtatttaaagatgctgatgacatggtacatgtggctaaaagtgaaggaagaaataaagtcatgtttaatcctattgtcaaattataa

SEQ ID NO: 470 - protein, 365 aa, Artificial Sequence
  Description of Artificial Sequence: synthetic amino acid sequence
MVNKGVGMEMFEAIIYNISVMVAGIYLFHRLQYSENKRMIFSKEYVTVLMTFVSLLLAAYPIPFQNEYLVHLTFVPLLFLGRYTNMIYTLTAAFIVSLVDVFIFGNSIIYGITLIVIAGIVSAVGPFLKQNDIISLLILNLISIIILLFLALLSPIYELVEILVLIPISFIITIASAITFVDIWHFFSLVNRYENEDKYDYLTGLGNVKEFDRHLNEVSSKAEEKKQSLALLLIDIDGFKDVNDHYSHQSGDAVLKQMSQLLKNYVPNQFKIFRNGGEEFSVVIRDYTLDQSVKLAENIRSGVEKSSFHLPNKEVIKLSVSIGVGYLTQEDRKSQRKVFKDADDMVHVAKSEGRNKVMFNPIVKL

SEQ ID NO: 471 - DNA, 651 bp, Artificial Sequence; identical to SEQ ID NO: 3
  Description of Artificial Sequence: synthetic nucleic acid sequence

SEQ ID NO: 472 - protein, 216 aa, Artificial Sequence; identical to SEQ ID NO: 4
  Description of Artificial Sequence: synthetic amino acid sequence

SEQ ID NO: 473 - DNA, 495 bp, Artificial Sequence; identical to SEQ ID NO: 5
  Description of Artificial Sequence: synthetic nucleic acid sequence

SEQ ID NO: 474 - protein, 164 aa, Artificial Sequence; identical to SEQ ID NO: 6
  Description of Artificial Sequence: synthetic amino acid sequence

SEQ ID NO: 475 - DNA, 1086 bp, Artificial Sequence; identical to SEQ ID NO: 7
  Description of Artificial Sequence: synthetic nucleic acid sequence

SEQ ID NO: 476 - protein, 361 aa, Artificial Sequence; identical to SEQ ID NO: 8
  Description of Artificial Sequence: synthetic amino acid sequence

SEQ ID NO: 477 - DNA, 933 bp, Artificial Sequence
  Description of Artificial Sequence: synthetic nucleic acid sequence
atgttcaaaacattgaataaaaatgacatcttacgcggattagagtcaattcttcctaaagatattattaaagtggatgaacctctcaagcgttatacatatacagaaacaggaggagaggcagatttttatttatcccctaccaaaaatgaagaagtccaagccatcgtaaagtttgcccatgagaacagtataccggtaacttatttaggaaatgggtctaacattatcattcgagaaggtggaattcgaggaatcgtcctcagcttattatctctcaatcatattgaaacctctgatgatgcaattatagcaggtagtggtgcagcaattattgacgtttcaaatgttgcacgtgaccatgtattaaccggtttagaatttgcatgcggtatccctgggtcaattggtggcgccgtattcatgaatgctggtgcttatggcggagaagttaaagactgtattgactatgcattatgtgtcaatgaaaaaggtgatttattaaagctcactacagctgaactggaattagactatagaaatagtgtggtacaacaaaaacatttagttgtattagaggctgctttcaccttagaaccaggtaaattagatgaaattcaggccaaaatggatgatcttactgaaagacgtgaatctaaacaaccgcttgaattcccttcttgcggaagtgttttccaaagaccaccgggtcattttgcaggtaaactcattcaagattctaatttacagggctatcgaatcggtggcgttgaagtttcaactaagcatgcgggattcatggttaatgtagacaacggtacagcaactgattatgaagcacttatacatcacgtacaaaaaatagttaaagaaaaattcgatgttgaattgaatactgaggtacgtattataggtgatcatcccacagattaa

SEQ ID NO: 478 - protein, 310 aa, Artificial Sequence
  Description of Artificial Sequence: synthetic amino acid sequence
MFKTLNKNDILRGLESILPKDIIKVDEPLKRYTYTETGGEADFYLSPTKNEEVQAIVKFAHENSIPVTYLGNGSNIIIREGGIRGIVLSLLSLNHIETSDDAIIAGSGAAIIDVSNVARDHVLTGLEFACGIPGSIGGAVFMNAGAYGGEVKDCIDYALCVNEKGDLLKLTTAELELDYRNSVVQQKHLVVLEAAFTLEPGKLDEIQAKMDDLTERRESKQPLEFPSCGSVFQRPPGHFAGKLIQDSNLQGYRIGGVEVSTKHAGFMVNVDNGTATDYEALIHHVQKIVKEKFDVELNTEVRIIGDHPTD

SEQ ID NO: 479 - DNA, 702 bp, Artificial Sequence
  Description of Artificial Sequence: synthetic nucleic acid sequence
atggctagaaaagttgttgtagttgacgatgaaaaaccaattgctgatattttagaatttaatttaaaaaaagaaggttacgacgtatattgcgcttatgacggtaatgacgcagtagatttaatctatgaagaagaaccagatatcgtcttacttgatatcatgttacctggtagagatggtatggaagtgtgtcgtgaagtgcgtaaaaagtatgaaatgccaattatcatgctgacagcgaaagattctgaaattgataaagttttaggtcttgaattaggtgcagatgactacgtaactaaaccatttagtactcgtgaactcatcgcacgtgtgaaagcgaacttacgccgtcattattcacaaccagctcaagaagtaagtggtgcgacaaatgaaattacaattaaagatattgtgatttatccagatgcatattcaattaaaaaacgtggagaagacattgaattaacgcatcgtgaattcgagctgttccattatctttctaaacatatgggtcaagtcatgacacgtgaacacttactacaaacagtgtggggttacgattatttcggtgatgttcgtactgtggacgtaacaattcgccgtttaagagaaaaaattgaagatgatccatctcatccagaatacattgtgacacgtagaggcgttggatacttcctccaacaacatgattag

SEQ ID NO: 480 - protein, 233 aa, Artificial Sequence
  Description of Artificial Sequence: synthetic amino acid sequence
MARKVVVVDDEKPIADILEFNLKKEGYDVYCAYDGNDAVDLIYEEEPDIVLLDIMLPGRDGMEVCREVRKKYEMPIIMLTAKDSEIDKVLGLELGADDYVTKPFSTRELIARVKANLRRHYSQPAQEVSGATNEITIKDIVIYPDAYSIKKRGEDIELTHREFELFHYLSKHMGQVMTREHLLQTVWGYDYFGDVRTVDVTIRRLREKIEDDPSHPEYIVTRRGVGYFLQQHD

SEQ ID NO: 481 - DNA, 1833 bp, Artificial Sequence
  Description of Artificial Sequence: synthetic nucleic acid sequence
atgaagtggcttaaacaactacaatcccttcacacgaaactcgttattgtttatgtactactcattattattggtatgcaaatcatcggtttgtattttacgaatagtttagaaaaggaattactcgataacttcaagaagaacataacacaatatgcgaagcaattagacgtcaatattgaaaaggtttataaagataaagataaaggttcagtcaacgctcaaaaggatatccaagaccttttgaatgaatatgcgaatcgccaagaaataggagaaatacgctttattgataaagaccaaattatcatggcaacaaccaagcagtctaaccgtggtcttatcaatcaaaaggttaacgacggttcagttcaaaaggcgctctccttagggcaaacgaatgatcatatggttcttaaggattacggaagtggtaaagagcgtgtttgggtatataatataccggttaaagttgataaacagacaatcggtgatatatacatagaatcgaaaattaatgatgtatacaatcagctgaacaacattaatcagatattcatcgtagggacagcgatatcactattcattacagtaatactaggattcttcattgcacgaacgattactaagccgataaccgatatgcgtaaccaaaccgttgagatgtctaaaggtaactacacgcaacgagtgaagatatacggtaacgatgaaatcggtgagctcgcacttgccttcaataacttatcgaaacgtgtccaagaagcacaagcgaatacagaaagtgagaaacgtcgcctagattctgttatcacacatatgagcgatggtattcttgcgacagatcgccgtggacgtgtacgtattgcaaacgacatggcgctgaaaatgctcggtctcgcgaaagaagatgtcatcggctactacatgcttggtgtccttaacttagaaaatgaattctcattagaagaaattcaagaaaatagtgattccttcttgttagatattaacgaagaagaaggcattattgcacgtgtaaactttagtacgattgtacaagaaacaggtttcgtgacaggttacattgccgtactacatgatgtcacagaacaacaacaagtcgaacgtgaacgtcgcgaattcgttgcgaatgtttcacatgaattacgtacaccactgacatcgatgaatagctatatcgaagcacttgaagaaggtgcttggcaagataaagaactggcaccatcattcctatctgtcacacgcgaagagactgaacgtatgattcgtttagtgaatgatttacttcaattatctaaaatggataatgaatcagatcaaattacgaaagaaattatcgacttcaatatgtttatcaacaaaattattaaccgtcatgaaatgacagcgaaagatacgacattcgtacgcgaaattccgcaacaaaccatctttgctgaaatcgatccagacaagatgacacaagtatttgataatgtcattaccaatgcaatgaaatattcacgtggcgagaaacgtgttgagtttcatgtgaaacaaaatgcactttacaatagaatgacgattcgtattaaagataatggtattggaataccgattaacaaggtagataaaatatttgatagattctatcgtgtagataaagcacgtacacgtaagatgggtggtacaggactaggtctagctatttccaaagagattgtcgaagcacataacggtcgaatttgggctaacagtgtggaaggacaaggtacgtcaatctttattacacttccttgcgaaatcattgaagacggtgattgggatgaataa

SEQ ID NO: 482 - protein, 610 aa, Artificial Sequence
  Description of Artificial Sequence: synthetic amino acid sequence
MKWLKQLQSLHTKLVIVYVLLIIIGMQIIGLYFTNSLEKELLDNFKKNITQYAKQLDVNIEKVYKDKDKGSVNAQKDIQDLLNEYANRQEIGEIRFIDKDQIIMATTKQSNRGLINQKVNDGSVQKALSLGQTNDHMVLKDYGSGKERVWVYNIPVKVDKQTIGDIYIESKINDVYNQLNNINQIFIVGTAISLFITVILGFFIARTITKPITDMRNQTVEMSKGNYTQRVKIYGNDEIGELALAFNNLSKRVQEAQANTESEKRRLDSVITHMSDGILATDRRGRVRIANDMALKMLGLAKEDVIGYYMLGVLNLENEFSLEEIQENSDSFLLDINEEEGIIARVNFSTIVQETGFVTGYIAVLHDVTEQQQVERERREFVANVSHELRTPLTSMNSYIEALEEGAWQDKELAPSFLSVTREETERMIRLVNDLLQLSKMDNESDQITKEIIDFNMFINKIINRHEMTAKDTTFVREIPQQTIFAEIDPDKMTQVFDNVITNAMKYSRGEKRVEFHVKQNALYNRMTIRIKDNGIGIPINKVDKIFDRFYRVDKARTRKMGGTGLGLAISKEIVEAHNGRIWANSVEGQGTSIFITLPCEIIEDGDWDE

SEQ ID NO: 483 - DNA, 1287 bp, Artificial Sequence
  Description of Artificial Sequence: synthetic nucleic acid sequence
atgagtatcgttttgacatacatggtctggaacttttctccagacctttcaaatattgataacacggataatagtaaaagtgataagcctaaaccacttactaaaccaatgactgcagaaatggaaggaacgattacaccatttcaaatcgtgcattctagagatgaaaaatctcaaggaacagtggcatcaggtgcagtcttagacaagatgattcaacctttaaaaaatcaagaagttaaatctgtatcacatctgaaaagggaacataaccttgttatacctgaactaagcaacgactttatcgtcctagatttcacttatgatttgccactttcaacatacttaagtcaagtactcgatatcgatgcgaaagtgccgaataactttaattttgatcgcctccttatcgatcaagatcataataaccacgtcgtactatatgcgattagcaaagaccgtcatgaagtagttaaacttaagacaacgatgaaagggaataacgttgacaaagcttttaaaagtatcgaacctgacatgcaaccctatacggaaatcatcacgaataaagatacaatcgacaaagcaacacacgtgtttgcaccaagcaaaccgaaagacttaaagacgtatcgcatggtcttcaatacgatcagtgttgaacgcatgaactcaatactatttgatgattcaacgattgttcgtagctctcaaagtggtacgacaacatacaacaacaatactggtgtcgccaactataacgataaagatgaaatgtatcattataagaatttatctgaagacgcgaaaagttcaagcaacatgcaagaaaccatcccaggcacatacgagtttataaatagtcatggtggcttcttaaatgaagattatcgcctatttaagacagataatagaacggggaaactcacatatcaaagattcctcaacggtcacccaacgtttaataaacataacttcaatgaaatccaagtcacatggggggataaaggcgtttacgattatcaacgttcgctacttaagacggacgtcacactgaacagtgaagaatctaaatccgtccctaccgttgagtccgtgcgttctgcattagccaaccatcctgatattgattttgaaaaggtaacgaacattgcgattggttatgatatggacgacaaggcaaataacgaagatattgaagttcaacgtaactgtgaattaataccacgttggtttgtagaatacgatggcaattggtatgcctataaagatgggaggcttgaataa

SEQ ID NO: 484 - protein, 428 aa, Artificial Sequence
  Description of Artificial Sequence: synthetic amino acid sequence
MSIVLTYMVWNFSPDLSNIDNTDNSKSDKPKPLTKPMTAEMEGTITPFQIVHSRDEKSQGTVASGAVLDKMIQPLKNQEVKSVSHLKREHNLVIPELSNDFIVLDFTYDLPLSTYLSQVLDIDAKVPNNFNFDRLLIDQDHNNHVVLYAISKDRHEVVKLKTTMKGNNVDKAFKSIEPDMQPYTEIITNKDTIDKATHVFAPSKPKDLKTYRMVFNTISVERMNSILFDDSTIVRSSQSGTTTYNNNTGVANYNDKDEMYHYKNLSEDAKSSSNMQETIPGTYEFINSHGGFLNEDYRLFKTDNRTGKLTYQRFLNGHPTFNKHNFNEIQVTWGDKGVYDYQRSLLKTDVTLNSEESKSVPTVESVRSALANHPDIDFEKVTNIAIGYDMDDKANNEDIEVQRNCELIPRWFVEYDGNWYAYKDGRLE

SEQ ID NO: 485 - DNA, 792 bp, Artificial Sequence
  Description of Artificial Sequence: synthetic nucleic acid sequence
atgaactggaaactcacgaaaacacttttcattttcgtttttattcttgtgaacatctttttagtcatcgtttatattgataaagtgaataaatcacaagttaatgactcggaaaaggtaaacgaggtcaattttcaacaagaagaaattgacgtgcccaaggatgtcttgaatcaaaatgttaaagatactgaacttgaacaaattactgcccgttcaaagaatttctcaagttatgcgaaagatcattcaagcatgcaaacgtctgattccgacaaaacacttgaaggagatattgataaaggcgttcaagtgagtgataagaacttacaagatatcaaagagtacattgcaaagaaaatctttaacggtaaagagtatcagttaagtgatttaactaaagataaagtcacttacgaacaaacgtataaagattatccgattatgaataatagtaaagcgcgcctaacgtttaatttgagcgatggcaaggcgacaagctataaacagacagcgatggatgatatacaagtagctaaaggttcaaatagcacgaagaaacaagtcatcacgccgcgtaaagctattgaagccctttattacaatagatatttaaaacaaaatgatcaagttcttgatgcacgcctaggctattattcagttgtaaaggaaacaaacgttcaattactccaacctaactgggaaattaaagtaaaacataaaggcaaggatgaagttcaaacctattatgtagaagctacaaatcataatccgaaagtgattgattattag

SEQ ID NO: 486 - protein, 263 aa, Artificial Sequence
  Description of Artificial Sequence: synthetic amino acid sequence
MNWKLTKTLFIFVFILVNIFLVIVYIDKVNKSQVNDSEKVNEVNFQQEEIDVPKDVLNQNVKDTELEQITARSKNFSSYAKDHSSMQTSDSDKTLEGDIDKGVQVSDKNLQDIKEYIAKKIFNGKEYQLSDLTKDKVTYEQTYKDYPIMNNSKARLTFNLSDGKATSYKQTAMDDIQVAKGSNSTKKQVITPRKAIEALYYNRYLKQNDQVLDARLGYYSVVKETNVQLLQPNWEIKVKHKGKDEVQTYYVEATNHNPKVIDY

SEQ ID NO: 487 - DNA, 687 bp, Artificial Sequence; identical to SEQ ID NO: 359
  Description of Artificial Sequence: synthetic nucleic acid sequence

SEQ ID NO: 488 - protein, 228 aa, Artificial Sequence; identical to SEQ ID NO: 360
  Description of Artificial Sequence: synthetic amino acid sequence

SEQ ID NO: 489 - DNA, 1131 bp, Artificial Sequence
  Description of Artificial Sequence: synthetic nucleic acid sequence
atgaattcgttgcacatagcaggacgtattttcaaacagacgattcgagatgtaagaacattggcactgttacttattgcacctatattactattgtcgctactatattacatttttacagttgccgataatacgaatggcgtaacagttggggttcacgatgtaccagattcattaatgactgaattacatgataaagatattcacgttaaacattataaaaatgacaatgatataagtgataaaattaaagacgacaaattaacaggatttttgcacagtgatggtcaaaaagtatcagtgacttatgctaacgataatcctacacaagcaggagaactaacaggtgcaaatcaaaaatggttaatgagtcataacatgaatgccatgaaagataatactaataaattgcatcaagcgttaactaaaatacaacaaaaaatgcccggggatgggggagacacgcctcatcaagatatggctaaaccatataaactaacaacgcactatttatatggttcatcagattctacgtattttgatatgataaatcctattttaattggattttttgtctttttctttacgtttttaatttctggcattggcttattaaaagagcgtacttctggcacattagaacgtttacttgcctctccaataaaaagaagtgaaattatttttggttatgttttcggttatggtagttttagcgttatccaaacaatagttgtcgtattatatgcaatttatattctgcatatagacttagtaggttcgatatggttcgtactattaacggcaatattaacagcgcttgtcgctgtgacattcggtatattattatctacctttgcttcctcagaattccaaatgattcaatttataccattagtcatagtgccacaagtactatttgcaggcattataccaattgaatcaatgaataaaggattacaatacttttcacatatcatgccgttattctataccggccaaacgatgcaaaatattatgatcaagggttatggattcaacgatatttacatttatttaattgtgttattcgcatttttcattttcttattgattttaaatattataggcatgaaaagatatagaaaagtttag

SEQ ID NO: 490 - protein, 376 aa, Artificial Sequence
  Description of Artificial Sequence: synthetic amino acid sequence
MNSLHIAGRIFKQTIRDVRTLALLLIAPILLLSLLYYIFTVADNTNGVTVGVHDVPDSLMTELHDKDIHVKHYKNDNDISDKIKDDKLTGFLHSDGQKVSVTYANDNPTQAGELTGANQKWLMSHNMNAMKDNTNKLHQALTKIQQKMPGDGGDTPHQDMAKPYKLTTHYLYGSSDSTYFDMINPILIGFFVFFFTFLISGIGLLKERTSGTLERLLASPIKRSEIIFGYVFGYGSFSVIQTIVVVLYAIYILHIDLVGSIWFVLLTAILTALVAVTFGILLSTFASSEFQMIQFIPLVIVPQVLFAGIIPIESMNKGLQYFSHIMPLFYTGQTMQNIMIKGYGFNDIYIYLIVLFAFFIFLLILNIIGMKRYRKV

SEQ ID NO: 491 - DNA, 345 bp, Artificial Sequence
  Description of Artificial Sequence: synthetic nucleic acid sequence
atgaaccaagatattaagtcattagttgaaaccattgtgcctcaacttgaatatttaagcgataaacaaagacgtgtcatagaaagtgctattgcattattcagtgaacaaggatttgataaaacgagtactaaagaaattgcgcagcgtgcaaatgtcgcagaaggaacggtatttaagcagtttaaaagtaaaagaatgttattatatataaatcacaaagcgtgtaagacatcgttctcccccttccatgatgcgctttcatttcaaaaaaattccttaatcaatcgttcatgcgcaagcctgtttaaactaacacataatcattccctgcaattctcctga

SEQ ID NO: 492 - protein, 114 aa, Artificial Sequence
  Description of Artificial Sequence: synthetic amino acid sequence
MNQDIKSLVETIVPQLEYLSDKQRRVIESAIALFSEQGFDKTSTKEIAQRANVAEGTVFKQFKSKRMLLYINHKACKTSFSPFHDALSFQKNSLINRSCASLFKLTHNHSLQFS

SEQ ID NO: 493 - DNA, 405 bp, Artificial Sequence
  Description of Artificial Sequence: synthetic nucleic acid sequence
gtgtcagtaactgtaaaaggacaaactgaaacagaatggcttccagtattggattttagaaacaaatctttagcaaagggtagcgcgacaacatttgatattaataaagctcaaaaacgttgtttcgttaaagctgcagcattacatggcctaggtctttatatatacaacggggaagaagttccaagcgctaacgacaatgacattacagaattagaagagcgtatcaaccagtttgtaacttcatctcaagaaaaaggtagagacgcaacgctagacaaaacaatgcgttggttaggtattcaaaacattaacaaagttactaaaaaagatatagcaaatgcacatcaaaaactagatgcaggactaaaacaattagataaggagaattcaaatgttaaatag

SEQ ID NO: 494 - protein, 134 aa, Artificial Sequence
  Description of Artificial Sequence: synthetic amino acid sequence
VSVTVKGQTETEWLPVLDFRNKSLAKGSATTFDINKAQKRCFVKAAALHGLGLYIYNGEEVPSANDNDITELEERINQFVTSSQEKGRDATLDKTMRWLGIQNINKVTKKDIANAHQKLDAGLKQLDKENSNVK

SEQ ID NO: 495 - DNA, 675 bp, Artificial Sequence
  Description of Artificial Sequence: synthetic nucleic acid sequence
atggtagtaataaaaaactacattacagaagatgacggtacaacaactgtagtcatcaaaggagtagaactagataacaaaacatctttacttttagacaacggttacgaagtagaagcagatgtaagagttgtagatccattcaagattacagataagcagcgtagaaaagtatttgctctctgtaacgacatagaagcttacacaggacaaccacgcgactatatgaggtatttgttcatggattacgtagaagttctctatggctatgaaaaacgtctctcattgagtgattgcacaagagaacaagctaaacaagttatagaagttattcttgactgggtgtttcacaacaatataccacttaattataagacaagtgacttactcaaaaatgataaagcgttcctttactggtcaacagtcaatcgtaactgtgtaatatgcggaacgccacgagcagaacttgcgcattatcacacagtaggtcgaggacgtaacagacgaaagatagatcacacagacaacaaagtattagcgctatgttcaagacatcataaagagcagcaccaaataggtatagatagttttaatgagaaatacaaattacatgaaagttgggtgtccgtagatgaacgactcaaccgaatgttgaaaggagaagtaaatggctga

SEQ ID NO: 496 - protein, 224 aa, Artificial Sequence
  Description of Artificial Sequence: synthetic amino acid sequence
MVVIKNYITEDDGTTTVVIKGVELDNKTSLLLDNGYEVEADVRVVDPFKITDKQRRKVFALCNDIEAYTGQPRDYMRYLFMDYVEVLYGYEKRLSLSDCTREQAKQVIEVILDWVFHNNIPLNYKTSDLLKNDKAFLYWSTVNRNCVICGTPRAELAHYHTVGRGRNRRKIDHTDNKVLALCSRHHKEQHQIGIDSFNEKYKLHESWVSVDERLNRMLKGEVNG

SEQ ID NO: 497 - DNA, 759 bp, Artificial Sequence
  Description of Artificial Sequence: synthetic nucleic acid sequence
atgttcgatgatagcaaaatcaagtatatagaagcactgccagaacgagatacaatcatcactttatgggttaagttgctgacattagctggaaagtataacgaacaaggatacattatgttatccgaaagtctaccctataacgaagaaatgttagctaacgaatttaatagacctatcaattcaataagattagcgttacaaacattcgaaaagctaagcatgattgaagaagtgaatggtgtctttaaagtatctaattgggaaaaacatcagaacatcgaaggtttagaaaagataagagaacaaaaccgtttgcgtaaacaaaagcaaagaaaaaaacaaaaacttttagatagtcacgtgaagtcacgtgacagtcacgcaacagatatagaagaagataaagaagtagaagaagaaagagaaaaagaagtagataaagatatcttcaaaaactcaattaattacatcatgagtaaccttactcataatttaactcctaaccaaatggaacagataggatatgccattgatgatattggacaacatgcagatgaagttgttgaagtagctactgattatacaaaagacaaaggttgtcatgcaggttacctaatcaaagtgttaaacaactgggctaaagagaacgttaagaataaaaaagaggctgaaaataaaattaaacctaaaaataaaaaaactgtaacagatgatgtaattgctcaaatggagaaagagctaggagatgaaagttaa

SEQ ID NO: 498 - protein, 252 aa, Artificial Sequence
  Description of Artificial Sequence: synthetic amino acid sequence
MFDDSKIKYIEALPERDTIITLWVKLLTLAGKYNEQGYIMLSESLPYNEEMLANEFNRPINSIRLALQTFEKLSMIEEVNGVFKVSNWEKHQNIEGLEKIREQNRLRKQKQRKKQKLLDSHVKSRDSHATDIEEDKEVEEEREKEVDKDIFKNSINYIMSNLTHNLTPNQMEQIGYAIDDIGQHADEVVEVATDYTKDKGCHAGYLIKVLNNWAKENVKNKKEAENKIKPKNKKTVTDDVIAQMEKELGDES

SEQ ID NO: 499 - DNA, 354 bp, Artificial Sequence
  Description of Artificial Sequence: synthetic nucleic acid sequence
atgactaaacaacaagccctagaagtaattaagacaattagacatgtatacaacattgactttgacagacctaaattagaaacatgggttaacattttgagccaaaatggggattatgaaccgactaaaaaaacagtaatgcaatatatcaatgatgctaatccttatccacctagtattccaaacataatgagaaaagaagtcaaagtcgtaaaagaagagcctgtcgacgaaaaaactgctagacatcgttggagaatgaaaaatgatccagaatacgtagcacaacgtaaaaagatattagacgacttcagaaagaagttaagtgagtttggagtgagtgacgatgaatga

SEQ ID NO: 500 - protein, 117 aa, Artificial Sequence
  Description of Artificial Sequence: synthetic amino acid sequence
MTKQQALEVIKTIRHVYNIDFDRPKLETWVNILSQNGDYEPTKKTVMQYINDANPYPPSIPNIMRKEVKVVKEEPVDEKTARHRWRMKNDPEYVAQRKKILDDFRKKLSEFGVSDDE

SEQ ID NO: 501 - DNA, 654 bp, Artificial Sequence
  Description of Artificial Sequence: synthetic nucleic acid sequence
atgacacctttgggtcaatcacctttagcactaggcgctgacatagttattcatagtgcaactaaatttctaggtggacatagcgatttaattgcaggtgcagcaattactaataatagagaggttgcaaatgcattgtacttattacagaacggcacgggcacagccctttctgcatatgatagttgggcacttgcaaaacatcttaaaacattaccagttcgttttaaacaatctgttcataatgctgaacgccttgttcaatttttgagtcaaagagaggagatttctgaggtgtattacccgggaaataatcttacacatctcaagcaagcttcaactggaggtgcagtgataggtttccgacttaaagatgaatctaaagcacaaaagttcgtcgattctcttactttaccacttgtatcagtgagtctcggtggtgtagaaactatcctatcacatcccgcaacaatgtctcatgcagcagtgccagaagatgtgagacgtgaacgtggcatcactttcgggttattccgtttaagtgtaggtcttgagaattcagaagaactcatcgcagattttaactacgctttaaaggaggctttcaatgagtcatttactgaaccaattaaagagcaacgttttagtagctga

SEQ ID NO: 502 - protein, 217 aa, Artificial Sequence
  Description of Artificial Sequence: synthetic amino acid sequence
MTPLGQSPLALGADIVIHSATKFLGGHSDLIAGAAITNNREVANALYLLQNGTGTALSAYDSWALAKHLKTLPVRFKQSVHNAERLVQFLSQREEISEVYYPGNNLTHLKQASTGGAVIGFRLKDESKAQKFVDSLTLPLVSVSLGGVETILSHPATMSHAAVPEDVRRERGITFGLFRLSVGLENSEELIADFNYALKEAFNESFTEPIKEQRFSS

SEQ ID NO: 503 - DNA, 1037 bp, Artificial Sequence
  Description of Artificial Sequence: synthetic nucleic acid sequence
atgtttatgttgattggtattattggctcatttacaacaggagatattttcaacttgtttgtgttctttgaagtctttttaatgtcttcatattgtttactcgttattggtactactaaaatacaattacaagaaacaattaagtatattttagtcaatgttgtttcatcgtctttctttgtcatgggtgttgcagttttatattcagttgtaggaactttaaatctcgctcatattagtgaaagattgtcacaactttctgtacatgacagtggcttagtcaatattgtttttattttatttatctttgtctttgccactaaagcaggcgtttttcctatgtacgtatggctacctggtgcttattatgcccctccagtagcgatcatcacgttctttggtgcactattgactaaagtgggtgtatacgcaattgcgagaactctaagtttattctttaataatacagtaagcttttctcattatgtcatccttttcttagcattacttacaattatttttggatgtataggtgcgatagcttactatgatacgaagaaaatcatcctttacaatattatgattgcagtaggtgtcatattagttggtattgctatgatgaacgaatcaggcatgactggtgcaatatattacacactacatgatatgttagttaaagcttcattgttcttactcattggcgtcatgtacaaaatcactaaaacgactgacttacgtcattttggtggcttgataaaagggtatcctattctaggttggacattctttattgcagcgctaagcttagcgggtataccaccttttagtggtttctacggtaaattctatattgttcgagcgacctttgaaaaaggattttatctaagtggtatcattgtacttttatcaagtttaatcgtgttatattcagtcatacgtattttcttaaaaggatttttcggtgaagttgaaggatatactttatctaaaaaggtaaatgttaaatatctaacaactatcgctgttgcatctacagt

SEQ ID NO: 504 - protein, 346 aa, Artificial Sequence
  Description of Artificial Sequence: synthetic amino acid sequence
MFMLIGIIGSFTTGDIFNLFVFFEVFLMSSYCLLVIGTTKIQLQETIKYILVNVVSSSFFVMGVAVLYSVVGTLNLAHISERLSQLSVHDSGLVNIVFILFIFVFATKAGVFPMYVWLPGAYYAPPVAIITFFGALLTKVGVYAIARTLSLFFNNTVSFSHYVILFLALLTIIFGCIGAIAYYDTKKIILYNIMIAVGVILVGIAMMNESGMTGAIYYTLHDMLVKASLFLLIGVMYKITKTTDLRHFGGLIKGYPILGWTFFIAALSLAGIPPFSGFYGKFYIVRATFEKGFYLSGIIVLLSSLIVLYSVIRIFLKGFFGEVEGYTLSKKVNVKYLTTIAVASTV

SEQ ID NO: 505 - DNA, 1557 bp, Artificial Sequence
  Description of Artificial Sequence: synthetic nucleic acid sequence
atgaaacgatttataccagcttggtatagccgtaacagatggtgggaaagtacctcaagaccattctatctaaaaaaacagtatacagattttgacgatatgattagtttaatgacaatgcatagttcgaataatgtggattatcaattgatagttttaaattttagtccatatcttagaacattcctccatcgatatgatttgtatgaaagtcattattggtctgtatttgatgagatacagggcgttggacatcaaacgcctcaagctattgattatcgcgatctttcatggccagaaggcactgaatttatttttactccctttcaaattcaagcgattacaggtgataacacgttttctaaaattcacttcagccaagaggggtacctgatgtgggtagaggattacaagtatagtacaattcaaagacgatttgtattcgatgacagaggatttatatcggcagtgcgtacttatacacctgatggtgataacaataaaaaacactatttttcaaaagatggggaagaaatatttgttgaagacttaaatgttaatacagtaacgattaataaaaatttccaatcaaaatttaaaagggttacgtattcatctatggctgagttgatagaagagaaattccaatcatatgtagaaagagaattgaatgaagatgattctgttatagtggcatctgatgaacgtcataattcaatgatggcacgcactattgatgcatcgtctttatgtttttctatttttactgagagaaataaagtggtgacacaagatttatatgactctatttctagagcatattattgtctcgttgatacacaagctaatcaaaatatgattgaacactacgcaggattgaacatgaatgatattaatcttttaagggtaacgccttttgatgcgaagtcattacctaaccaaagtagtcaattgtatgacacttatattggattatggatagatggtttggacgagattgaaatacgagagattgtaaacagcttatttcaatatattcaacataaagatggctataagttgaaaattttaactaagagtagagataatcttacggaaaatcttatagatgaagttgctcatctcaatgatttatatcaccaagagaaaaaggaaataagtgatgtaattgaagacgtgatacagaataaaaaagaaacaatcattgatattgaaacagtaccgtttgaagaagatcttgtaagcgttatttcaaaattaagagttgtagtagatttatctttagagccgaaactttttttacaaatctgttgtattggcgcgggtataccacaaattaataaaaagagaacagattatgttaaacatatgcataatggatatattattgatgacatatcgcaaactgtagaatctttagattattttttggcacatttaaaaaattggaattattcttatgcatattccatgagattaacggatgattttagttcaattaatattattcatcaaattaatcagttatttaaaggtgatgtttcaagtggcacgtaa

SEQ ID NO: 506 - protein, 518 aa, Artificial Sequence
  Description of Artificial Sequence: synthetic amino acid sequence
MKRFIPAWYSRNRWWESTSRPFYLKKQYTDFDDMISLMTMHSSNNVDYQLIVLNFSPYLRTFLHRYDLYESHYWSVFDEIQGVGHQTPQAIDYRDLSWPEGTEFIFTPFQIQAITGDNTFSKIHFSQEGYLMWVEDYKYSTIQRRFVFDDRGFISAVRTYTPDGDNNKKHYFSKDGEEIFVEDLNVNTVTINKNFQSKFKRVTYSSMAELIEEKFQSYVERELNEDDSVIVASDERHNSMMARTIDASSLCFSIFTERNKVVTQDLYDSISRAYYCLVDTQANQNMIEHYAGLNMNDINLLRVTPFDAKSLPNQSSQLYDTYIGLWIDGLDEIEIREIVNSLFQYIQHKDGYKLKILTKSRDNLTENLIDEVAHLNDLYHQEKKEISDVIEDVIQNKKETIIDIETVPFEEDLVSVISKLRVVVDLSLEPKLFLQICCIGAGIPQINKKRTDYVKHMHNGYIIDDISQTVESLDYFLAHLKNWNYSYAYSMRLTDDFSSINIIHQINQLFKGDVSSGT

SEQ ID NO: 507 - DNA, 1317 bp, Artificial Sequence
  Description of Artificial Sequence: synthetic nucleic acid sequence
gtgattgacaatgagtattgggataatcaataccaacaagataagacaatacaacgtaattttataaaaccactcatttatgaaaatgaagaacaattacaacaaaaactagaggcagttacatttcctgggcaatatggagataaagttaaacctattcattgtcgcgttagtattcattttgatggttcttatcaatttaatggaaatgagtctattgaagtatcaggacgatttggggaatcataccaacccctcattacatggagtcaaaatatcattgctgatgccaataaggtgaatcaaatatggccagaatttaaagttgaaggtgatgctaaaatccaatatacattgagattgacgcctgtttattcaactgatcaaccagtagaaaagctaatatatgaacaagacgatttagacactcccatagaactacctgctcgtccttatcaaacatatgtgagtgtatcaatcaaagctaaaggtaaaggaacattatttataggtgctattcataaacgttggtcacgcttggaattagggcagttcatattaggcggaaaacgatatagtgatgaaaataagcaagaatttatacattacttccatcctggagatttaaaaccaccactcaatgtatattttagtgggtatcgtactgctgagggctttgaagggtactttatgatgaaacgtatgaatgctccatttattttaatagctgatcctagaatcgaaggtggtgccttttacctagggtcagagaattatgaacaggcaatccgtaaggtcatccaaaatgctttggattatttgggatttgcgaacaaccaattaattctttctggattatcaatgggatcatttggcgcactttattacgctacaaaattaaatccagcggctgttattgtaggaaaacctttgataaatctcggtactattgctaataatatgaaactcgttcgtccaaacgattttggaacgtcacttgatattttgcgattgaatcaaaatggcataactaacaaagatgttgttcagttagataatcatttttggaagcaaattcagcatagtgatttgtcaatgaccacatttgcgattgcttacatggagcatgatgattatgacaaatatgcatttcaagatttattgcctgttcttacaaaacaacatgcacgtgtgataagtaaaagaattcctggtagacataatgatgattctgctactgttactcattggtttattaatttttataatttaatcatggaagagcgatttgggagggtaacacatgcaagaagatag

SEQ ID NO: 508 - protein, 438 aa, Artificial Sequence
  Description of Artificial Sequence: synthetic amino acid sequence
VIDNEYWDNQYQQDKTIQRNFIKPLIYENEEQLQQKLEAVTFPGQYGDKVKPIHCRVSIHFDGSYQFNGNESIEVSGRFGESYQPLITWSQNIIADANKVNQIWPEFKVEGDAKIQYTLRLTPVYSTDQPVEKLIYEQDDLDTPIELPARPYQTYVSVSIKAKGKGTLFIGAIHKRWSRLELGQFILGGKRYSDENKQEFIHYFHPGDLKPPLNVYFSGYRTAEGFEGYFMMKRMNAPFILIADPRIEGGAFYLGSENYEQAIRKVIQNALDYLGFANNQLILSGLSMGSFGALYYATKLNPAAVIVGKPLINLGTIANNMKLVRPNDFGTSLDILRLNQNGITNKDVVQLDNHFWKQIQHSDLSMTTFAIAYMEHDDYDKYAFQDLLPVLTKQHARVISKRIPGRHNDDSATVTHWFINFYNLIMEERFGRVTHARR

SEQ ID NO: 509 - DNA, 516 bp, Artificial Sequence
  Description of Artificial Sequence: synthetic nucleic acid sequence
atgtatggtacaaaattacgttttaatcaagataatatctattttgagaaccctttgatgccatccggtacaatcattcacagttggtatatgttaactgattttgcagaagaccgtgtaagccctaagctacctattttaaaaaaagggcgccaatatcaatttcaatttaattttgaagttgaacctgagggtgcggcttattttaaaatgaaattttatcgtaagaataaagaaattcttagtcatcaaattctaaaaaataaaaaagaaaatattgtctatcctagagaagcatattcatatgaattagaacttattaatgctggcatgaatcatctatcttttcacaatataattgtgcaagaattaagagaagatagtaatcaagcttatgaggcaacgcaatatatagatcctaagaaaaaacttaaagtaattaatcaaataataaccaatataaggacacatcatctagactcatcaaactatcacaggagtgatatgaatggctaa

SEQ ID NO: 510 - protein, 171 aa, Artificial Sequence
  Description of Artificial Sequence: synthetic amino acid sequence
MYGTKLRFNQDNIYFENPLMPSGTIIHSWYMLTDFAEDRVSPKLPILKKGRQYQFQFNFEVEPEGAAYFKMKFYRKNKEILSHQILKNKKENIVYPREAYSYELELINAGMNHLSFHNIIVQELREDSNQAYEATQYIDPKKKLKVINQIITNIRTHHLDSSNYHRSDMNG

SEQ ID NO: 511 - DNA, 603 bp, Artificial Sequence
  Description of Artificial Sequence: synthetic nucleic acid sequence
atgtatccaaaagatgtgcagattttaggagcaatcgctatgcatcaggggaatattgcagaaatgcaaacaggagaaggtaagacgcttacagctaccatgcctctgtacttaaatgcacttacaggtaaaggtgcttatctaatcacaacaaatgattacttagcaaaacgcgattttttagaaatgaaaccactatatgaatggctaggcttgtctgtatcattaggatttgtggacattccagaatatgaatacgctgaaaatgaaaaatatgaactgtaccaccatgacattgtttacacgactaatgggcgactagggtttgattatttaattgataatttagctgatgatattcgtgccaaatttttaccgaaattaaactttgctattattgatgaagtcgattctattatattagacgctgcccaaacgcctttagttatttctggtgcaccacgtgtacaatctaatttatttcataaacttaattctttagtcttttctttatcatctttaacagctttgaattggttaagtacatcgtctgacattttgatgccaggcacttcattatgtaagaaaagtgcgttgttataa

SEQ ID NO: 512 - protein, 200 aa, Artificial Sequence
  Description of Artificial Sequence: synthetic amino acid sequence
MYPKDVQILGAIAMHQGNIAEMQTGEGKTLTATMPLYLNALTGKGAYLITTNDYLAKRDFLEMKPLYEWLGLSVSLGFVDIPEYEYAENEKYELYHHDIVYTTNGRLGFDYLIDNLADDIRAKFLPKLNFAIIDEVDSIILDAAQTPLVISGAPRVQSNLFHKLNSLVFSLSSLTALNWLSTSSDILMPGTSLCKKSALL

SEQ ID NO: 513 - DNA, 813 bp, Artificial Sequence
  Description of Artificial Sequence: synthetic nucleic acid sequence
atgaataatgatgatagtgtgcaatttattgcactagaattaattagacctaatccttatcagccacgtaagacgtttgaagaagaacgactcaatgatttagcttcatcaattcaacaacatggtatattacagcctattgtattacgtcaaactgttcaaggttactatattgttgtgggtgagcgacgatttagagcatctcagttggcgggattaacagaagtgccagctattattaaagaactatctgatgaagatatgatggaattggcaattattgaaaatttacagagagaagatttaaatgccattgaagaagcagaaagttataaaaaaatgatgacagatttgaatattacacaacaagaggttgcgagacgattaggtaagtcacgtccttatattgccaatatgcttaggttattacagttacctaaaaatgttgctcaaatggttcaacaaggagcgttatcaagtgctcatgggcgtacgttattaactttgaaagacgccagtaaaataaaaaagacggcaaaacaagccactcaggagtcttggagtgtaaggtatttagaggagtacgtcaatggtttagtcagtaaagacatctcaatgaaactggacagagagaccaagggaagtaaaccgaaaatgattcaacagcaggaaagatttttaaaaaagcaatatggtgcgaaagtagatatttcgacatctaaaaatgtcgggaaaatcacgtttgaatttaaatctgaagcagaattcaaacgcttgattcgtcaacttaataaagattataaggaatattaa

SEQ ID NO: 514 - protein, 270 aa, Artificial Sequence
  Description of Artificial Sequence: synthetic amino acid sequence
MNNDDSVQFIALELIRPNPYQPRKTFEEERLNDLASSIQQHGILQPIVLRQTVQGYYIVVGERRFRASQLAGLTEVPAIIKELSDEDMMELAIIENLQREDLNAIEEAESYKKMMTDLNITQQEVARRLGKSRPYIANMLRLLQLPKNVAQMVQQGALSSAHGRTLLTLKDASKIKKTAKQATQESWSVRYLEEYVNGLVSKDISMKLDRETKGSKPKMIQQQERFLKKQYGAKVDISTSKNVGKITFEFKSEAEFKRLIRQLNKDYKEY

SEQ ID NO: 515 - DNA, 789 bp, Artificial Sequence
  Description of Artificial Sequence: synthetic nucleic acid sequence
atgattttaatttatatccttgtagcgattgttgttatagcaattttgaataagattattgagcaagcatttaaaattcaaaataaaagcaaaaaaggaaataaaaaacgttcaaaaacactgatttctcttgtacaaaacatagtaaaatatatcgtatggtttgttgttatcacaacaattttaagtaagtttggtattagcgtcgaaggtatcatcgctagtgctggagttgtaggtattgcagttggtttcggtgcgcaaacaatagtaaaagatattattacaggtttctttattatctttgaaaatcaatttgatgtgggtgactatgttaaaatcaatagttcaggaactacggtagcagaaggtactgtgaaatctattggtttaagatcaacgcgaattaatacaatttcgggagaactgactattttacctaatggtagcatgggggaaattacgaacttttcaattacaaatgggactgctattgtagaactaccagtatcagttgatgaaaatatagatcaagttgaaaagaaactcaatcgtttatttgtttctttacgtagtaaatattacttatttgtcagcgatccagttgttgatggcattgatgcgatagaatctaataaggttactatacgaatttcagcggaaacaattcctggtgaaggattttcaggcgctcgtattattcgtaaggaagctcaaaaaatgtttagacaagaaggtattcgcatgccacaaccagtcatttcaaattataatgaagaaaaaagctaa

SEQ ID NO: 516 - protein, 262 aa, Artificial Sequence
  Description of Artificial Sequence: synthetic amino acid sequence
MILIYILVAIVVIAILNKIIEQAFKIQNKSKKGNKKRSKTLISLVQNIVKYIVWFVVITTILSKFGISVEGIIASAGVVGIAVGFGAQTIVKDIITGFFIIFENQFDVGDYVKINSSGTTVAEGTVKSIGLRSTRINTISGELTILPNGSMGEITNFSITNGTAIVELPVSVDENIDQVEKKLNRLFVSLRSKYYLFVSDPVVDGIDAIESNKVTIRISAETIPGEGFSGARIIRKEAQKMFRQEGIRMPQPVISNYNEEKS

SEQ ID NO: 517 - DNA, 738 bp, Artificial Sequence
  Description of Artificial Sequence: synthetic nucleic acid sequence
atggttcaacctaaaaaaacaattcctacaacttttgagtttactgatattgcaggtattgttaaaggtgcatctaagggcgaaggtttaggaaataaattcctttcacatattcgtgaagtagatgctatatgtcaggtggttcgtgcgtttgacgatgagaatgtaacacatgtatcagggcgtgttaatccgcttgatgacatagaagtcattaatatggaacttgttttagcagatttagaatctgttgaaaaacgtttaccgaaaatagagaagatggctcgtcaaaaagataaaacagctgagatggaattacgtatattaacacaaattaaagaagcgttagaagacggtaaaccagtacgcagtattgatttcaatgaggatgatcaaaagtgggttaatcaagctcagttattaacatctaagaaaatgttatacattgctaatgttggtgaagatgaaattggagataaagataatgataaagtgaaagcaattcgtgaatatgcagcaaacgaagattcagaagttatcgttattagtgcaaaaatcgaggaagaaatcgctacattagatgatgaagataaagaaatgttcttagaagatttaggcatcgaagaaccaggtttagacagactcattagaacaacatatgatttgatcataaaaaggctttggcgtttacaccagaggataggggaaaagttaaggataagtttggtgtctatgtga

SEQ ID NO: 518 - protein, 245 aa, Artificial Sequence
  Description of Artificial Sequence: synthetic amino acid sequence
MVQPKKTIPTTFEFTDIAGIVKGASKGEGLGNKFLSHIREVDAICQVVRAFDDENVTHVSGRVNPLDDIEVINMELVLADLESVEKRLPKIEKMARQKDKTAEMELRILTQIKEALEDGKPVRSIDFNEDDQKWVNQAQLLTSKKMLYIANVGEDEIGDKDNDKVKAIREYAANEDSEVIVISAKIEEEIATLDDEDKEMFLEDLGIEEPGLDRLIRTTYDLIIKRLWRLHQRIGEKLRISLVSM

SEQ ID NO: 519 - DNA, 819 bp, Artificial Sequence
  Description of Artificial Sequence: synthetic nucleic acid sequence
gtgaaggataataatgaagtattaaagttatttatagtttcagattcaattggagaaacagcgcaacggatgattcatgcgacgctgacacagtttccagatttaactcaagtagaaattaagaaatttccatatattaaggacgaacaagaatttttaaatgtcttacaattagctaaagaacagaatgcaattgttgcaacaacattagtgagtgagtcatttaatgcattaggtcatcagtttgcaaatgaacatcaaattccctatgtagattacatgtctgagttaattagcataattaaacaacatacacacgctaaaccattaatggaaagtggtgcgttgcgtaagcttaatgatgagtattttaagcgtatagaagcaattgagtattcagtgaaatatgatgatggtaagcattttacagatattggagaagcggatgctttaatagtaggtgtatcacgtacctctaaaacgccattaagtatgtacttagctaataaaggatataagattgcaaatattcctttagtccctgaagtggctattccagataatgtatttcaacaaaagaatttaaaggtatttggattaacagcaagtcccaattatatcgcaaatatacgacgtaatcgtgcagaaacattagggctatcttcagaatctaattacaatagtttagagcgtatcaaaaaagaattatcttatgctgaagaagtttttagaaaattaaatgcaacggtaattaatacagaatataaatcgatagaggaatcggcattttatattgaaaagtttttagctaaacgttaa

SEQ ID NO: 520 - protein, 272 aa, Artificial Sequence
  Description of Artificial Sequence: synthetic amino acid sequence
VKDNNEVLKLFIVSDSIGETAQRMIHATLTQFPDLTQVEIKKFPYIKDEQEFLNVLQLAKEQNAIVATTLVSESFNALGHQFANEHQIPYVDYMSELISIIKQHTHAKPLMESGALRKLNDEYFKRIEAIEYSVKYDDGKHFTDIGEADALIVGVSRTSKTPLSMYLANKGYKIANIPLVPEVAIPDNVFQQKNLKVFGLTASPNYIANIRRNRAETLGLSSESNYNSLERIKKELSYAEEVFRKLNATVINTEYKSIEESAFYIEKFLAKR

SEQ ID NO: 521 - DNA, 924 bp, Artificial Sequence
  Description of Artificial Sequence: synthetic nucleic acid sequence
atgaaaaaattttggggaattttattaattgtgatgtcaattgctcttgtgggatgttcgaatagcaatgattcagatcaatcttctaatgaaaagtcatcatcaaaaagttcggagaaaaaaacggatgtggcgactgaatatacaaaagagaacgaatataaagaactagaaaaagaagctaaggatcttaaacaaaagccagttcttaatgaaatcgatgcacttattacagaaaaaggttttacaaacaaaacgggattgcaaggctgggaagactataaaaaattagtggataaggtaacacttgcagattataaatacacaaaagaatctaaagggtcatctatagaagaagttaataagttctttaaagataaaaaaggtgtagagattaaacgaatgaaaagtaaggaaaaaaatattaagcatatcaattatatgtatgtagatccagatggtaaaaaagcaggtaaagataagcaacctatgtcctacgctcaaatacttgcaacatttaaagaaggtaaattagtagctacaaatattcaacctggattttttgctttagacaaaaagaaaatggttaaagctaaagacttagaaaaagttaagacattggaagatttaacgcgtttgaaagatcctaaagcgacatcatatggtattttacagacgaaatataaagggaaaccatacactcaagtttcaatattaggcagtgattctgatgaagagaatgatatttcctcagccatcttagcttattatctattttcaccaacggaattagatagtgacgataatcataaatacgttgaagttgcatcagcgccattcttaagtgctcaaaacgatttttcatcttatcaactaggcgtatttaaaaaaattatcgaaagtagtatgtcgttcgatgaataa

SEQ ID NO: 522 - protein, 307 aa, Artificial Sequence
  Description of Artificial Sequence: synthetic amino acid sequence
MKKFWGILLIVMSIALVGCSNSNDSDQSSNEKSSSKSSEKKTDVATEYTKENEYKELEKEAKDLKQKPVLNEIDALITEKGFTNKTGLQGWEDYKKLVDKVTLADYKYTKESKGSSIEEVNKFFKDKKGVEIKRMKSKEKNIKHINYMYVDPDGKKAGKDKQPMSYAQILATFKEGKLVATNIQPGFFALDKKKMVKAKDLEKVKTLEDLTRLKDPKATSYGILQTKYKGKPYTQVSILGSDSDEENDISSAILAYYLFSPTELDSDDNHKYVEVASAPFLSAQNDFSSYQLGVFKKIIESSMSFDE

SEQ ID NO: 523 - DNA, 633 bp, Artificial Sequence
  Description of Artificial Sequence: synthetic nucleic acid sequence
atgaagttaagagatattaagcgttatgagtctacagaggtcacttcaatagaacggcataatggctattattcagtgaaaaccgatcaatcttcaacaattgaagcgcacaaaattatcgttgcaggtggcgcatggtcttcgcaattattaacacaatatcatctacaacgacaagtgattggcgttaaaggtgaagttatcttattagaaaataacgatctttcacttactgagacattatttatgactaatggttgttacatcgttccaaaacaacccaatcgttttttaattggtgcgacgagtgaatttaataattattctgtcggtactacagatgaaggtatggattggcttcttcgccatgcatatcatcgtgtacctcaactaaaagacagtcatatactgaagaaatggtcaggagtaagaccatacacagaaaaagaaatgccagtcatggatcaaattgatgatggcttatacgtgataagtggtcattatcgaaacggaatattattgtcacctattatcggtcgtgacattgccaattggctactttctggtattaaaccatcacgttattcaagttttacagttacaaggaggaataatcatgaagtgtatcattaa

SEQ ID NO: 524 - protein, 210 aa, Artificial Sequence
  Description of Artificial Sequence: synthetic amino acid sequence
MKLRDIKRYESTEVTSIERHNGYYSVKTDQSSTIEAHKIIVAGGAWSSQLLTQYHLQRQVIGVKGEVILLENNDLSLTETLFMTNGCYIVPKQPNRFLIGATSEFNNYSVGTTDEGMDWLLRHAYHRVPQLKDSHILKKWSGVRPYTEKEMPVMDQIDDGLYVISGHYRNGILLSPIIGRDIANWLLSGIKPSRYSSFTVTRRNNHEVYH

SEQ ID NO: 525 - DNA, 411 bp, Artificial Sequence
  Description of Artificial Sequence: synthetic nucleic acid sequence
atggggactacacaagaattaccagtaaaaaccaaaagtttaaataagaaaaccattgagcaaaaagtttttcttattcgtaatgataatggtcaatatttacttgaaaagcgtaaagaaaaacttcttaatggtatgtggcaatttccaatgagagaacaaacaaatgcaaacgatgtgatatctgatgatttaggaaaaagtatcgaaacaattaacgaaccagtatttaaattaaagcatcaatttacccatcttacatgggaaattaaagtatacaatgttacagcacctcttaatataaaggaaaatgatttacctaaacaaatgacgtggtttaatttagatgatagggagcagtatatatttcccgtaccaatggataaaatatataagtttattgaaggttaa

SEQ ID NO: 526 - protein, 136 aa, Artificial Sequence
  Description of Artificial Sequence: synthetic amino acid sequence
MGTTQELPVKTKSLNKKTIEQKVFLIRNDNGQYLLEKRKEKLLNGMWQFPMREQTNANDVISDDLGKSIETINEPVFKLKHQFTHLTWEIKVYNVTAPLNIKENDLPKQMTWFNLDDREQYIFPVPMDKIYKFIEG

SEQ ID NO: 527 - DNA, 648 bp, Artificial Sequence
  Description of Artificial Sequence: synthetic nucleic acid sequence
gtgactaagacagacttatctcatttgcacaacattacaggcattcctctcaatacattgtggtaccaaaaggaacgtggcacatataacgataaattgaagtgcttctttacggacacaatgccgagagtgaataagaaacaagagtttaacgaaagagttgtagcaaaagatgaaatttggaagtacagcgagaagtatgacttatacgtaagcaacttaggcagaatgaaaagacctgatggaaaatacaagtttgcgaatggttgtaagggtattttcacagttatttataagaataagaagtatcgtgcagcagatattgtgtatgaaacgtttatcggtaacttgaaaaacggattgcacgcatatccgaaagatagtagatacaacaactttatttcagataacttattccaatctacattacagaaatatagattgtatcgcagaaataaaggtgtatccaaaccagtatacctagtggatagcgacaacaaaattgtagaagaattcgcaagtacagtagaagctggaaaagtattattcatcgacagacgcaacattgctagaaagtgcaaccgtagatatgtgagtgacgggttgatgtacatgtgggctgatgagtacgagaaggtaaatgcatga

SEQ ID NO: 528 - protein, 215 aa, Artificial Sequence
  Description of Artificial Sequence: synthetic amino acid sequence
VTKTDLSHLHNITGIPLNTLWYQKERGTYNDKLKCFFTDTMPRVNKKQEFNERVVAKDEIWKYSEKYDLYVSNLGRMKRPDGKYKFANGCKGIFTVIYKNKKYRAADIVYETFIGNLKNGLHAYPKDSRYNNFISDNLFQSTLQKYRLYRRNKGVSKPVYLVDSDNKIVEEFASTVEAGKVLFIDRRNIARKCNRRYVSDGLMYMWADEYEKVNA

SEQ ID NO: 529 - DNA, 414 bp, Artificial Sequence
  Description of Artificial Sequence: synthetic nucleic acid sequence
atgtggaacgtagaaacgatttatatcgaagatgaatgggttaaagttaatgacggttcgatatacggaattacaaaggatttagttagagattatgtattaatgcaatcaacaggcttaaaagataagaacggtgtagagatatacgagggggacatcatcgaatttgaggatgaatctttttgttatccattcgatgatgaagctatagttgaaacaataaatagagcacaggtaattatagataaggttaaaggtatttttttggaaaactttatggtaaaggacagtacgattgctaaagaatataaatattattatgatttgccaacatctgaaaaaacaatattttttaaagaatgtagtgttgtaggtaatgtgtttgaagatgaaaatttactggaggacgagtaa

SEQ ID NO: 530 - protein, 137 aa, Artificial Sequence
  Description of Artificial Sequence: synthetic amino acid sequence
MWNVETIYIEDEWVKVNDGSIYGITKDLVRDYVLMQSTGLKDKNGVEIYEGDIIEFEDESFCYPFDDEAIVETINRAQVIIDKVKGIFLENFMVKDSTIAKEYKYYYDLPTSEKTIFFKECSVVGNVFEDENLLEDE

SEQ ID NO: 531 - DNA, 1566 bp, Artificial Sequence
  Description of Artificial Sequence: synthetic nucleic acid sequence
atgaaaccgttggaacaagcgatcaatgataataaaaagaaaaaacgttttaactttagaatgccaggtgcatttatgattctctttatcctaacagttgtcgcagttatagcaacttggataatccccgcgggtgcatactcaaaactttcatatgaaccttcatcccaagaattaaaaattgtcaatcctcatcatcaagtaaaaaaagttcctggaacacaaaaggagcttgatcgattaggagttaaaatcaaaatagaacaatttaaatctggtgcaattaataaacccgtttcaattcctaatacttacgaacgtctaaaacaacatccagctggtcttgatcaaattactagtagcatggttaaaggaaccatcgaagccgtcgatattatggtctttatacttgttctaggtggactgattggtattgttcaagcgagcgggtcctttgaatcaggattgttagcacttactcaaaaaacgaaaggccacgaatttatgttgattatgttcgtagcaattttaatgattctgggtggaacactatgtggcattgaagaggaagctgtagcgttctatcctgtactcgttccaatatttattgcgcttggatatgattctattgtctcagtcggtgcaattttcttagcaagctctgtgggtagtacattctcaacaatcaacccattctcagtcgtcattgcttctaatgcagcaggaacaacttttactgatggtctttattggagaataggcgcttgtatcatcggtgccatatttgttattagttatttattctggtattgtaaaaaaattaaaaaagatcctaaatcctcttattcttatgaagacaaagcagcatttgaaaaacagtggtctgtgctccatgatgacggttcttctgagtttacattacgtaaaaagattattcttacgcttttcgtcctaccattccctattatggtttggggcgtcatgacacaaggatggtggttcccagtcatggcatctgcattcttgatctttaccattgtcatcatgtttattgctggaacaggacaatatggtttaggcgaaaaaggcactgtagatgcattcgttaatggcgcttcaagtttagtaggtgtatctttaatcattggtttagctcgaggaatcaacttagtattgaataaaggaatgatttctgacacaatcttgcacttttcatcatctatcgtgcaacatatgagtgggcctttatttatcattgttctgctctttatctttttctgtttaggatttatcgtgccgtcctcatcaggattagcagtactatctatgcctatctttgcgccattagctgatacagtaggtataccaagatttgttattgttacaacatatcaattcggtcagtatgcaatgttgttcttagcgcctactggacttgtaatggcaacacttcaaatgttaaacatgcgctactcacactggttacgtttcgtatggcctgttgtcgcgtttgttttaatatttggtggaggcttacttattacacaagttttaatatactcataa

SEQ ID NO: 532 - protein, 521 aa, Artificial Sequence
  Description of Artificial Sequence: synthetic amino acid sequence
MKPLEQAINDNKKKKRFNFRMPGAFMILFILTVVAVIATWIIPAGAYSKLSYEPSSQELKIVNPHHQVKKVPGTQKELDRLGVKIKIEQFKSGAINKPVSIPNTYERLKQHPAGLDQITSSMVKGTIEAVDIMVFILVLGGLIGIVQASGSFESGLLALTQKTKGHEFMLIMFVAILMILGGTLCGIEEEAVAFYPVLVPIFIALGYDSIVSVGAIFLASSVGSTFSTINPFSVVIASNAAGTTFTDGLYWRIGACIIGAIFVISYLFWYCKKIKKDPKSSYSYEDKAAFEKQWSVLHDDGSSEFTLRKKIILTLFVLPFPIMVWGVMTQGWWFPVMASAFLIFTIVIMFIAGTGQYGLGEKGTVDAFVNGASSLVGVSLIIGLARGINLVLNKGMISDTILHFSSSIVQHMSGPLFIIVLLFIFFCLGFIVPSSSGLAVLSMPIFAPLADTVGIPRFVIVTTYQFGQYAMLFLAPTGLVMATLQMLNMRYSHWLRFVWPVVAFVLIFGGGLLITQVLIYS

SEQ ID NO: 533 - DNA, 405 bp, Artificial Sequence
  Description of Artificial Sequence: synthetic nucleic acid sequence
atgggaggttatggtgcaatcaaatttgcattaacgcaaagttatcgtttctcaaaagccgctatgctttcagcgccatatgatgtttctatgattggtcaatatcaatggtatgattttactccagaagcgattgtaggtaatacgcaacatgtcgcggggacatcttttgatccatactatttagttgaacaagcaatagacaatggacaaacgttaccacaactatatattacttgtggaactgaagatgaattgtatcaaggtaatattgattttgtgaactatttagatgaaaaaggtatttcatatcaatttaaaaaagcgccaggtcatcacgattatgcattttgggataaagcaatagaagatgtcattgaccgttttacatcatcacatatttaa

SEQ ID NO: 534 - protein, 134 aa, Artificial Sequence
  Description of Artificial Sequence: synthetic amino acid sequence
MGGYGAIKFALTQSYRFSKAAMLSAPYDVSMIGQYQWYDFTPEAIVGNTQHVAGTSFDPYYLVEQAIDNGQTLPQLYITCGTEDELYQGNIDFVNYLDEKGISYQFKKAPGHHDYAFWDKAIEDVIDRFTSSHI

SEQ ID NO: 535 - DNA, 408 bp, Artificial Sequence
  Description of Artificial Sequence: synthetic nucleic acid sequence
atgataaataaaggcccactcatatgttgcacgatagatgatgaaaagtgcaagattgtgtcagaaatcattcctttattcaatactaagttgattcctcgagctaaaccaatgattaaagatacacctactaaacttgaagcgccattaacgaatgcatctacagtgcctttttcgcctaaaccatattgtcctgttccagcaataaacatgatgacaatggtaaagatcaagaatgcagatgccatgactgggaaccaccatccttgtgtcatgacgccccaaaccataatagggaatggtaggacgaaaagcgtaagaataatctttttacgtaatgtaaactcagaagaaccgtcatcatggagcacagaccactgtttttcaaatgctgctttgtcttcataa

SEQ ID NO: 536 - protein, 135 aa, Artificial Sequence
  Description of Artificial Sequence: synthetic amino acid sequence
MINKGPLICCTIDDEKCKIVSEIIPLFNTKLIPRAKPMIKDTPTKLEAPLTNASTVPFSPKPYCPVPAINMMTMVKIKNADAMTGNHHPCVMTPQTIIGNGRTKSVRIIFLRNVNSEEPSSWSTDHCFSNAALSS

SEQ ID NO: 537 - DNA, 429 bp, Artificial Sequence
  Description of Artificial Sequence: synthetic nucleic acid sequence
atggaaataacaaatgttaatcatatttgtttttcagtgagtgatttaaatacctctatacaattttataaagatattttacatggtgacttattagtatcagatagaacgacagcatatttaactattggtcatacttggattgcactgaatctagaaaaaaatataccaaggaatgaaataagtcattcctatacgcacgttgctttctccatagatgaagaagattttcaacagtggattcaatggcttaaagagaatcaagtaaatattttaaaagggcgaccaagagacattaaagacaaaaaatcgatatattttacagatctggatgggcataaaattgaattacatactggaacattaaaagatagaatggaatattataaatgtgagaagacgcatatgcaattttacgatgagttttga

SEQ ID NO: 538 - protein, 142 aa, Artificial Sequence
  Description of Artificial Sequence: synthetic amino acid sequence
MEITNVNHICFSVSDLNTSIQFYKDILHGDLLVSDRTTAYLTIGHTWIALNLEKNIPRNEISHSYTHVAFSIDEEDFQQWIQWLKENQVNILKGRPRDIKDKKSIYFTDLDGHKIELHTGTLKDRMEYYKCEKTHMQFYDEF

SEQ ID NO: 539 - DNA, 999 bp, Artificial Sequence
  Description of Artificial Sequence: synthetic nucleic acid sequence
atgctaatttttaagaaaaaggagttaaagattatgacattaaacctagctcaacgtgtgttaaatcaagagtcattaacaaaagatgaagcaatatctattttcgaaaatgctgaaattgatacatttgatttattaaatgaagcctacacagtgagaaaacattactatggtaaaaaagttaagcttaatatgatattaaatgctaaaagtggtatctgtgcagaagattgtgggtactgtgggcaatctgtaaaaatgaaagaaaagcaacgttatgcacttgttgaacaggaccaaattaaagaaggcgctcaagtggcaactgaaaatcaaatcggtacatactgtattgttatgagtggtagaggtcctagtaacagagaagtcgatcatatttgcgaaacagtagaagatattaaaaagatacacccacaactaaagatttgtgcgtgcttaggattaacgaaagaagaacaggctaaaaaattaaaggctgctggtgtcgatcgttataatcataatttaaatacgagtgagcgttatcacgatgaagtagtaactacacatacatatgaggatagagtgaatacggttgaaatgatgaaagataataatatttctccttgttcaggtgtgatatgtggtatgggagagtcgaatgaggacattattgatatggcatttgctttaagagccatcgatgctgatagcattcctattaattttttacatcctattaaaggaactaaatttggtggattagatttattgtcaccaatgaaatgtttaagaattatagcgatgtttaggttaatcaatccaacaaaagaaattcgaattgcaggtggacgggaggtaaatctacgttcattacaaccactcgcattgaaagcggctaattcaatttttgtaggagattacttaattacaggcggtcaaccgaatgaggaagattatcgcatgattgaagatttagggtttgaaatcgacagttaa

SEQ ID NO: 540 - protein, 332 aa, Artificial Sequence
  Description of Artificial Sequence: synthetic amino acid sequence
MLIFKKKELKIMTLNLAQRVLNQESLTKDEAISIFENAEIDTFDLLNEAYTVRKHYYGKKVKLNMILNAKSGICAEDCGYCGQSVKMKEKQRYALVEQDQIKEGAQVATENQIGTYCIVMSGRGPSNREVDHICETVEDIKKIHPQLKICACLGLTKEEQAKKLKAAGVDRYNHNLNTSERYHDEVVTTHTYEDRVNTVEMMKDNNISPCSGVICGMGESNEDIIDMAFALRAIDADSIPINFLHPIKGTKFGGLDLLSPMKCLRIIAMFRLINPTKEIRIAGGREVNLRSLQPLALKAANSIFVGDYLITGGQPNEEDYRMIEDLGFEIDS

SEQ ID NO: 541 - DNA, 741 bp, Artificial Sequence
  Description of Artificial Sequence: synthetic nucleic acid sequence
atggatgcaccaacagcagcagtatctgttatttataacgaagatggatcatttagtggttatgaattctaccctaaaaaccctgatacagttatcgtagattctgaaattgttgcacaagcacctgtacgtttatttgcatcaggtatgagtgatggtttagcaacattaatcgaagttgaatctacacttcgtagacaagggcaaaacatgttccatggcaaacctacattagcaagtttagcaatcgctcaaaaatgtgaagaggttatttttgaatatggttacagtgcttatacttctgtagaaaaacatatcgtgacaccacaagtagatgctgtgattgaagccaatacattactttcaggtttaggatttgaaaacggcggattagcaggtgcacacgcaattcataatggattcacagctttagaaggggatatccaccacttaactcatggtgaaaaagtggcatacggtattttagtacaattagtacttgaaaatgcgccaactgaaaaattcatgaaatacaaaacattcttcgataatatcaatatgccaacaacattagaaggtcttcacattgaaaacacaagttatgaagaattagttcaagtaggtgaacgtgcattaacaccaaatgatacgtttgctaacttaagtgataaaatcactgctgatgaaatcgcagacgcaattttaactgttaatgatttatctaaaagtcagttcaactaa

SEQ ID NO: 542 - protein, 246 aa, Artificial Sequence
  Description of Artificial Sequence: synthetic amino acid sequence
MDAPTAAVSVIYNEDGSFSGYEFYPKNPDTVIVDSEIVAQAPVRLFASGMSDGLATLIEVESTLRRQGQNMFHGKPTLASLAIAQKCEEVIFEYGYSAYTSVEKHIVTPQVDAVIEANTLLSGLGFENGGLAGAHAIHNGFTALEGDIHHLTHGEKVAYGILVQLVLENAPTEKFMKYKTFFDNINMPTTLEGLHIENTSYEELVQVGERALTPNDTFANLSDKITADEIADAILTVNDLSKSQFN

SEQ ID NO: 543 - DNA, 353 bp, Artificial Sequence
  Description of Artificial Sequence: synthetic nucleic acid sequence
atgaaaaagttaattcaagataaaaacacaattttaaaagatatgcttgatggaattacagtttcaaacaacgatgttgaagttgtatctgacactattgttgttagaaagcataaaaaacaatcaggtgttgcactcgtttctgggggcggcagtggacatgaacctgcacacgcaggatttgtagcagaaggcatgctcgatgcagctgtatgtggagaaatcttcacttcacctacacctgataaaatattagatgccattaaagctgtggacaatggtgacggcgttctacttgttattaaaaactatgcaggagacgttatgaactttgaaatggctcaagaaatggc

SEQ ID NO: 544 - protein, 118 aa, Artificial Sequence
  Description of Artificial Sequence: synthetic amino acid sequence
MKKLIQDKNTILKDMLDGITVSNNDVEVVSDTIVVRKHKKQSGVALVSGGGSGHEPAHAGFVAEGMLDAAVCGEIFTSPTPDKILDAIKAVDNGDGVLLVIKNYAGDVMNFEMAQEMA

SEQ ID NO: 545 - DNA, 1599 bp, Artificial Sequence
  Description of Artificial Sequence: synthetic nucleic acid sequence
atgagtggtgaaactggctcaggaaaatctatcattattgatgccattggacagttaatcggtatgagagcttcttctgattacgtcagacatggtgaaaagaaagcaattatcgaaggtatctttgatatagacgagagtaaagacgcaattaatatactagaatcattagctatagatgttgatgaagattttttattagttaaaagagaaattttcagttctggtaagagtatttgtcgtattaataaccaaactgtcactctacaggacttaagaaaagtgatgcaagaactgcttgatattcatggtcaacatgaaacgcaatctttacttaagcaaaaatatcatcttcaactattagatgattatgcagacaatcagtattcagatttacttaatcaatatcaactttcttataaccaatataaaaataaacgtaaagaattagaggaattagaatccgcggaccaggctttattacaacgattagacttaatgaaatttcaattagaggaactaaccgaagcttcactgaaagaaggcgaagtggaccaacttgaatccgatattaaaagaattcaaaactccgaaaaattaaatctagctttaaacaatgcacatcaagttctaactgatgaaagtgcaatacccgataggttgtacgaattaagcaactacttgcaaacgattaatgatatcgttccagaaaaattcgtaagattaaaagaggacattgatcaattttactatatgctagaagatgcaaagcatgaaatttacgacgaaatggctaacactgaattcgatgagcaagttttaaatgagtatgaatccagaatgaatttacttaataatttaaaacgtaaatatggtaaggatattactgaacttattgcttatcagagtaaacttgcaaatgaaattgataaaatagaaaactatgaacaaagtacatcacaattaagggaagaaattaaaacgctttataacgaagtgatagatataggaaaaaaactttctcaagaacgtaggcgtgtagcgagagagttaagggaccatattgtttctgaaatacaaaatttacaaatgaaagatgctaaccttgaaatttcgtttaaaccattagatgaacctacaattgaaggtattgaatttgtggaatttttaattagtccaaatcgtggtgaaccacttaaaagtcttaataaaatcgcttcaggtggtgaactttcaagaattatgcttgctctaaaaagtatatttgttaaatcacgcggccaaaccgcgattctttttgatgaagttgactcgggtgtatctggtcaagcagcacaaaaaatggctgaaaaaatgcgagatattgctcaatatatacaagttatttgtatttcacacttacctcaggtagcttcaatgagtgaccatcatcttctaataagcaaggcatccaatgccgatagaactacaactcaagtcaaagaattgaaagatgaaaacaaaatagatgaaatagcacgtatgatttcaggagcaagtgtgactgagctcacgagagaaaatgcaaaagaaatgattaagcaaaatcacaatatttaa

SEQ ID NO: 546 - protein, 532 aa, Artificial Sequence
  Description of Artificial Sequence: synthetic amino acid sequence
MSGETGSGKSIIIDAIGQLIGMRASSDYVRHGEKKAIIEGIFDIDESKDAINILESLAIDVDEDFLLVKREIFSSGKSICRINNQTVTLQDLRKVMQELLDIHGQHETQSLLKQKYHLQLLDDYADNQYSDLLNQYQLSYNQYKNKRKELEELESADQALLQRLDLMKFQLEELTEASLKEGEVDQLESDIKRIQNSEKLNLALNNAHQVLTDESAIPDRLYELSNYLQTINDIVPEKFVRLKEDIDQFYYMLEDAKHEIYDEMANTEFDEQVLNEYESRMNLLNNLKRKYGKDITELIAYQSKLANEIDKIENYEQSTSQLREEIKTLYNEVIDIGKKLSQERRRVARELRDHIVSEIQNLQMKDANLEISFKPLDEPTIEGIEFVEFLISPNRGEPLKSLNKIASGGELSRIMLALKSIFVKSRGQTAILFDEVDSGVSGQAAQKMAEKMRDIAQYIQVICISHLPQVASMSDHHLLISKASNADRTTTQVKELKDENKIDEIARMISGASVTELTRENAKEMIKQNHNI

SEQ ID NO: 547 - DNA, 1422 bp, Artificial Sequence
  Description of Artificial Sequence: synthetic nucleic acid sequence
atgtcagaaaaacaatacgatttagtcgtgttaggtggtggtacggcaggatatgtagccgccatcagagcttctcaattaggaaaaaaagtagcgatagtagaaaaatcactcttaggtggtacgtgtttacataaaggatgtatacctactaaagcacttttaaaatcggctgaagtcaatcatactattaaaaacgcgcatacatttggaattgatgtcaatcattttaaaattaatttccctaaaattttagaacgtaaagatgctattgttaagcaattgcatgaaggcgtcaatcaactgatgaaacatcatcatatagatatttataacggtattggacgaattatgggaacatctatattttctcctcaaagcggtacaatttctgtggaatatgaagacggcgaatcagatatactccctaataaaaatgtgcttatagctactgggtcatcaccacagtctcttccgttcattaaatttgaccataaacaaatactatcgagtgatgatatcctaaggttaaatacactaccacaaagattagcaatcataggtggaggtgttattggtttagaatttgcatctctgatgaatgatttaggtgctgatgtagtagtaatcgaagcgaatgacagagttcttcctaccgagagcacacaagttgcgtcattgctaaaagaagaattaactaatcgaggcgttacattctacgaaaatattcaattgaccaaagatcattttaaccaaactgataagggtgtaactattaatatttcagatgagcccgtccaattcgataaagtacttgttgcaattggtagaaagcctaatacaaatgatattggtttaaataacactcaaattaagacttctgatgctggtcatattataacaaatggttatcagcaaactgaagataaacatatatacgcagcaggagattgtatagggcaattacaattggcacacgtcggttcaaaagaagctatagttgcagttgaacatatgtttgattgttctcctatacctatcaattatgacctgataccaaaatgtgtttatacaaacccagaaattgcttcaattggtaaaaatttagaacaagcaaaaaaagcaggcatcaaagcaaaaagtatcaaagttccttttaaagctataggaaaggcaataattgaggatgtaacccaatcaaaaggattttgcgagatggtagttaacaaagatgacgatgaaatcataggtcttaatatgatagggccacatgttacagaattaataaatgaaatttcattgttacaatttatgaatggctcatctttagaacttggtttaacaacacatgcacatccttcattatccgaggtagtcatggaattaggtttaaaagctaatggtcaagcaattcatgtatag

SEQ ID NO: 548 - protein, 473 aa, Artificial Sequence
  Description of Artificial Sequence: synthetic amino acid sequence
MSEKQYDLVVLGGGTAGYVAAIRASQLGKKVAIVEKSLLGGTCLHKGCIPTKALLKSAEVNHTIKNAHTFGIDVNHFKINFPKILERKDAIVKQLHEGVNQLMKHHHIDIYNGIGRIMGTSIFSPQSGTISVEYEDGESDILPNKNVLIATGSSPQSLPFIKFDHKQILSSDDILRLNTLPQRLAIIGGGVIGLEFASLMNDLGADVVVIEANDRVLPTESTQVASLLKEELTNRGVTFYENIQLTKDHFNQTDKGVTINISDEPVQFDKVLVAIGRKPNTNDIGLNNTQIKTSDAGHIITNGYQQTEDKHIYAAGDCIGQLQLAHVGSKEAIVAVEHMFDCSPIPINYDLIPKCVYTNPEIASIGKNLEQAKKAGIKAKSIKVPFKAIGKAIIEDVTQSKGFCEMVVNKDDDEIIGLNMIGPHVTELINEISLLQFMNGSSLELGLTTHAHPSLSEVVMELGLKANGQAIHV

SEQ ID NO: 549 - DNA, 999 bp, Artificial Sequence
  Description of Artificial Sequence: synthetic nucleic acid sequence
atgatagattacaagtcagcaggccttacagaagaagacctcaaaaaaatatataaatggatggacttaggaagaaaaacagacgaaaggctatggttactcaatcgtgcaggtaaaattccatttgttgtcagtggtcaagggcaggaagcaactcaaattggtatggcatatgcaatgcaaaaaggtgatatctcatcaccttattatcgtgatttagcatttgtcacttatatgggaatttctccattggatactatgttatcagcttttggaaaacgtgatgacattaactcaggaggtaaacaaatgccttctcattttagtcacaaagaaaaaggcattttatctcaaagttctccagtagccactcaaataccacattctgtcggtgctgcattagcacttaaaatggataacaagccaaatattgctaccgcaacagttggagaaggcagttcaaatcaaggtgactttcacgaaggtatgaactttgctgcagttcacaaattacctttcgtctgtgtaataattaacaataaatatgcgatatctgtaccagattcactacaatatgctgctgaaaagttatcagatcgtgcattaggttacggtatgcatggaatacaggtagatggaaatgacccaattgcagtatacaaagcgatgaaagaagcaagagaacgagcgctagcaggtgaaggtccaacattgatagaagctgtcacttcacgtatgacaccacattcatctgatgatgatgatacatatcgtacaaaagaagaaagagacctattgaaacaagaggattgtaatataaaatttaaaacggccttactcgatcaaggcatcataaacgaaaattggttgagtcaattggaaaaagagcataaagaactcattaatgaagctactaaatctgctgaagcagcaccatatccttcagaagaagaagctttgacatatgtttatgaagagggaggtcaacgaaatgactaa

SEQ ID NO: 550 - protein, 332 aa, Artificial Sequence
  Description of Artificial Sequence: synthetic amino acid sequence
MIDYKSAGLTEEDLKKIYKWMDLGRKTDERLWLLNRAGKIPFVVSGQGQEATQIGMAYAMQKGDISSPYYRDLAFVTYMGISPLDTMLSAFGKRDDINSGGKQMPSHFSHKEKGILSQSSPVATQIPHSVGAALALKMDNKPNIATATVGEGSSNQGDFHEGMNFAAVHKLPFVCVIINNKYAISVPDSLQYAAEKLSDRALGYGMHGIQVDGNDPIAVYKAMKEARERALAGEGPTLIEAVTSRMTPHSSDDDDTYRTKEERDLLKQEDCNIKFKTALLDQGIINENWLSQLEKEHKELINEATKSAEAAPYPSEEEALTYVYEEGGQRND

SEQ ID NO: 551 - DNA, 1185 bp, Artificial Sequence
  Description of Artificial Sequence: synthetic nucleic acid sequence
gtgccttcaacaatttctggaacaataacagaattagtggttgaagaaggacaaactgtcaatattaacacggtgatttgtaaaatcgattcggaaaatggtcaaaatcaaacagaatcggcaaatgagtttaaggaagaacaaaatcagcattctcaatcaaatataaacgtgtcacaattcgaaaataatcctaaaactcatgaaagtgaggtgcatacagcctctagtcgcgcaaataacaatggacgattttcaccagttgtctttaaattagcttctgaacatgatattgatttaacacaagtcaaaggaactggttttgaaggtcgtgttactaagaaagatattcaaaatattattaacaatccaaacgatcaagaaaaagagaaagaatttaaacaaacagataaaaaagatcattcaacgaaccattgtgactttttacatcaatcctcaactaaaaacgaacactcaccattatcaaatgaacgtgtcgtaccagttaaaggtattagaaaagctatcgcacaaaatatggttactagtgtcagcgaaataccacacggttggatgatggttgaagctgatgcaacgaatttggttcagactagaaactatcataaagctcaatttaaacagaatgagggttacaatttaactttctttgcgttttttgtaaaagctgttgcagaggctttaaaagtaaatccattactcaatagtacatggcaaggagatgaaattgttatccacaaagatattaatatctctattgctgttgcagacgatgataagttgtatgtgccagtcattaaaaatgcagatgaaaaatcaattaaaggtatcgcgcgtgaaatcaatgatttagctactaaagcaagattaggaaaattagcacaaagtgatatgcaaaacggtacatttacggttaataatactggttcttttggttctgtttcttcaatgggaatcattaatcatccacaagctgccattttacaagtagaatcagtcgttaagaaacctgtagttatagatgatatgattgcaattagaaatatggttaatttgtgtatttcaatcgatcatcgtattctcgatggtgttcaaacgggaaaatttatgaatcttgttaagaaaaaaatagaacaatattctattgaaaacacttctatttattaa

SEQ ID NO: 552 - protein, 394 aa, Artificial Sequence
  Description of Artificial Sequence: synthetic amino acid sequence
VPSTISGTITELVVEEGQTVNINTVICKIDSENGQNQTESANEFKEEQNQHSQSNINVSQFENNPKTHESEVHTASSRANNNGRFSPVVFKLASEHDIDLTQVKGTGFEGRVTKKDIQNIINNPNDQEKEKEFKQTDKKDHSTNHCDFLHQSSTKNEHSPLSNERVVPVKGIRKAIAQNMVTSVSEIPHGWMMVEADATNLVQTRNYHKAQFKQNEGYNLTFFAFFVKAVAEALKVNPLLNSTWQGDEIVIHKDINISIAVADDDKLYVPVIKNADEKSIKGIAREINDLATKARLGKLAQSDMQNGTFTVNNTGSFGSVSSMGIINHPQAAILQVESVVKKPVVIDDMIAIRNMVNLCISIDHRILDGVQTGKFMNLVKKKIEQYSIENTSIY

SEQ ID NO: 553 - DNA, 327 bp, Artificial Sequence
  Description of Artificial Sequence: synthetic nucleic acid sequence
atgattcccattgaagaaacagaaccaaaagaaccagtattattaaccgtaaatgtaccgttttgcatatcactttgtgctaattttcctaatcttgctttagtagctaaatcattgatttcacgcgcgatacctttaattgatttttcatctgcatttttaatgactggcacatacaacttatcatcgtctgcaacagcaatagagatattaatatctttgtggataacaatttcatctccttgccatgtactattgagtaatggatttacttttaaagcctctgcaacagcttttacaaaaaacgcaaagaaagttaaattgtaa

SEQ ID NO: 554 - protein, 108 aa, Artificial Sequence
  Description of Artificial Sequence: synthetic amino acid sequence
MIPIEETEPKEPVLLTVNVPFCISLCANFPNLALVAKSLISRAIPLIDFSSAFLMTGTYNLSSSATAIEILISLWITISSPCHVLLSNGFTFKASATAFTKNAKKVKL

SEQ ID NO: 555 - DNA, 312 bp, Artificial Sequence
  Description of Artificial Sequence: synthetic nucleic acid sequence
atgactacctcggataatgaaggatgtgcatgtgttgttaaaccaagttctaaagatgagccattcataaattgtaacaatgaaatttcatttattaattctgtaacatgtggccctatcatattaagacctatgatttcatcgtcatctttgttaactaccatctcgcaaaatccttttgattgggttacatcctcaattattgcctttcctatagctttaaaaggaactttgatactttttgctttgatgcctgctttttttgcttgttctaaatttttaccaattgaagcaatttctgggtttgtataa

SEQ ID NO: 556 - protein, 103 aa, Artificial Sequence
  Description of Artificial Sequence: synthetic amino acid sequence
MTTSDNEGCACVVKPSSKDEPFINCNNEISFINSVTCGPIILRPMISSSSLLTTISQNPFDWVTSSIIAFPIALKGTLILFALMPAFFACSKFLPIEAISGFV

SEQ ID NO: 557 - DNA, 504 bp, Artificial Sequence
  Description of Artificial Sequence: synthetic nucleic acid sequence
atgagaattgtctaccacgcattaattaacaatgacaaagataaaattttagatattaaccaaaaactcttcgtacaaaatctacctaaagaaacgcgtattggcgctaagcaaatgggtacacgcatggtaaaattagctttagatctttatgatagtgaatggattcaatggtattataatcaaatgaaaaacaataaaattaagcttcatcctgctgtgtgctttactatgctaggacattttttaggtgtagatgtggaatccatcattgattattatttatatcaaaatatctctagccttacccaaaatgcagtaagagcgattcctttaggacaaacagctggacagcaagtcgtaactgaaatgatagcccatattgagaagacacgacatcacatactagaattggacgaaatcgattttggtatgactgctcccggcttggaacttaatcaaatggaacatgaaaatgttcatgttcgaatctttatttcatag

SEQ ID NO: 558 - protein, 167 aa, Artificial Sequence
  Description of Artificial Sequence: synthetic amino acid sequence
MRIVYHALINNDKDKILDINQKLFVQNLPKETRIGAKQMGTRMVKLALDLYDSEWIQWYYNQMKNNKIKLHPAVCFTMLGHFLGVDVESIIDYYLYQNISSLTQNAVRAIPLGQTAGQQVVTEMIAHIEKTRHHILELDEIDFGMTAPGLELNQMEHENVHVRIFIS

SEQ ID NO: 559 - DNA, 546 bp, Artificial Sequence
  Description of Artificial Sequence: synthetic nucleic acid sequence
gtggttaaacgccttgcgaaaaaaatgagtattggcgttattactaatgatatctatactaaagaagatgaaaaaatactagttaatacaggtgttttaccagaagatagaattatcggtgtggaaactggaggttgtcctcatacagctattcgtgaagacgcctcaatgaacttcgcagccatagatgaattattagaacgtaatgatgatattgaacttatttttattgaatcaggtggcgataacttagcggctacttttagtccagaactcgttgacttttcaatttatatcattgatgttgctcagggcgaaaagattccacgtaaaggtggacaaggtatgattaaatctgatttcttcattattaataaaactgaccttgcaccatatgtgggtgcttcattagatcaaatggctaaagatactgaagtatttcgtggaaatcatccattcgcttttacaaatttaaaaactgatgaaggtttagaaaaagttattgagtggattgagcacgacgtcttactgaaagggttaacttaa

SEQ ID NO: 560 - protein, 181 aa, Artificial Sequence
  Description of Artificial Sequence: synthetic amino acid sequence
VVKRLAKKMSIGVITNDIYTKEDEKILVNTGVLPEDRIIGVETGGCPHTAIREDASMNFAAIDELLERNDDIELIFIESGGDNLAATFSPELVDFSIYIIDVAQGEKIPRKGGQGMIKSDFFIINKTDLAPYVGASLDQMAKDTEVFRGNHPFAFTNLKTDEGLEKVIEWIEHDVLLKGLT

SEQ ID NO: 561 - DNA, 652 bp, Artificial Sequence
  Description of Artificial Sequence: synthetic nucleic acid sequence
gtgccaactttctatattgtcaatgtgggtggaggttatctagatggagatagataccgtgtcaatgtcaacttagaagataatgcacaagtgacgcttacttctcaaggtgcaactaaaatatataaaacgcctaatgaccatgtagaacagtatcaaacgtttaatttatcaaatcaatcgtatatggaatttgtagcagatcctattattgcctatgaaaacgctaaatttttccaacataatacgtttaatcttaaagaagatagtgctatattttacacagatatattgactcccggctattcatctaatggccaagatttcacgtataattatatgcatcttactaatgaaatttacattgacaatcaattagttgttttcgataacatgatgttaagtcctgataaaagccgacttgacggtattgggtatatggaaaattatacacacttaggatcagcttattttattcatccagatgtaaaccaaagtttcatagacgatatttacgtggcggttgctgattttcaaaaacaatacgactgtagaataggtatctcacaattacctactcatggattggccgttcgtattttgactaaaagaactcaaataatagaagaaattttgactcgtgttcaatcat

SEQ ID NO: 562 - protein, 218 aa, Artificial Sequence
  Description of Artificial Sequence: synthetic amino acid sequence
  MOD_RES (218): variable amino acid
VPTFYIVNVGGGYLDGDRYRVNVNLEDNAQVTLTSQGATKIYKTPNDHVEQYQTFNLSNQSYMEFVADPIIAYENAKFFQHNTFNLKEDSAIFYTDILTPGYSSNGQDFTYNYMHLTNEIYIDNQLVVFDNMMLSPDKSRLDGIGYMENYTHLGSAYFIHPDVNQSFIDDIYVAVADFQKQYDCRIGISQLPTHGLAVRILTKRTQIIEEILTRVQSX

SEQ ID NO: 563 - DNA, 369 bp, Artificial Sequence
  Description of Artificial Sequence: synthetic nucleic acid sequence
atggctaatcaagaacaaatcattgaagcaattaaagaaatgtcagtattagaattaaacgatttagtaaaagcaattgaagaagaatttggtgtaactgcagcagctccagtagcagcagcaggtgcagctggtggcggagatgcagcagctgaaaaaactgaatttgatgttgaattaacttcagctggatcttcaaaaattaaagttgttaaagcagttaaagaagcaactggcttaggattaaaagatgctaaagaattagtagatggagctcctaaagtaattaaagaagctatgcctaaagaagatgctgaaaaacttaaagaacaattagaagaagttggagctagcgtagaattaaaatag

SEQ ID NO: 564 - protein, 122 aa, Artificial Sequence
  Description of Artificial Sequence: synthetic amino acid sequence
MANQEQIIEAIKEMSVLELNDLVKAIEEEFGVTAAAPVAAAGAAGGGDAAAEKTEFDVELTSAGSSKIKVVKAVKEATGLGLKDAKELVDGAPKVIKEAMPKEDAEKLKEQLEEVGASVELK

SEQ ID NO: 565 - DNA, 735 bp, Artificial Sequence
  Description of Artificial Sequence: synthetic nucleic acid sequence
atgcaaatacaacctgaattctttgagaagttaaaaccccgttattccaataacggggtttttcaattaattaatacaagcatactaaatgcttttggattgaatgataaaaatagaggtgaagaaatgagtcattattatgatgaacaacctgatgttaaaagtaacccaaaaagaattagttatcaaattaaaaatgcgcaactagagcttactactgatgctggagttttttcaaaagataatgtagattttggatctgacttactaattaaaacttttttaaaagaacatcctccaggcccaagtaaaaccatcgcggatgtaggatgtggatatggtcctatcggtttagcaataggaaaagtatctccacaccatcaaatcacaatgttggatattaacaatagagccttggcgttggcagaaatgaataagacgaaaaatcaagtggataatgtaacgattatagaaagcgattgtttatctgctgtcaatcatcagtgctttgattacattttaactaatccccctattagagctggtaaggacattgttcatcgaatctttgaacaagcgtttgacagactcaagactacgggtgaactttatgtcgtcattcaaaaaaagcaaggtatgccttcagctaaaaagaaaatagaagaactatttggcaatgtagaaattatagctaagagtaaaggatattatattttgaaaagtataaaaggttga

SEQ ID NO: 566 - protein, 244 aa, Artificial Sequence
  Description of Artificial Sequence: synthetic amino acid sequence
MQIQPEFFEKLKPRYSNNGVFQLINTSILNAFGLNDKNRGEEMSHYYDEQPDVKSNPKRISYQIKNAQLELTTDAGVFSKDNVDFGSDLLIKTFLKEHPPGPSKTIADVGCGYGPIGLAIGKVSPHHQITMLDINNRALALAEMNKTKNQVDNVTIIESDCLSAVNHQCFDYILTNPPIRAGKDIVHRIFEQAFDRLKTTGELYVVIQKKQGMPSAKKKIEELFGNVEIIAKSKGYYILKSIKG

SEQ ID NO: 567 - DNA, 1944 bp, Artificial Sequence
  Description of Artificial Sequence: synthetic nucleic acid sequence
atgttcagagatatttctccaattgaagatttcactggcaacctatctttagaatttgtagattacagattaggtgaacctaaatatgatttagaagaatcaaaaaaccgtgacgctacttatgctgcacctcttcgtgtgaaagtgcgtcttattattaaagaaactggtgaagttaaagaacaagaagtcttcatgggtgattttccactgatgacagatacaggtacgttcgtaattaatggtgctgaacgtgttatcgtatctcaattagttcgttcaccatccgtgtattttaacgagaaaatcgataaaaatggacgtgaaaactatgatgcaacaatcattcctaaccgtggtgcttggttagagtatgagacagatgctaaagatgttgtatatgttcgtatcgatagaacacgtaaattaccattgactgtattactacgtgcgctaggtttctcaactgatcaagaaattgttgacttattaggagacagcgaatatttacgtaatacattagaaaaagatgggacagaaaatacagaacaggctttattagagatttatgaacgtttacgtcctggcgaaccaccaacagtagaaaatgctaaaagtttattatattctcgtttcttcgaccctaaacgctatgatttagccagtgtaggtcgttataaagcgaacaaaaaattacacctaaaacatcgtttgttcaatcaaaaattagcagaaccaattgttaacagtgaaactggtgaaattgttgttgacgaaggaacagtgttagatcgtcgtaaacttgacgaaatcatggacgtattagaaacaaacgctaatagcgaagtatttgaacttgaaggtagcgtaattgacgaacctgtagaaatccaatctattaaagtgtatgtgcctaacgatgaagaaggtcgtacgactactgtcattggtaatgcattacctgattctgaagttaaatgtattactccagcagatattgttgcctcaatgagttatttcttcaacttattgaatggcattggttatacagatgatattgatcatctaggtaatcgtcgtttacgttctgtcggtgagctattacaaaatcaattccgtatcggtttatccagaatggaacgtgttgttcgtgaaagaatgtcaatacaagatacagattctattacgccacaacaactcattaatatcagaccagttattgcatcaatcaaagaattctttggtagttcacaattatctcaattcatggaccaagctaacccgttagcagagttaacgcacaaacgtcgtttatctgctctagggcctggtggattaacacgtgaacgtgctcaaatggaagtgcgtgacgttcactactctcactatgggcgtatgtgtccaattgaaacacctgagggtcctaatattggtttaataaactcattgtcaagttatgctagagtgaatgaatttggttttattgaaacgccatatcgtaaagtggatttagatacaaactcaatcactgatcaaatagattatttgacagctgatgaagaggatagttacgttgttgcacaggctaattctagacttgatgaaaatggtcgtttcttagatgatgaagttgtttgtcgtttccgtggtaataacactgttatggctaaagaaaaaatggattacatggacgtatcaccaaaacaagttgtttcagcagcaacagcatgtattccattcttagaaaatgacgactctaaccgtgcgttaatgggagcaaacatgcaacgtcaagcggtgcctttaatgaatccggaagctccatttgtgggtacaggtatggaacacgtatccgcaagagactctggtgctgcaattactgctaagcatagaggacgcgttgagcatgttgaatctaatgaaattttagttcgtcgtttagtc

SEQ ID NO: 568 - protein, 648 aa, Artificial Sequence
  Description of Artificial Sequence: synthetic amino acid sequence
MFRDISPIEDFTGNLSLEFVDYRLGEPKYDLEESKNRDATYAAPLRVKVRLIIKETGEVKEQEVFMGDFPLMTDTGTFVINGAERVIVSQLVRSPSVYFNEKIDKNGRENYDATIIPNRGAWLEYETDAKDVVYVRIDRTRKLPLTVLLRALGFSTDQEIVDLLGDSEYLRNTLEKDGTENTEQALLEIYERLRPGEPPTVENAKSLLYSRFFDPKRYDLASVGRYKANKKLHLKHRLFNQKLAEPIVNSETGEIVVDEGTVLDRRKLDEIMDVLETNANSEVFELEGSVIDEPVEIQSIKVYVPNDEEGRTTTVIGNALPDSEVKCITPADIVASMSYFFNLLNGIGYTDDIDHLGNRRLRSVGELLQNQFRIGLSRMERVVRERMSIQDTDSITPQQLINIRPVIASIKEFFGSSQLSQFMDQANPLAELTHKRRLSALGPGGLTRERAQMEVRDVHYSHYGRMCPIETPEGPNIGLINSLSSYARVNEFGFIETPYRKVDLDTNSITDQIDYLTADEEDSYVVAQANSRLDENGRFLDDEVVCRFRGNNTVMAKEKMDYMDVSPKQVVSAATACIPFLENDDSNRALMGANMQRQAVPLMNPEAPFVGTGMEHVSARDSGAAITAKHRGRVEHVESNEILVRRLV

SEQ ID NO: 569 - DNA, 2145 bp, Artificial Sequence
  Description of Artificial Sequence: synthetic nucleic acid sequence
gtggatgatgtgacaaaatatggtccagttgatggagatccgatcacgtcaacggaagaaattccattcgacaagaaacgtgaattcaatcctgatttaaaaccaggtgaagagcgtgttaaacaaaaaggtgaaccaggaacaaaaacaattacaacaccaacaactaagaacccattaacaggggaaaaagttggcgaaggtgaaccaacagaaaaaataacaaaacaaccagtagatgaaatcacagaatatggtggcgaagaaatcaagccaggccataaggatgaatttgatccaaatgcaccgaaaggtagccaagaggacgttccaggtaaaccaggagttaaaaaccctgatacaggcgaagtagtcacaccaccagtggatgatgtgacaaaatatggtccagttgatggagatccgatcacgtcaacggaagaaattccattcgacaagaaacgtgaattcaatcctgatttaaaaccaggtaaagagcgcgttaaacagaaaggtgaaccaggaacaaaaacaattacaacaccaacaactaagaacccattaacaggggaaaaagttggcgaaggtgaaccaacagaaaaagtaacaaaacaaccagtagatgaaatcacagaatatggtggcgaagaaatcaagccaggccataaggatgaatttgatccaaatgcaccgaaaggtagccaagaggacgttccaggtaaaccaggagttaaaaatcctgatacaggcgaagtagttactccaccagtggatgatgtgacaaaatatggtccagttgatggagatccgattacgtcaacggaagaaattccgtttgataaaaaacgcgaatttgatccaaacttagcgccaggtacagagaaagtcgttcaaaaaggtgaaccaggaacaaaaacaattacaacaccaacaactaagaacccattaacaggggaaaaagttggcgaaggtgaaccaacagaaaaagtaacaaaacaaccagtggatgaaatcgttcattatggtggcgaagaaatcaagccaggccataaggatgaatttgatccaaatgcaccgaaaggtagccaagaggacgttccaggtaaaccaggagttaaaaaccctgatacaggcgaagtagttactccaccagtggatgatgtgacaaaatatggtccagttgatggagatccgattacgtcaacggaagaaattccgtttgataaaaaacgcgaatttgatccaaacttagcgccaggtacagagaaagtcgttcaaaaaggtgaaccaggaacaaaaacaattacaacaccaacaactaagaacccattaacaggggaaaaagttggcgaaggtgaaccaacagaaaaagtaacaaaacaaccagtggatgaaatcgttcattatggtggcgaagaaatcaagccaggccataaggatgaatttgatccaaatgcaccgaaaggtagtcaaacaacgcaaccaggtaagccgggggttaaaaatcctgatacaggcgaagtagttactccacctgtggatgatgtgacaaaatatggtccagttgatggagatccgatcacgtcaacggaagaaattccattcgacaagaaacgtgaattcaatcctgatttaaaaccaggtgaagagcgtgttaaacaaaaaggtgaaccaggaacaaaaacaattacaacaccaacaactaagaacccattaacaggggaaaaagttggcgaaggtgaaccaacagaaaaaataacaaaacaaccagtagatgaaatcacagaatatggtggcgaagaaatcaagccaggccataaggatgaatttgatccaaatgcaccgaaaggtagccaagaggacgttccaggtaaaccaggagttaaaaaccctgatacaggcgaagtagtcacaccaccagtggatgatgtgacaaaatatggtccagttgatggagatccgatcacgtcaacggaagaaattccattcgacaagaaacgtgaattcaatcctgatttaaaaccaggtaaagagcgcgttaaacagaaaggtgaaccaggaacaaaaacaattacaacaccaacaactaagaacccattaacaggggaaaaagttggcgaaggtgaaccaacagaaaaagtaaca

SEQ ID NO: 570 - protein, 715 aa, Artificial Sequence
  Description of Artificial Sequence: synthetic amino acid sequence
VDDVTKYGPVDGDPITSTEEIPFDKKREFNPDLKPGEERVKQKGEPGTKTITTPTTKNPLTGEKVGEGEPTEKITKQPVDEITEYGGEEIKPGHKDEFDPNAPKGSQEDVPGKPGVKNPDTGEVVTPPVDDVTKYGPVDGDPITSTEEIPFDKKREFNPDLKPGKERVKQKGEPGTKTITTPTTKNPLTGEKVGEGEPTEKVTKQPVDEITEYGGEEIKPGHKDEFDPNAPKGSQEDVPGKPGVKNPDTGEVVTPPVDDVTKYGPVDGDPITSTEEIPFDKKREFDPNLAPGTEKVVQKGEPGTKTITTPTTKNPLTGEKVGEGEPTEKVTKQPVDEIVHYGGEEIKPGHKDEFDPNAPKGSQEDVPGKPGVKNPDTGEVVTPPVDDVTKYGPVDGDPITSTEEIPFDKKREFDPNLAPGTEKVVQKGEPGTKTITTPTTKNPLTGEKVGEGEPTEKVTKQPVDEIVHYGGEEIKPGHKDEFDPNAPKGSQTTQPGKPGVKNPDTGEVVTPPVDDVTKYGPVDGDPITSTEEIPFDKKREFNPDLKPGEERVKQKGEPGTKTITTPTTKNPLTGEKVGEGEPTEKITKQPVDEITEYGGEEIKPGHKDEFDPNAPKGSQEDVPGKPGVKNPDTGEVVTPPVDDVTKYGPVDGDPITSTEEIPFDKKREFNPDLKPGKERVKQKGEPGTKTITTPTTKNPLTGEKVGEGEPTEKVT

SEQ ID NO: 571 - DNA, 315 bp, Artificial Sequence
  Description of Artificial Sequence: synthetic nucleic acid sequence
gtgatttcatctactggttgttttgttattttttctgttggttcaccttcgccaactttttcccctgttaatgggttcttagttgttggtgttgtaattgtttttgttcctggttcacctttttgtttaacacgctcttcacctggttttaaatcaggattgaattcacgtttcttgtcgaatggaatttcttccgttgacgtgatcggatctccatcaactggaccatattttgtcacatcatccacaggtggagtaactacttcgcctgtatcaggatttttaacccccggcttacctggttgcgttgtttga

SEQ ID NO: 572 - protein, 104 aa, Artificial Sequence
  Description of Artificial Sequence: synthetic amino acid sequence
VISSTGCFVIFSVGSPSPTFSPVNGFLVVGVVIVFVPGSPFCLTRSSPGFKSGLNSRFLSNGISSVDVIGSPSTGPYFVTSSTGGVTTSPVSGFLTPGLPGCVV

SEQ ID NO: 573 - DNA, 921 bp, Artificial Sequence
  Description of Artificial Sequence: synthetic nucleic acid sequence
gtgatttcatctactggttgttttgttactttttctgttggttcaccttcgccaactttttcccctgttaatgggttcttagttgttggtgttgtaattgtttttgttcctggttcacctttctgtttaacgcgctctttacctggttttaaatcaggattgaattcacgtttcttgtcgaatggaatttcttccgttgacgtgatcggatctccatcaactggaccatattttgtcacatcatccactggtggtgtgactacttcgcctgtatcagggtttttaactcctggtttacctggaacgtcctcttggctacctttcggtgcatttggatcaaattcatccttatggcctggcttgatttcttcgccaccatattctgtgatttcatctactggttgttttgttattttttctgttggttcaccttcgccaactttttcccctgttaatgggttcttagttgttggtgttgtaattgtttttgttcctggttcacctttttgtttaacacgctcttcacctggttttaaatcaggattgaattcacgtttcttgtcgaatggaatttcttccgttgacgtgatcggatctccatcaactggaccatattttgtcacatcatccacaggtggagtaactacttcgcctgtatcaggatttttaaccccccggcttacctggttgcgttgtttgactacctttcggtgcatttggatcaaattcatccttatggcctggcttgatttcttcgccaccataatgaacgatttcatccactggttgttttgttattttttctgttggttcaccttcgccaactttttctcctgtattaggattgacataagttggtgttgttgttgtttcaattcctggttcacctttttggactactttttctgtacctggggctaa

SEQ ID NO: 574 - protein, 306 aa, Artificial Sequence
  Description of Artificial Sequence: synthetic amino acid sequence
VISSTGCFVTFSVGSPSPTFSPVNGFLVVGVVIVFVPGSPFCLTRSLPGFKSGLNSRFLSNGISSVDVIGSPSTGPYFVTSSTGGVTTSPVSGFLTPGLPGTSSWLPFGAFGSNSSLWPGLISSPPYSVISSTGCFVIFSVGSPSPTFSPVNGFLVVGVVIVFVPGSPFCLTRSSPGFKSGLNSRFLSNGISSVDVIGSPSTGPYFVTSSTGGVTTSPVSGFLTPRLTWLRCLTTFRCIWIKFILMAWLDFFATIMNDFIHWLFCYFFCWFTFANFFSCIRIDISWCCCCFNSWFTFLDYFFCTWG

SEQ ID NO: 575 - DNA, 441 bp, Artificial Sequence
  Description of Artificial Sequence: synthetic nucleic acid sequence
atgacgtacttgcgctattggagtcacttacgctcgttgatgttgacgcactttctgaagtcgatgtactcgttgatcctgaaagactcgtacttgtcgagccacttaatgacgtacttgtactgtttgattcactcgttgatgcagatgcgctatcagacatcgacgtactcgctgattctgataacttcttacttgtactcgctgattcactctcactcgttgatgtggatgcactttctgatgtcgacgtgcttgttgaatctgaaacgcttgtgcttgtcgactcacttaaagatgtgcttgcactgtttgagtcgctcacacttgttgacgttgacgcactgtctgatgtcgatgtactcgttgaatccgaaatgcttgtacttgtcgagtcacttaaggacgtacttgcactgtttgagtagcttacactcatag

SEQ ID NO: 576 - protein, 146 aa, Artificial Sequence
  Description of Artificial Sequence: synthetic amino acid sequence
MTYLRYWSHLRSLMLTHFLKSMYSLILKDSYLSSHLMTYLYCLIHSLMQMRYQTSTYSLILITSYLYSLIHSHSLMWMHFLMSTCLLNLKRLCLSTHLKMCLHCLSRSHLLTLTHCLMSMYSLNPKCLYLSSHLRTYLHCLSSLHS

SEQ ID NO: 577 - DNA, 927 bp, Artificial Sequence
  Description of Artificial Sequence: synthetic nucleic acid sequence
atggaagacgtgacagatattgtctttcggcatgttgtcagtgaagctgcgagaccagatgtattttttactgaatttaccaatactgagagttactgtcaccctgaaggtattcatagtgtgcgcggacgcttaacttttagtgacgacgaacaaccaatggtagcgcacatctggggcgataaaccagaacaattccgagaaatgagtatcggcttagcggatatgggttttaaaggtatagatttaaatatgggttgccctgtcgcaaacgttgcgaaaaaaggtaaaggatccggcttaattctacgacctgaaacggcagccgaaatcattcaagcttctaaagcaggtggtctaccggtcagtgtaaaaacacgtttaggttattacgatatcgatgaatggcgagactggttaaaacacgtcttcgaacaagatatcgcaaatttatccattcatctacgtacccgtaaagagatgagtaaagtagatgcacactgggaattaatcgaagcaatcaagacattacgtgatgaaattgcgccaaatacactattaactatcaatggtgatatccccgatagacaaactggtctagaactcgcaaataaatatggtattgatggcattatgattggtagagggatcttccataacccattcgcatttgaaaaggaaccacgcgaacattcaagcaaagaattattaggtttattacgcttacatctctctttatttgaaaaatatgataaagatgaagcccgacacttcaaaagtttacgcagattcttcaaaatctacgtacgcggcattagaggcgctagcgaactccgccatcaattaatgaacacccaatccattgccgaagcaagagaactactcgatacttttgaagcacgtatggatgcacgttcagaagtataa

SEQ ID NO: 578 - protein, 308 aa, Artificial Sequence
  Description of Artificial Sequence: synthetic amino acid sequence
MEDVTDIVFRHVVSEAARPDVFFTEFTNTESYCHPEGIHSVRGRLTFSDDEQPMVAHIWGDKPEQFREMSIGLADMGFKGIDLNMGCPVANVAKKGKGSGLILRPETAAEIIQASKAGGLPVSVKTRLGYYDIDEWRDWLKHVFEQDIANLSIHLRTRKEMSKVDAHWELIEAIKTLRDEIAPNTLLTINGDIPDRQTGLELANKYGIDGIMIGRGIFHNPFAFEKEPREHSSKELLGLLRLHLSLFEKYDKDEARHFKSLRRFFKIYVRGIRGASELRHQLMNTQSIAEARELLDTFEARMDARSEV

SEQ ID NO: 579 - DNA, 411 bp, Artificial Sequence
  Description of Artificial Sequence: synthetic nucleic acid sequence
atgtcaaaaaagaaaatcttgatctttattagtgtcatattaatcatttttgggggcttttatctcaaaatgaaatataacgaaaaagaaaaacagaaagaaatctactacaaagagcaacaagaacgtatcacgctttatcttaaatacaacactaaagaacctaatatcatcaaatctgtccatttcacaagtttaaaacagggaccaatgggtgacgctgttattgaaggctatatcaataacaataaaaaagatgattttgttgcatttgcatcacctgaaaacaattatcaatttggaggcagacttatagcagacgttaaaatatttaaattacttaaaccggctaatgaatctaaatcacccgatgaaatcaaaaaagatttagacaaaaagaaagaacactaa

SEQ ID NO: 580 - protein, 136 aa, Artificial Sequence
  Description of Artificial Sequence: synthetic amino acid sequence
MSKKKILIFISVILIIFGGFYLKMKYNEKEKQKEIYYKEQQERITLYLKYNTKEPNIIKSVHFTSLKQGPMGDAVIEGYINNNKKDDFVAFASPENNYQFGGRLIADVKIFKLLKPANESKSPDEIKKDLDKKKEH

SEQ ID NO: 581 - DNA, 579 bp, Artificial Sequence
  Description of Artificial Sequence: synthetic nucleic acid sequence
atgctaggatttgcagggggattgggatacagtcattataaagattcaaaatcgaacactgatgtagcttcaaaagagactcagacttccaataaaaacactcatgaagatacaacttcacaaggtaaaatgcaaaatcaagttaatagccaaacaaacgaagtatcaaatgggacatcaactaaaacacttagtgaaaaagcaaagcagttaagagaagcttttaacgtcaatgatgaggaagctcaaattttagcagatgaaatcgatagagcagatgtaaataaagatggcacgattacaacggatgaaatgacgcctactttagatcgttttacaaaagaagggaaattccaaccatctgctggtggtacaactagcgaaacacctcaccctaaatatacagcagaagatgctagacatatgtctgatgatgaatttctagacgcgtatacagaaggcatgtcagatgatgaagctgctactattcacgaaagtgctcaagaatctaacgagtatatgaaatttttaagaggacaagttgaagcacgtgcaaaaggacagggcggtaattattaa

SEQ ID NO: 582 - protein, 192 aa, Artificial Sequence
  Description of Artificial Sequence: synthetic amino acid sequence
MLGFAGGLGYSHYKDSKSNTDVASKETQTSNKNTHEDTTSQGKMQNQVNSQTNEVSNGTSTKTLSEKAKQLREAFNVNDEEAQILADEIDRADVNKDGTITTDEMTPTLDRFTKEGKFQPSAGGTTSETPHPKYTAEDARHMSDDEFLDAYTEGMSDDEAATIHESAQESNEYMKFLRGQVEARAKGQGGNY

SEQ ID NO: 583 - DNA, 786 bp, Artificial Sequence
  Description of Artificial Sequence: synthetic nucleic acid sequence
atgcaacattcaagcaaaataatagtatttgtaagtttcttaattttaacgatttttattggaggatgtggttttataaataaagaagatagcaaagaaacggaaatcaaacaaaactttaataaaatgttagacgtgtatccaactaaaaatctagaagacttttatgataaagagggctatcgtgatgaagagtttgataaagatgacaaaggaacatggattattaggtctgaaatgacaaaacagccaaaaggtaaaattatgacctcaagaggtatggttctctatatcaatcgcaacactagaacagccaaagggtattttttaatagataagataaaagatgatagtaatggtagaccgatagagaatgaaaagaaataccctgtaaaaatgaaccataataagatctttccaacaaagccaatatctgatgataagttaaaaaaagaaattgaaaacttcaaattttttgtgcaatatggaaattttaaaaacttaaaggattataaaaacggggatattttatacaatcctaatgttcctagttattctgcgaaatatcaattgagtaataatgaatataacgtacaacaattaagaaaaagatatgacatcccaactaaaaaagcacctaaactattgttaaaaggggatggcgacttaaaaggatcatccgtaggtcatagagacctagaatttacctttgtagagaataagaaagaaaacatcttttttacggatagtattaattttaaaccgactgagcgtgatgaatcatga

SEQ ID NO: 584 - protein, 261 aa, Artificial Sequence
  Description of Artificial Sequence: synthetic amino acid sequence
MQHSSKIIVFVSFLILTIFIGGCGFINKEDSKETEIKQNFNKMLDVYPTKNLEDFYDKEGYRDEEFDKDDKGTWIIRSEMTKQPKGKIMTSRGMVLYINRNTRTAKGYFLIDKIKDDSNGRPIENEKKYPVKMNHNKIFPTKPISDDKLKKEIENFKFFVQYGNFKNLKDYKNGDILYNPNVPSYSAKYQLSNNEYNVQQLRKRYDIPTKKAPKLLLKGDGDLKGSSVGHRDLEFTFVENKKENIFFTDSINFKPTERDES

SEQ ID NO: 585 - DNA, 969 bp, Artificial Sequence
  Description of Artificial Sequence: synthetic nucleic acid sequence
atgacttactgctcattatctataaagatttatacattgaaaatattaattgttttaacaataggaggtcatgttgttattatgagtcagtttaaggacacattatataaactatttgagccaatgatgaaaatagagttctatcaaaatcttttggttaatcttttaattatacttgcttatatcttgatgggtatgattgtaattgcgatatcaagaaagttagttactaaatttttcaacgttaatgaaaagaaaaagaaccgtcataaaattaagagaagtgaaacactatccacattgattcaaaatttaataagttatgtcgtatggtttattgtccttacgtcaatactttcacgtttcggtattagtgtatcagcaattttagcaggagctggagttgttggtgttgccgttggtttcggagcacaaacaattgtaaaagacattattactggtttctttatcatatttgaaggacagtttgatgtgagtgattatgttcaaattaatgcatctggggtaacaattgctgaaggtacggttaaaacgattggtttaagatcaacgcgtatacaatcagatactggagaaatttatacattacctaatggtatgattagtgaaatagttaattattctgctacagatgtttcacctattgtgatgataccgatttctccaaatgagaattataaagtgatagaagagaaattattaacatttttacctacattaaagaataaatatgacatatttgtatccgcaccagatttacttggtttagatagtgttgatggcaatgaaatggtgattaaacttttagcacatgttaagcctggaatgcattttccaggacaacgtttacttcgtaaagaggtcatacaatactttagtgaagaaggcattcatattccgaaaccaacacttgtaaaacttgataaagaattgaataaaaaagaatag

SEQ ID NO: 586 - protein, 322 aa, Artificial Sequence
  Description of Artificial Sequence: synthetic amino acid sequence
MTYCSLSIKIYTLKILIVLTIGGHVVIMSQFKDTLYKLFEPMMKIEFYQNLLVNLLIILAYILMGMIVIAISRKLVTKFFNVNEKKKNRHKIKRSETLSTLIQNLISYVVWFIVLTSILSRFGISVSAILAGAGVVGVAVGFGAQTIVKDIITGFFIIFEGQFDVSDYVQINASGVTIAEGTVKTIGLRSTRIQSDTGEIYTLPNGMISEIVNYSATDVSPIVMIPISPNENYKVIEEKLLTFLPTLKNKYDIFVSAPDLLGLDSVDGNEMVIKLLAHVKPGMHFPGQRLLRKEVIQYFSEEGIHIPKPTLVKLDKELNKKE

SEQ ID NO: 587 - DNA, 819 bp, Artificial Sequence
  Description of Artificial Sequence: synthetic nucleic acid sequence
atgaagatgacaaaacgcttaatattattcgactttgatgaaacttactacaaacatcatacgcatcaagcgaatatgccttatttaagagaaatggaaggtttattacagaatataactactaaaaacaatgtcattacggctattttaacaggaagtactatagaaagcgtacttcaaaaaatgagtaacgttggtatgtcatataaacctcaacatattttttcagatttaagttctaaaatgtttacatggaataactgtgaatatattgaatctgatgaatataaaaacgaagtgttgacagaacgtttcttattggaagatatattagatatattaaaacatgtttcttctaaacataaagtagcgtttataccacaaagaacttttcgagacaatgaaacattgtacaatttctatctctattcttcgggtgacacgcatttagataaaacaattttagaagacctcactcagtattctaagataagggactatacgatgacatttaatcgttgtaatcctttagcaggtgatcctgaaaatgcttatgatattaattttactccaagaaatgcaggaaaattatatgccacaaaatttttgatgaataaatatggtgttccaaaagaattgattattggctttggtgatagtggtaatgatgaagcgtttttaagttatttagatcacgcaatgattatgtctaacagtcaagatgaggaaatgaagcgtaaatttaaaaatacaaaatatccttattacaaaggtatttatacacatgtacgcgaatttatagaatctgataatgtttaa

SEQ ID NO: 588 - protein, 272 aa, Artificial Sequence
  Description of Artificial Sequence: synthetic amino acid sequence
MKMTKRLILFDFDETYYKHHTHQANMPYLREMEGLLQNITTKNNVITAILTGSTIESVLQKMSNVGMSYKPQHIFSDLSSKMFTWNNCEYIESDEYKNEVLTERFLLEDILDILKHVSSKHKVAFIPQRTFRDNETLYNFYLYSSGDTHLDKTILEDLTQYSKIRDYTMTFNRCNPLAGDPENAYDINFTPRNAGKLYATKFLMNKYGVPKELIIGFGDSGNDEAFLSYLDHAMIMSNSQDEEMKRKFKNTKYPYYKGIYTHVREFIESDNV

SEQ ID NO: 589 - DNA, 912 bp, Artificial Sequence
  Description of Artificial Sequence: synthetic nucleic acid sequence
atgaaaaaacatgtgttagcaatcggagcaattacagtaacaacattacttgcaggatgcgattttggagatttggtaggacagcatcagactgataagcaatcagaaaatagtaacactcaaaccgagcaagcttcaaataataaaaattcaaattctaataatggtcattcaagtaataacaataagtctagagatagagtcgaggatttaactcaatcgcaaaaagtagcattagctatcaatgatccctcagtttctcaatatgccgttaacgcaagtgaattaagaaatcattcattttatgcaaactataacggtgggggccaacgtaaaagtattcatacgtatcagttggaagcattaccaacaaaagtagaaggtgcacctagtgatatgaaattctatactgcaaaaccatctaaaggatcatttgtgacgcttatcggtattggtaatgaaaaggtattaattgcaggcacacaaagttcaggaacatatcaacaatatgcgcattcggaagcagcaagagaattagatttacatgaactattaaataaatacggtaaaagttcaaattataaagatatagcaaatcaaattgcgtttacacaaagtcaatcatcaaattcaagtgaatctaacacgtcagatgaagggacgtctaacagtgatagtgatacatctaatgatgataaagttacacgtagtaatgtgatagataaagttgaagcgtatgaaggtcacccattagatactgatacatatacatttaaagaacccgaacagaacgaagacggagattggggcttttctattttagataaggaaggcaacctcgaaggttcttatattgtgacatctgatggtgaagttacaaaatacgatgaaaacggggaagaaatagagtaa

SEQ ID NO: 590 - protein, 303 aa, Artificial Sequence
  Description of Artificial Sequence: synthetic amino acid sequence
MKKHVLAIGAITVTTLLAGCDFGDLVGQHQTDKQSENSNTQTEQASNNKNSNSNNGHSSNNNKSRDRVEDLTQSQKVALAINDPSVSQYAVNASELRNHSFYANYNGGGQRKSIHTYQLEALPTKVEGAPSDMKFYTAKPSKGSFVTLIGIGNEKVLIAGTQSSGTYQQYAHSEAARELDLHELLNKYGKSSNYKDIANQIAFTQSQSSNSSESNTSDEGTSNSDSDTSNDDKVTRSNVIDKVEAYEGHPLDTDTYTFKEPEQNEDGDWGFSILDKEGNLEGSYIVTSDGEVTKYDENGEEIE

SEQ ID NO: 591 - DNA, 327 bp, Artificial Sequence
  Description of Artificial Sequence: synthetic nucleic acid sequence
gtgctagacacatctttagctttatcaagtgcttttgtacctatgtcttttgctttgtcaaacgtagtaccacctatgtctcttgctttaccaccaatgtcttttactttattaacatcattttttacaccagagctaataacatctaatataccgtctttctttttagtacctttactaaatttaggtagttttttcttcttagtgtcatatcctgaattagataaaatagcatgtgtttgcgcgccactatatacacttgagcctttaggtaagaatgttgttgtatctttgttaggtgttagtgccattcttccgttaggataa

SEQ ID NO: 592 - protein, 108 aa, Artificial Sequence
  Description of Artificial Sequence: synthetic amino acid sequence
VLDTSLALSSAFVPMSFALSNVVPPMSLALPPMSFTLLTSFFTPELITSNIPSFFLVPLLNLGSFFFLVSYPELDKIACVCAPLYTLEPLGKNVVVSLLGVSAILPLG

SEQ ID NO: 593 - DNA, 450 bp, Artificial Sequence
  Description of Artificial Sequence: synthetic nucleic acid sequence
atgaaactgccaactgctttaaatatgccaattgtaccttttttgagtgcattccatgtatttttaactccagaccataatgcttttgctttattcactactgatttttttatagccgtccagattttaactgcggcattctttacagcattaaatattacaacaatacctttttttaatgcgttaaatacagatagaacacctttgcgcaaagctcgaacgattcctaacacaccattttttaatgcagtccaaactttaatagagaaactcttaatagcattaaatatcgtaactactatgcgcttaataaggttgatattaaattttacttgcgcaacatatgctttaataattgctataacaccgttctttaaggcggtccagattttaatagcagcatttttcatgccattccataaagctgataagacattttttaatgcttga

SEQ ID NO: 594 - protein, 149 aa, Artificial Sequence
  Description of Artificial Sequence: synthetic amino acid sequence
MKLPTALNMPIVPFLSAFHVFLTPDHNAFALFTTDFFIAVQILTAAFFTALNITTIPFFNALNTDRTPLRKARTIPNTPFFNAVQTLIEKLLIALNIVTTMRLIRLILNFTCATYALIIAITPFFKAVQILIAAFFMPFHKADKTFFNA

SEQ ID NO: 595 - DNA, 648 bp, Artificial Sequence
  Description of Artificial Sequence: synthetic nucleic acid sequence
gtgtctacttcccaattgattgtttcgaattccggacgagctaactcagggtttttctctaattcagcaacagtgttgaatttagcgttagcacgttttaagatcgggtatttcccacttgcagttgatactgaagttttttgtaccaattctgataagtcttggactgtcttaacttctttttcaggaatatatttaatatcctctgggatagttacgccaacgtcatcagatttaacattgtcacgtttagccccttttgatttcatgtactgttcaaatgctagaatttcttcgtttgtctctggattttggtttaatttagccatagaacgtttcgctccttcttttttgtctttttctttttttaattcttcttctgttggttcttctactttttcaatagtaggtgtttctggtgtttcttcaggtttgtcatctggttttggtgcatcatcaggtttttcttcatctgaagttccttctggttcatcatcagaaggtttgttctctgattcttctccagaattaccatctttgttatcttcaacttctgcaccttcatctttaggtggttcatcttgtttaggtgctgacgcttcaatttcttttgaaagctgttcgagttcttcgtactctttcttttga

SEQ ID NO: 596 - protein, 215 aa, Artificial Sequence
  Description of Artificial Sequence: synthetic amino acid sequence
VSTSQLIVSNSGRANSGFFSNSATVLNLALARFKIGYFPLAVDTEVFCTNSDKSWTVLTSFSGIYLISSGIVTPTSSDLTLSRLAPFDFMYCSNARISSFVSGFWFNLAIERFAPSFLSFSFFNSSSVGSSTFSIVGVSGVSSGLSSGFGASSGFSSSEVPSGSSSEGLFSDSSPELPSLLSSTSAPSSLGGSSCLGADASISFESCSSSSYSFF

SEQ ID NO: 597 - DNA, 342 bp, Artificial Sequence
  Description of Artificial Sequence: synthetic nucleic acid sequence
gtggatgaaaaagggctatactttaaatgccacttacctaatacatcatacgcaagagatatttatgagaatattaaagcaggcaacgttaatcagtgcagtttcttttacacattgccacctaatgactcaacggctcgtacgtggcaaaacatagataatgagtacgttcaaaccataaataaaatcgatgaattgattgaggttagtattgttacagtgccagcctacaaagatacatcggttgaagtcggtcaacgtgcgaaagacttaaagaaattcaaacagttggaacaaatgaagatagcattggatttagaaagcctacgttttgaaacgtaa

SEQ ID NO: 598 - protein, 113 aa, Artificial Sequence
  Description of Artificial Sequence: synthetic amino acid sequence
VDEKGLYFKCHLPNTSYARDIYENIKAGNVNQCSFFYTLPPNDSTARTWQNIDNEYVQTINKIDELIEVSIVTVPAYKDTSVEVGQRAKDLKKFKQLEQMKIALDLESLRFET

SEQ ID NO: 599 - DNA, 348 bp, Artificial Sequence
  Description of Artificial Sequence: synthetic nucleic acid sequence
atgaatcatgttcaaaagaacaatattaaattctttgattatccaaacgcacaagaaattagagatgtagtgattgtcatagatccattaggccaagacacccctataacttacggagatgatttccctatagcctttgaagatttgtatcaaatagacgtgtttgtgaagcaacaaaaaaacatcaatggaagattaacagctaaaaaaataacttttgagatagctaaggttttacgaacgataaatgtatatgacactggcggagctataaagcctgaatatataaaagattttaatatttacagacaaattaaaagatttgaagtaaagcaatcactcgtataa

SEQ ID NO: 600 - protein, 115 aa, Artificial Sequence
  Description of Artificial Sequence: synthetic amino acid sequence
MNHVQKNNIKFFDYPNAQEIRDVVIVIDPLGQDTPITYGDDFPIAFEDLYQIDVFVKQQKNINGRLTAKKITFEIAKVLRTINVYDTGGAIKPEYIKDFNIYRQIKRFEVKQSLV

SEQ ID NO: 601 - DNA, 465 bp, Artificial Sequence
  Description of Artificial Sequence: synthetic nucleic acid sequence
gtgacttattctgtctacaaaggatatgcagaatcattaaaagatacttctgaatttagttggactgatgaaagttggcaatttgaacaaggtgttataggaagtgatgaagttaaatataaacacaatattcgttactttaaaatatttaacggttctaaagatactattaaccctttattaagacacaaattaaatattaattgcacacttacagcaccttatggatttgaaatcgttaatctaaccacaaatgatatatttgaatataaaaaaccgctcaaaaagcgtaatacggtttctattataggagtgcatccttatattaataataaaagagttggtaaagacacaaattatgattttattactttagcgccgggttggaatgaaattttaattagaggtcacaatatatccaatagtcctaaaacagaatttatatttaattacatctataggtag

SEQ ID NO: 602 - protein, 154 aa, Artificial Sequence
  Description of Artificial Sequence: synthetic amino acid sequence
VTYSVYKGYAESLKDTSEFSWTDESWQFEQGVIGSDEVKYKHNIRYFKIFNGSKDTINPLLRHKLNINCTLTAPYGFEIVNLTTNDIFEYKKPLKKRNTVSIIGVHPYINNKRVGKDTNYDFITLAPGWNEILIRGHNISNSPKTEFIFNYIYR

SEQ ID NO: 603 - DNA, 1569 bp, Artificial Sequence
  Description of Artificial Sequence: synthetic nucleic acid sequence
gtgagaatattggaaaatctaatatttatgaatagagaagggacattttcggaaattgttaatgactttgattttggttcctttaaatatgaatatgaacaaaataatgagcgatccatatctctcactgcttataaaactaatgttaacgcggatatatttgatagtttgattaatgaaaattatttagtttggaagggccagaaatatgtcattaaatcgactgagcttaagtatgaagaaggtgtaatacttaatgaaattgaggctaagcatatttctatggaatttcaaaatcattatatacctaaagatttagatgatgagtcactgaatgatgaagatgagactgaagcaaaaatttccatgaaagttaaagagtaccttgattttgcattcaaaaataataaacttaatttcgattataagttacatggaaaatttaatgagagtaaatatattgaacagttaggagataaaaatggtttagaacatcttattgaaggtgctgagcattttggctatatattttttgctgataataaaactttccatatctatacacctgataatttttataaaaaatcagatgaaatattagtttataaatataataatagttcggtttcggctaaaacaatcacaactgaattacgcacctacattcaaggatatggaaagaaaaagtcgaaatccgaaacgaaaaactataaacctataaaacctaaagatttctcatactctggaaattttaataaagaagggacttggtctactgaacatataggagattcgttttataagacatttgattgtaagtgggggaatgaaaccttaacttggaatctaaaaaaaggacctaaaggtggaattatcgaagtatttattgatgataagtcgaaagggacttttgattgttacagcgctcatgcttcgacgcaaaaagtgattttagctaaaggattatcaaaaggtaaacattcttttagaggagtttttaaatcgaaaaaacctggtattgattataagaagtctaatccagtcatgtatgttggtacgagtaaaagtagtgttttaaatctaactgcagttcttaaaggtaaagatatttatcatgtatatgctgaatataagtctccatattataagcaatatggtaaatcagaagcccctacaatatatgatgataatattacaagtcaatcagagttaaagaagaaattaaaagaaacacttgatgacataccaacaatcgaagtagcaacgaattatttaggattagaaagtattcatgaaaataatactattcgatttatacacaaacctatcggatttaatactgatttaaaagttgtcaaacttactgaatatcacccccttgtttcgcagcctattgaagtggaattcagtaatgcacagaaagatattataaaaatgcaatcacagttcaatcgtaggttaagaaaggttaataatcttatgaaaaaaggattcaaaactagtgactattctttaaatgtgttagaggaatataacgaaacagtaggaagtgtattgattgatgagtaa

SEQ ID NO: 604 - protein, 522 aa, Artificial Sequence
  Description of Artificial Sequence: synthetic amino acid sequence
VRILENLIFMNREGTFSEIVNDFDFGSFKYEYEQNNERSISLTAYKTNVNADIFDSLINENYLVWKGQKYVIKSTELKYEEGVILNEIEAKHISMEFQNHYIPKDLDDESLNDEDETEAKISMKVKEYLDFAFKNNKLNFDYKLHGKFNESKYIEQLGDKNGLEHLIEGAEHFGYIFFADNKTFHIYTPDNFYKKSDEILVYKYNNSSVSAKTITTELRTYIQGYGKKKSKSETKNYKPIKPKDFSYSGNFNKEGTWSTEHIGDSFYKTFDCKWGNETLTWNLKKGPKGGIIEVFIDDKSKGTFDCYSAHASTQKVILAKGLSKGKHSFRGVFKSKKPGIDYKKSNPVMYVGTSKSSVLNLTAVLKGKDIYHVYAEYKSPYYKQYGKSEAPTIYDDNITSQSELKKKLKETLDDIPTIEVATNYLGLESIHENNTIRFIHKPIGFNTDLKVVKLTEYHPLVSQPIEVEFSNAQKDIIKMQSQFNRRLRKVNNLMKKGFKTSDYSLNVLEEYNETVGSVLIDE

SEQ ID NO: 605 - DNA, 1863 bp, Artificial Sequence
  Description of Artificial Sequence: synthetic nucleic acid sequence
atgttattaactttagactttcctattcaaataggacacacatttagaaccaagatgataaataattttagaacaatacttaattattataatgaattagatcatcagcatcgcgcacacacagaaactaagcatcatgcacatcaagccatgcaggttgattatagaaatacaaacgtttctgcatttttagattatcttaacggtaatattaatgggcttgttttaggagcaaatggagacggtatagctgaaacaaaacaagccagagtatcaatagatggtaccgtacatcccttgttgcaagaaaggctgcttcatgactttttaggaattaacagaaaattagataaagaaatacattctaatggtgcagttgattttatttggaatcctccatatataccaggaaatagattgggagaaaatgggacaccaaataattgggaaccagaagcccatattgaagcgtttttaaaccctttagttgataatcaatacgttacaaaagaagttataggagaagatacatcaggaaaatataatgtgtacaaatttacgtttgaaccacaaaattacaataaaacgttacttattacttcatgtatacacggtaatgaaactactggattttttgatatgtgccatatactcaatctattggtcaatcaatgggaaaagtatcctcaattaacttacttaagaaaaaatgtacgtttaatttatgttcctatggttaacccgtggggattcgcaaatcaagaaagagagaatgtgaacaatgtagatttaaacagaaattttgattataactggaaggcaggtaaagggacagatcctgataaatctaacttcaaaggtaaaagtcctttttctgaaaaagaatcacaaaatatgcgtagcttagttcaaagtatagataatttaactgctcacttagatttgcatgatattatttcagtaaataatgattactgtttattttatccgcgttgggccaatcaaaaaaataataatatgactcatcttattaacaatttaaaaagtaacggagacctcgttgtttggggttccagtacattatcatcttttagtaattgggtaggaatccgaaataaaacaacgtcatatctttcagaaataaatgaaaaacgtgtcggtgaaaagaaaagtcccgaagaaatgagacgttcagtacgctgggtaggtaatgtaatttttagaatggcacaatttgaatcttatcaaaatggtcaaacatcattagatcctttcattaaagtgatggtatatgatgatagatttaacaataaaacatctgaagtcattaccctacgtgcagaaaggaatgaatggcaacgtataatgatgagtcagcagcgtttcaaagttttagcaaatggatttgtagagctctatggatatgtgactataaacgttgatagagatgtcacagtggggattaatcctaatattgttcagaattatcatccattctttggatttaataaaagtagaaaacgtaatttattttcaattgaacatagactcaacaaaggaaatacaactttccctatttacgctgctgctggagttcaaatgtcgacgattactgaaccaggtacaaaacgtactgatacagtaatgccggtactagatgttaagaaaaaaggtgctggtattgtaacaatcaaacaaattaaattatttgcgaagttcactcctacgcattctgctaattccattcagatattaaaatctggagaatacggtaatcttaaagaagatacgttcacacaaatttaccctaatactatatatgatgatgatttaagaaatgttataaatggggaggaaaaataa

SEQ ID NO: 606 - protein, 620 aa, Artificial Sequence
  Description of Artificial Sequence: synthetic amino acid sequence
MLLTLDFPIQIGHTFRTKMINNFRTILNYYNELDHQHRAHTETKHHAHQAMQVDYRNTNVSAFLDYLNGNINGLVLGANGDGIAETKQARVSIDGTVHPLLQERLLHDFLGINRKLDKEIHSNGAVDFIWNPPYIPGNRLGENGTPNNWEPEAHIEAFLNPLVDNQYVTKEVIGEDTSGKYNVYKFTFEPQNYNKTLLITSCIHGNETTGFFDMCHILNLLVNQWEKYPQLTYLRKNVRLIYVPMVNPWGFANQERENVNNVDLNRNFDYNWKAGKGTDPDKSNFKGKSPFSEKESQNMRSLVQSIDNLTAHLDLHDIISVNNDYCLFYPRWANQKNNNMTHLINNLKSNGDLVVWGSSTLSSFSNWVGIRNKTTSYLSEINEKRVGEKKSPEEMRRSVRWVGNVIFRMAQFESYQNGQTSLDPFIKVMVYDDRFNNKTSEVITLRAERNEWQRIMMSQQRFKVLANGFVELYGYVTINVDRDVTVGINPNIVQNYHPFFGFNKSRKRNLFSIEHRLNKGNTTFPIYAAAGVQMSTITEPGTKRTDTVMPVLDVKKKGAGIVTIKQIKLFAKFTPTHSANSIQILKSGEYGNLKEDTFTQIYPNTIYDDDLRNVINGEEK

SEQ ID NO: 607 - DNA, 822 bp, Artificial Sequence
  Description of Artificial Sequence: synthetic nucleic acid sequence
gtgggtgacgcaataataaataaaattaatggtgcaactaaaattaaatatatccgtatgtttgatgaattaaaaagacaaattaatgcacgagccactgaaatacaagaacaattagataatttagaagattacgttgttaaagtgaaagatgcaagtgatgaaggaattacaaagattcagattgaaacaaaaaaaggattggacaaacttaatcaacagcgtagtaaaagtttaaaagacgtcgaggaatctcttaacgcggctaaaaatacaattcaaaatctttatgaagaatatgacaacgaaattgacacaaaaggaagtcaatatttaaaagatttaagaatcgaagttaggaatattgaaaatatattaagtcaagagggatacgtcacaattgatgaacatcgtaaaagcattactgaaatacaagaaaagttacctgaatcttcagactggattgaatatgatttgattaatggagctataaaaaataggcattataaagctgaaggacaaaatggttttaattgcgcttataaaatcattcaacatcaagactataaggaagtgatgttaagaattaacgctgacaactttaaaagtggaactgttatagcgaagttaccgagtgaactaattacaagtacgcaaactgcgttcctaagatcggtgcctgttaaagcttgtggtgctcaattaactattgaacctaatggagatgttaaagtttatatttctcagagcgatcagtggtcagtaagtcgtgaagcttatatttacggagaaattagaatgatagataaaggaggtgaataa

SEQ ID NO: 608 - protein, 273 aa, Artificial Sequence
  Description of Artificial Sequence: synthetic amino acid sequence
VGDAIINKINGATKIKYIRMFDELKRQINARATEIQEQLDNLEDYVVKVKDASDEGITKIQIETKKGLDKLNQQRSKSLKDVEESLNAAKNTIQNLYEEYDNEIDTKGSQYLKDLRIEVRNIENILSQEGYVTIDEHRKSITEIQEKLPESSDWIEYDLINGAIKNRHYKAEGQNGFNCAYKIIQHQDYKEVMLRINADNFKSGTVIAKLPSELITSTQTAFLRSVPVKACGAQLTIEPNGDVKVYISQSDQWSVSREAYIYGEIRMIDKGGE

SEQ ID NO: 609 - DNA, 627 bp, Artificial Sequence
  Description of Artificial Sequence: synthetic nucleic acid sequence
gtgatggatacttataaatctatgactgaacttgtgaggaatgaaaaagattggatgattgagacacaagatagaaatagtaaatcacttataactgctatacacggaggcggtatagagtgtggcacttctgaattagcgttattggttgcagaattatcgaatgcaaactattttacttttaaaggtttaaaaccgaaaaacaatagaactctacacgtcacttcaacaaattatgataaccccaatttattatattggaatcaatttatgaatgtaacgatagccgtacatggttattcgagcaatcaagcaaatagttatattggtggattggatgaaagacttatatctcttattactcacaatttaaaagtttcaggttttaatgtggaagctgctcctgacagaattgcgggcagagaaattaataatataaccaacaaaaatgcctatggcatgggtgtacagattgaaatatcgactcaacaaagaaaagaattttttagtcgaaacgattttagtaaaaagaatagagaaaatacacataattggacagaagatatgtattattatgctaatgctatttgtgctgcacttaatgatagaaagtgggtagaaacatga

SEQ ID NO: 610 - protein, 208 aa, Artificial Sequence
  Description of Artificial Sequence: synthetic amino acid sequence
VMDTYKSMTELVRNEKDWMIETQDRNSKSLITAIHGGGIECGTSELALLVAELSNANYFTFKGLKPKNNRTLHVTSTNYDNPNLLYWNQFMNVTIAVHGYSSNQANSYIGGLDERLISLITHNLKVSGFNVEAAPDRIAGREINNITNKNAYGMGVQIEISTQQRKEFFSRNDFSKKNRENTHNWTEDMYYYANAICAALNDRKWVET

SEQ ID NO: 611 - DNA, 531 bp, Artificial Sequence
  Description of Artificial Sequence: synthetic nucleic acid sequence
atggtgctcgtacaatttccaccttggtttgattgtaacgtccaaaatataaattacatcttatatgtgagaaaacaattaactgatattccgatgagcattgaatttagacatcaatcatggtttgacaatcagtataaagaacaaactttatccttcttaacacaacatcaaatcattcatgcagtggtagatgaacctcaagttaaagaggggagcgttcctttagtaaataggattactagtgaaattgcttttgtacgttatcatggacgtaatcattatggttggactaaaaaagatatgactgatcaagaatggcgagatgtaagatatttatatgattatagcgatgatgagttagctgacttggctcgtaaagtcgaaatacttaatcaaaaggctaagaaagtatatgtaatttttaataataactctggcggtcatgcagctaataatgctaaaaagtatcaaaatattttagacattgattatgaaggtttagcaccgcaacaattaaaactattttaa

SEQ ID NO: 612 - protein, 176 aa, Artificial Sequence
  Description of Artificial Sequence: synthetic amino acid sequence
MVLVQFPPWFDCNVQNINYILYVRKQLTDIPMSIEFRHQSWFDNQYKEQTLSFLTQHQIIHAVVDEPQVKEGSVPLVNRITSEIAFVRYHGRNHYGWTKKDMTDQEWRDVRYLYDYSDDELADLARKVEILNQKAKKVYVIFNNNSGGHAANNAKKYQNILDIDYEGLAPQQLKLF

SEQ ID NO: 613 - DNA, 489 bp, Artificial Sequence
  Description of Artificial Sequence: synthetic nucleic acid sequence
gtgtttatgatatttgtgtcgatattactgatgattcgtcacaaaatcaaaccttttaaaatttttgacaaacctaaatatgcgcgtacatatgttgatgctgaagggaaaacataccgttatagtgtaccacccctgtttgcttttataacaacgttatttattgggctattaacaggactgtttggcataggtggaggtgcattgatgacccctcttatgctcatcgtctttagatttccaccacatgttgcagtaggcacaagtatgatgatgattttcttttcaagtgtgatgagttcaatagggcacatctttcaaggacatgtggcttggggctattctatcattctcattatttcaagtgttataggtgcacaaataggtgtgagggtcaatcgatctatgaaatccgacacagttgtaatgttattgagaacagtaatgcttatcatgggtgtatatttaatcattaaatcttttatttaa

SEQ ID NO: 614 - protein, 162 aa, Artificial Sequence
  Description of Artificial Sequence: synthetic amino acid sequence
VFMIFVSILLMIRHKIKPFKIFDKPKYARTYVDAEGKTYRYSVPPLFAFITTLFIGLLTGLFGIGGGALMTPLMLIVFRFPPHVAVGTSMMMIFFSSVMSSIGHIFQGHVAWGYSIILIISSVIGAQIGVRVNRSMKSDTVVMLLRTVMLIMGVYLIIKSFI

SEQ ID NO: 615 - DNA, 810 bp, Artificial Sequence
  Description of Artificial Sequence: synthetic nucleic acid sequence
atgagccatgtcggtatcttttttgatgaaaagttatgccaagagattccggaaatagatgttatctttggtagtcatacgcatcatcattttgaacatggagaaataaacaatggtgttttgatggcagctgccggaaaatatggctattatttaggtgaagttaatattacgattgaaaatggaaaaatcgttgataaaatcgccaaaattcatcctattgaaacacttcccttagtcgagacacattttgaagaagaaggaagagcacttctaagtaaaccagtagttaatcatcatgtgaacttagtcaaaagaacagatgttgttacaagaacatcgtatttactggctgaaagtgtatatgagttttcaagggctgattgtgcaatcgtaaatgctggacttatagttaatggcattgaagctgataaagtgacggaatatgatatacatcgcatgttaccccatccaatcaatattgtaagagttcgattaaccggtaaacaattaaagcaagtgattcaaaaaagccaaaagcaagaatatatgcacgaacatgcacaaggtcttggttttagaggggatatatttggaggatatattttatataatctaggctttattgagtcagaagaccgttattttataggcgatgaagagattcaaaatgataaacaatatacgttaggtactgttgatatgtatacatttggaagatatttcccattgctaaaggggttatctacagattatattatgcctgaatttttacgtgatatttttaaagagaaattactaaaattataa

SEQ ID NO: 616 - protein, 269 aa, Artificial Sequence
  Description of Artificial Sequence: synthetic amino acid sequence
MSHVGIFFDEKLCQEIPEIDVIFGSHTHHHFEHGEINNGVLMAAAGKYGYYLGEVNITIENGKIVDKIAKIHPIETLPLVETHFEEEGRALLSKPVVNHHVNLVKRTDVVTRTSYLLAESVYEFSRADCAIVNAGLIVNGIEADKVTEYDIHRMLPHPINIVRVRLTGKQLKQVIQKSQKQEYMHEHAQGLGFRGDIFGGYILYNLGFIESEDRYFIGDEEIQNDKQYTLGTVDMYTFGRYFPLLKGLSTDYIMPEFLRDIFKEKLLKL

SEQ ID NO: 617 - DNA, 1167 bp, Artificial Sequence
  Description of Artificial Sequence: synthetic nucleic acid sequence
atgaaaactacgattaaacaagcgaaaaaacatcttaaccaagaagtaacaattggtgcttggttaactaataaacgttcaagtggtaaaatagcgtttttacaattacgcgatggtacaggatttatgcaaggagtagtagtaaaatctgaagtagatgaagaaacatttcaactagcaaaagatataactcaagaatcatctttatacatcacaggaacgattacagaagataatcgttctgatttaggctacgaaatgcaagttaaatcaatcgaaattgtacatgaagcacacgattatcctattacaccaaagaatcatggaacagaatttttaatggatcatcgtcacttatggttacgttcaaaaaaacaacatgctgtcatgaaaataagaaatgaaattatccgtgcaacatatgagtttttcaatgaaaatggcttcactaaaattgatccacctattttaacagcaagtgcaccagagggaacaagtgagttattccatacaaaatatttcgatgaagatgcattcttatcacaaagtgggcagttgtatatggaagcagccgcaatggctcacggacgtgttttttcatttggcccaacttttcgtgcagaaaaatctaaaacacgccgtcatttaattgaattctggatgattgaaccagaaatggcctttacaaatcatgcagaaagcttagaaatacaagaacagtatgtgtctcacattgttcaatctgttttaaatcattgccaattagaactcaaagctttagatagagatacaactaaactagaaaaagttgctacacctttccctagaatttcttatgatgatgctatcgaattcttgaaaaaagagggattcgatgatattgaatggggtgaagactttggtgcacctcatgaaacagccatcgctaatcactatgatttaccagtattcattacaaattatccaactaaaattaaaccattctatatgcaaccaaatccagacaatgaagatacagtattatgtgctgatttaattgcgcctgaaggttacggtgaaattattggtggttccgaacgtattaatgatttagaattattagaacaacgcattaatgagcacgaattggatgaggaaagttatagctattatttagatttacgtctt

SEQ ID NO: 618 - protein, 389 aa, Artificial Sequence
  Description of Artificial Sequence: synthetic amino acid sequence
MKTTIKQAKKHLNQEVTIGAWLTNKRSSGKIAFLQLRDGTGFMQGVVVKSEVDEETFQLAKDITQESSLYITGTITEDNRSDLGYEMQVKSIEIVHEAHDYPITPKNHGTEFLMDHRHLWLRSKKQHAVMKIRNEIIRATYEFFNENGFTKIDPPILTASAPEGTSELFHTKYFDEDAFLSQSGQLYMEAAAMAHGRVFSFGPTFRAEKSKTRRHLIEFWMIEPEMAFTNHAESLEIQEQYVSHIVQSVLNHCQLELKALDRDTTKLEKVATPFPRISYDDAIEFLKKEGFDDIEWGEDFGAPHETAIANHYDLPVFITNYPTKIKPFYMQPNPDNEDTVLCADLIAPEGYGEIIGGSERINDLELLEQRINEHELDEESYSYYLDLRL

SEQ ID NO: 619 - DNA, 549 bp, Artificial Sequence
  Description of Artificial Sequence: synthetic nucleic acid sequence
atgttcccaatggtagcaacaattaaagaattccgtgacgctaaatcaatgcttcttgaagagaaagaaaatcttcttcgcgaaggttacgaagtttcagatgatattgaattaggtattatggttgaaattccagctaccgcggcacttgctgatgtatttgctaaagaagtagatttctttagtataggaacgaatgacttaattcaatacacattagctgctgaccgtatgtctgaacgagtttcatacttatatcaaccatataatccttcaattttacgattagttaaacaagttattgaagcttctcataaagaaggtaaatggactggtatgtgtggtgaaatggctggagatcaaacagctgtgcctttattattaggtttaggtttagatgagttctcaatgagtgcgacttctatcctaaaagctagaagacaaatcaatggtttaagtaaaaatgaaatggctgaactcgctaatagagctgttgaatgctcaacgcaagaggaagtcgttgatttagttaaccaattagctaaataa

SEQ ID NO: 620 - protein, 182 aa, Artificial Sequence
  Description of Artificial Sequence: synthetic amino acid sequence
MFPMVATIKEFRDAKSMLLEEKENLLREGYEVSDDIELGIMVEIPATAALADVFAKEVDFFSIGTNDLIQYTLAADRMSERVSYLYQPYNPSILRLVKQVIEASHKEGKWTGMCGEMAGDQTAVPLLLGLGLDEFSMSATSILKARRQINGLSKNEMAELANRAVECSTQEEVVDLVNQLAK

SEQ ID NO: 621 - DNA, 585 bp, Artificial Sequence
  Description of Artificial Sequence: synthetic nucleic acid sequence
atggatgttatggctattgatagagacgaaaatcgtgttaacgaatatagtgatatagcaacacatgcagttgttgctgatacaactgatgaggcagtaatgaagagtttaggaatacgtaatttcgatcatgttattgtcgctattggtgagaatatacaatctagtacactaacgacgttaattcttaaagaattaggtgttaaaaaggttactgctaaagcccaaaatgattatcatgctaagattttaaataaaataggtgccgatactgttgtgcaccctgaaagagatatgggaagacgtattgctcataatgttgctagtgctagtgtccttgactacttggaacttgctgatgagcattcaatcgttgaattaaaatctacagaaaaaatggcaggacaaacaattattgaattagatattcgagctcaatatggtattaacattatagcaattaaaagagctaaagaatttatagtctctccagaccctaacatcaatattgaaataggggacattttaattatgattggtcatgataatgacttaggtcgctttgaaaaaaatataagcaagtaa

SEQ ID NO: 622 - protein, 194 aa, Artificial Sequence
  Description of Artificial Sequence: synthetic amino acid sequence
MDVMAIDRDENRVNEYSDIATHAVVADTTDEAVMKSLGIRNFDHVIVAIGENIQSSTLTTLILKELGVKKVTAKAQNDYHAKILNKIGADTVVHPERDMGRRIAHNVASASVLDYLELADEHSIVELKSTEKMAGQTIIELDIRAQYGINIIAIKRAKEFIVSPDPNINIEIGDILIMIGHDNDLGRFEKNISK

SEQ ID NO: 623 - DNA, 1011 bp, Artificial Sequence
  Description of Artificial Sequence: synthetic nucleic acid sequence
atgctggttgcattatttatgagtggattaatgtacgtgattataggtattttcattaaattgagtggaacacattggttaatgcacttgttaccaccagtagttgtcggaccagtaataatggtcattgggttaagtttagctcctacagcagtaaacatggccatgttcgaaaattctgctgaaatgaaagggtataacttaagttacttaattgttgctttgattacattagcagtaaccatcatcgtccaaggattcttcaaaggatttttatcactaatacctgtacttataggtattatagtgggatatattgtatccattttcatgggcatagttaaatttgctccaatagcacaagcgaaatggatagattttcctcatatttatctaccatttaaagattacacaccatcttttcatttaggactcattctcgtgatgatacccgtggtgtttgtgacggtaagtgaacatattggtcatcaaatggtaattaataaaatagtaggacgcaatttctttgaaaatccaggtttagataaatcaatcattggtgatggtgtttcaactatgtttgcaagtatgataggaggtcctcctagtacaacttatggtgaaaatataggtgtactagcgatcaccaaaatatatagtatttacgttattggtggtgcggcagttatagctatcattcttgcatttattggtaagttcactgctttaatatcttcaatacctacgccagtgatgggtggtgtctcaattttattattcggtattatagcagctagtggtttaagaatgcttgttgaaagtcaagtagatttcgcaagcaatcgcaacttggttatagcatcagttgtgcttgttgtcgggattggtaatcttcttatcaatttaaaaggcataggtatcaatttacaaattgaaggaatggcattatcagcactttcaggaataatattaaatttaattttgccaaaagataaaaaccaaataaattaa

SEQ ID NO: 624 - protein, 336 aa, Artificial Sequence
  Description of Artificial Sequence: synthetic amino acid sequence
MLVALFMSGLMYVIIGIFIKLSGTHWLMHLLPPVVVGPVIMVIGLSLAPTAVNMAMFENSAEMKGYNLSYLIVALITLAVTIIVQGFFKGFLSLIPVLIGIIVGYIVSIFMGIVKFAPIAQAKWIDFPHIYLPFKDYTPSFHLGLILVMIPVVFVTVSEHIGHQMVINKIVGRNFFENPGLDKSIIGDGVSTMFASMIGGPPSTTYGENIGVLAITKIYSIYVIGGAAVIAIILAFIGKFTALISSIPTPVMGGVSILLFGIIAASGLRMLVESQVDFASNRNLVIASVVLVVGIGNLLINLKGIGINLQIEGMALSALSGIILNLILPKDKNQIN

SEQ ID NO: 625 - DNA, 882 bp, Artificial Sequence
  Description of Artificial Sequence: synthetic nucleic acid sequence
atggaacacttattatcaatggagcatttatctaattcagaaatttatgatttaattactatcgcttgccaattcaaatctggtgagcgaccattacctcaatttaacggtcaatacgtatcaaacttattcttcgaaaattcaacgcgaacaaagtgtagctttgagatggcagaacaaaaattaggattaaaacttattaattttgaaacaagtacatcatctgtaaaaaagggtgagtcactttatgacacatgtaaaacacttgaaagtataggtgttgatttacttgtcatacgtcactcccaaaattcttattacgaagaactggatcaattaaatattccaattgctaatgcaggtgatggaagtggacaacatcctactcagagtttattagacataatgacaatatatgaagaatatggttcgtttgaaggtttgaatattctaatatgtggggacattaaaaattctcgtgtcgcaagaagtaattatcatagtttaacatcattaggtgccaacgtaatgttctcaagtccaaaagaatgggtagataatacattagaggcgccttatgttgaaattgatgaagtcattgataaagtagatattgttatgttgcttagagttcaacatgaaagacatggaatttcaggtgaagctaactttgctgctgaagaatatcatcaacaatttggtttaacacaggctagatatgataaattaaaagaggaagccattgtaatgcatccagctcctgtaaatagaggtgttgaaattaaaagcgagctagttgaagcacctaagtctcgaatatttaagcagatggaaaatggaatgtatttaagaatggcagtaataagtgcgcttttacaatag

SEQ ID NO: 626 - protein, 293 aa, Artificial Sequence
  Description of Artificial Sequence: synthetic amino acid sequence
MEHLLSMEHLSNSEIYDLITIACQFKSGERPLPQFNGQYVSNLFFENSTRTKCSFEMAEQKLGLKLINFETSTSSVKKGESLYDTCKTLESIGVDLLVIRHSQNSYYEELDQLNIPIANAGDGSGQHPTQSLLDIMTIYEEYGSFEGLNILICGDIKNSRVARSNYHSLTSLGANVMFSSPKEWVDNTLEAPYVEIDEVIDKVDIVMLLRVQHERHGISGEANFAAEEYHQQFGLTQARYDKLKEEAIVMHPAPVNRGVEIKSELVEAPKSRIFKQMENGMYLRMAVISALLQ

SEQ ID NO: 627 - DNA, 1113 bp, Artificial Sequence
  Description of Artificial Sequence: synthetic nucleic acid sequence
atgaaattaattaaaaacggaaaaatcttaaaaaacggtatcctaaaagacacagaaattttaatcgacggtaaacgtattaaacaaattagtagtaaaattaatgcttcatcttcaaatattgaagttattgatgcaaaaggaaatttaattgctcccggttttgtagatgttcatgtgcacctacgtgaaccaggtggtgaacataaagaaacaattgaaagtggtacaaaagccgctgcaagaggtggttttactacagtatgtcctatgcctaatacaagacctgtaccagatacagttgaacatgttagagaattaagacaacgaatttctgaaacagcacaagttagggtgttgccttatgctgctattactaagagacaagcaggtactgaacttgttgattttgaaaaattagcactagaaggtgtgtttgcatttactgacgatggtgtgggagttcaaacagcaagtatgatgtatgctgctatgaagcaagctgcaaaagttaaaaaaccgattgtcgcacactgtgaagataatagcttaatctatggtggtgcaatgcataaaggtaaacgtagtgaagaattaggcatacctggtattccaaatattgctgaatctgtacaaattgctagagatgtattattggctgaagcaactggttgtcactatcatgtgtgtcatgtttcaactaaggaaagtgttcgagtaatcagagacgctaaaaaagctggtatccatgtaacagcagaagttacaccacatcatttattattaactgaaaatgatgttcctggcgatgattcaaactacaaaatgaatccaccattaagaagtaatgaagatagagaagcacttttagaaggcttattagatggaacaattgattgtattgcaacggatcatgcacctcacgctaaagaagaaaaagcacaacctatgacaaaagcacctttcggcatcgtaggtagtgaaacagcattcccattactttatacacactttgtaagacgaggtaattggtcactgcaacaattagttgattatttcactattaaaccagctactattttcaacttaaattatggaaaattacacaaagat

SEQ ID NO: 628 - protein, 371 aa, Artificial Sequence
  Description of Artificial Sequence: synthetic amino acid sequence
MKLIKNGKILKNGILKDTEILIDGKRIKQISSKINASSSNIEVIDAKGNLIAPGFVDVHVHLREPGGEHKETIESGTKAAARGGFTTVCPMPNTRPVPDTVEHVRELRQRISETAQVRVLPYAAITKRQAGTELVDFEKLALEGVFAFTDDGVGVQTASMMYAAMKQAAKVKKPIVAHCEDNSLIYGGAMHKGKRSEELGIPGIPNIAESVQIARDVLLAEATGCHYHVCHVSTKESVRVIRDAKKAGIHVTAEVTPHHLLLTENDVPGDDSNYKMNPPLRSNEDREALLEGLLDGTIDCIATDHAPHAKEEKAQPMTKAPFGIVGSETAFPLLYTHFVRRGNWSLQQLVDYFTIKPATIFNLNYGKLHKD

SEQ ID NO: 629 - DNA, 591 bp, Artificial Sequence
  Description of Artificial Sequence: synthetic nucleic acid sequence
atgattggtggctctatttcaccaagttccggtgaaataacgagacatggtgatgtgagtgtcatcgctattaatgcaggactaaatggacaattgacaggtgtagaaaatattgaatttaaaatgctctgcatgggctttaaaaggaaagaaattaaaaaattaatgccggaaattatagaatttagtgaactcggcgaatttatttatcaacctgttaaaaaatattcaagtggtatgcgtgcaaaacttggattttcaattaatattactgttaatcctgacatattagttattgacgaagcattatcagtaggcgatcaaacatttactcaaaaatgtttagataaaatttatgaatttaaagcggctaaaaaaacaatattttttgttagtcataatattagacaagtgcgtgaattttgtacaaaaatcgcttggattgagggcggtaaactaaaagaattcggcgaacttgaagaagtattacctgattatgaggcgtttcttaaaacttttaagaaaaaatctaaagcagaacaaaaggaatttagaaataaattagatgagtcacgttttgtcgtaaaataa

SEQ ID NO: 630 - protein, 196 aa, Artificial Sequence
  Description of Artificial Sequence: synthetic amino acid sequence
MIGGSISPSSGEITRHGDVSVIAINAGLNGQLTGVENIEFKMLCMGFKRKEIKKLMPEIIEFSELGEFIYQPVKKYSSGMRAKLGFSINITVNPDILVIDEALSVGDQTFTQKCLDKIYEFKAAKKTIFFVSHNIRQVREFCTKIAWIEGGKLKEFGELEEVLPDYEAFLKTFKKKSKAEQKEFRNKLDESRFVVK

SEQ ID NO: 631 - DNA, 747 bp, Artificial Sequence
  Description of Artificial Sequence: synthetic nucleic acid sequence
atgatttatttacaaaattttattactacaactatccaattaaatatctatcttattttagttattggactgctttacgtaatcatccactattatagaaataaaggtgttaacgctttcttagatatttatttaaattatataccggtacttacacacgaatttggccacgtcttatttaacaaactcgctggtggaaaggccaaagatcttgtcattgtgacaagccctagagaaagaaaagtcacttcacaacaaggctatgcgattacacaatctaaaggatacttaggtcagtttattacaactataggtgggtatcttatgccaccattgatgtttttaactggattggtatctattcactatcaatatccaagtatatttattactatatatttatttatttttatatattatttctttattacttcccgtaaactatcacctttgattgtcattatactcatctcaagtttactctatttagtatttaaacaagaccatcaatggttcatttacgacattgtcacattaagttaccattttattttaggcgtacttttaggtgaaatattacaatcctcatggacgatttttcgtcttacctttcaacgacctaaaccttcttgggatggcagtgctttaacgaaagttactcgagtacccacctttatctttagtttagtgtggatattattcaatctctatactgtgtatttattaatcaaatacacaatactataa

SEQ ID NO: 632 - protein, 248 aa, Artificial Sequence
  Description of Artificial Sequence: synthetic amino acid sequence
MIYLQNFITTTIQLNIYLILVIGLLYVIIHYYRNKGVNAFLDIYLNYIPVLTHEFGHVLFNKLAGGKAKDLVIVTSPRERKVTSQQGYAITQSKGYLGQFITTIGGYLMPPLMFLTGLVSIHYQYPSIFITIYLFIFIYYFFITSRKLSPLIVIILISSLLYLVFKQDHQWFIYDIVTLSYHFILGVLLGEILQSSWTIFRLTFQRPKPSWDGSALTKVTRVPTFIFSLVWILFNLYTVYLLIKYTIL

SEQ ID NO: 633 - DNA, 1062 bp, Artificial Sequence
  Description of Artificial Sequence: synthetic nucleic acid sequence
gtgataatcgacagattgcagagttatgttaccttatttggagagagtccattccaaaaaatgatttctaaaaatgatgaagataaagttactgagagtaaacctaagcgtagcttatatgcactaatcatgactctatgtggtgtacatggaaccatttcactcgcaatcgccttaaccttgccatatttattagcaaatcatgaaacatttgcttatcgaaatgatttattatttattgcttccggaatggtaatattaagtttaattattgcacaagtcattctgcctttagtaacgcctgatagccctgaagtgaagataggtaatatgtcatttaaagaggcgagaatctacattttagaacatgttatcgattacctaaatcaaaaatcgacgtttgaaacgagttaccgttatggaaacgtcattaaagattaccacgataaactcacatttttaaaaacggttgaaaaggaagatgaaaactccaaagaactagaacgacttcaaaagattgcatttaacgtagaaacaaaaacgctagagaaattggttgatgatggcgaaattactgagagtgttcttgaaaactatatgcgttacgctgaacgaacagaagtgtataaacaagcttcgttattaagacgaattattgttggtttaagaggaatgctattgaaacgtcgtgtaaaaacaaaaattaattcggcatcatctcttagtgttactgataacttattagaattgggtaaaatcaataagcttgttcattataacgtcgtaagtcgtttagccaaagaagctactactgataataaactagaagtaggtatgatttgcgatggatatctgatgagaatagataacttaacaccaaacaatttctttaattccagacatgaagatacacttaccaaaattaaattaaatgctttaagagaacaacgtcgtattctaagagaactaattgaaaatgatgagataacagaaggtactgcattaaaattaagagaatccattaattatgatgaaatggtaattgtagatagtatgacataa

SEQ ID NO: 634 - protein, 353 aa, Artificial Sequence
  Description of Artificial Sequence: synthetic amino acid sequence
VIIDRLQSYVTLFGESPFQKMISKNDEDKVTESKPKRSLYALIMTLCGVHGTISLAIALTLPYLLANHETFAYRNDLLFIASGMVILSLIIAQVILPLVTPDSPEVKIGNMSFKEARIYILEHVIDYLNQKSTFETSYRYGNVIKDYHDKLTFLKTVEKEDENSKELERLQKIAFNVETKTLEKLVDDGEITESVLENYMRYAERTEVYKQASLLRRIIVGLRGMLLKRRVKTKINSASSLSVTDNLLELGKINKLVHYNVVSRLAKEATTDNKLEVGMICDGYLMRIDNLTPNNFFNSRHEDTLTKIKLNALREQRRILRELIENDEITEGTALKLRESINYDEMVIVDSMT

SEQ ID NO: 635 - DNA, 693 bp, Artificial Sequence
  Description of Artificial Sequence: synthetic nucleic acid sequence
atgctggaaatggtagaaaatattaaacaattcatatctagcaatacagatgataatttatttatagtgactgctaatcctgaaatcgtggattatgcaactgaacatgagctatatagaaatttaattaatcaagctgattatgtagttccagatggtacaggaatagtaaaagcttcaaagcgattaaaacagcccttaaaacggcgtgtgccaggaatagaacttcttgaagaatgtctgaaaatagcacatgtcagccatcagcgcgtatatctgcttggatctaaaaatgaaattgttgagtcagcagagaaaaaacttcaatctcaataccctaatatccactttgcacatcatcatggctatattcatctagaagatgaaacagtcataaaacgtataacaagttttaatcccgattacatttttgtaggaatgggatttccaaagcaagaacaatggattcaaaagcataaggacaagtttaagcacactgtgatgatgggcgtaggtgggtcgtttgaagtattcagtggctcaaagaaaagagcacctcaaatatttagaaagttaaatattgagtgggtatatcgtgtgcttattgattggaaacgcattgggagaatgataagtattcctaaatttatgttaaaggtagcaatacaaaaatataaaatgaaatcaaaataa

SEQ ID NO: 636 - protein, 230 aa, Artificial Sequence
  Description of Artificial Sequence: synthetic amino acid sequence
MLEMVENIKQFISSNTDDNLFIVTANPEIVDYATEHELYRNLINQADYVVPDGTGIVKASKRLKQPLKRRVPGIELLEECLKIAHVSHQRVYLLGSKNEIVESAEKKLQSQYPNIHFAHHHGYIHLEDETVIKRITSFNPDYIFVGMGFPKQEQWIQKHKDKFKHTVMMGVGGSFEVFSGSKKRAPQIFRKLNIEWVYRVLIDWKRIGRMISIPKFMLKVAIQKYKMKSK

SEQ ID NO: 637 - DNA, 576 bp, Artificial Sequence
  Description of Artificial Sequence: synthetic nucleic acid sequence
atgtggttctttattaatcaaggtgtcctagaaggaactaaatcaatctcacagaaattcaatcaagtggcaaagatgaatttcccactctcaatcattcctacttatattgtaacaagtaggttctatggtcatttaggattattagcaattattataatagcttgtatgttcaatggaattatcccttcaattcacattgtacaattacttatatatgtaccttttgcatatttgctaacatcgtcggtggcacttttaacatccactttggggattttaattagagatacgcagatgattatgcaagcattaatgagaatattgttttatatgtctccaattttatgggtgccaaaaaatcacggcgtaagtggtttgattcatcaaattatgttatttaatccagtatattttatcgcagaatcataccgagcagcgatattgttccatcaatggtatttcatagatcattggaagttaatgctatataacgttattatcattctcttattctttatagtaggttctattttacatagacgctatagagatcactttgcggacttcttgtaa

SEQ ID NO: 638 - protein, 191 aa, Artificial Sequence
  Description of Artificial Sequence: synthetic amino acid sequence
MWFFINQGVLEGTKSISQKFNQVAKMNFPLSIIPTYIVTSRFYGHLGLLAIIIIACMFNGIIPSIHIVQLLIYVPFAYLLTSSVALLTSTLGILIRDTQMIMQALMRILFYMSPILWVPKNHGVSGLIHQIMLFNPVYFIAESYRAAILFHQWYFIDHWKLMLYNVIIILLFFIVGSILHRRYRDHFADFL

SEQ ID NO: 639 - DNA, 975 bp, Artificial Sequence
  Description of Artificial Sequence: synthetic nucleic acid sequence
gtgcttttaaatatggtttttaaaccgtttaatataaattcgaagcacattgtgataatgatgacctttaagcaagatatactgcctattatagaggccttatgtagtgaaggataccatgtgacggttataggtaaaaaaatatatcagaaagatattaataacattaatcatgcatattttatacctgccggaaataaatatattatgagacatatgaaagtattaagtaaagcaaaggttattattttagatacgtattatttaatgatgggtggctatcagaagaaaaaagggcaaactgttattcaaacatggcatgctgctggtgcgcttaaaaattttggcttaactgatcatcaagttgatttaaaaaataaggctatggtaagacaatacaaaaaagtttatgatgctaccgattattatttggtaggtggggagaaaatggctcaatgttttatacaatcgtttgatgcatctccatcgcaaatgttaaagtttggacttccaagactgacccaatactttagaagcaatcttaagttagaacaacaacgattaaaaaagaaatatcatattacaaataaactcgcagtatatgttccgacttatagagaaggtcaagtagcacaacgtactattgataaagaaaactttgaacggcacttgccgaattatacgttattgagtcatttgcatccttcgactgttgattgtcaaacttctcattcaatcgatgttacttcattgttaattatggcggatattattataagtgattatagctcattacctattgaagcaagcgcacttaataaaccgacacttatttataattatgatgaacagcaatatgaaaaagtaagaggattgaatgaattttattatgctattccagaacgatacaaaatgagtaatgaagagtcaattatacaagcgatacaggataacgatgagcaatttcaatcttag

SEQ ID NO: 640 - protein, 324 aa, Artificial Sequence
  Description of Artificial Sequence: synthetic amino acid sequence
VLLNMVFKPFNINSKHIVIMMTFKQDILPIIEALCSEGYHVTVIGKKIYQKDINNINHAYFIPAGNKYIMRHMKVLSKAKVIILDTYYLMMGGYQKKKGQTVIQTWHAAGALKNFGLTDHQVDLKNKAMVRQYKKVYDATDYYLVGGEKMAQCFIQSFDASPSQMLKFGLPRLTQYFRSNLKLEQQRLKKKYHITNKLAVYVPTYREGQVAQRTIDKENFERHLPNYTLLSHLHPSTVDCQTSHSIDVTSLLIMADIIISDYSSLPIEASALNKPTLIYNYDEQQYEKVRGLNEFYYAIPERYKMSNEESIIQAIQDNDEQFQS

SEQ ID NO: 641 - DNA, 639 bp, Artificial Sequence
  Description of Artificial Sequence: synthetic nucleic acid sequence
atgaaaaatttacgtaacagaagctttttaactttattagacttttcacgacaagaggtagaatttttattaacactctccgaagatttgaagcgtgccaaatatatcggcactgaaaagcctatgctaaaaaataaaaatatcgcgcttctttttgaaaaagattccactagaacacgttgcgcattcgaagttgccgcacatgatcaaggtgcacacgtcacttatcttggacctacaggttctcaaatgggtaaaaaagaaactgctaaagatacagcacgtgtacttggtggtatgtatgatggtattgagtaccgaggtttctctcaacgtactgtagaaacattagcgcaatattcaggtgttccggtatggaatggattaaccgatgaagatcaccctacacaagtgcttgctgactttttaactgctaaagaagtattgaaaaaagagtatgctgatatcaactttacttatgttggcgatggacgtaacaatgttgctaacgcattaatgcaaggtgctgccattatgggtatgaatttccatcttgtttgtcctaaagaactcaatccgacagaagaattattaaatcgttgcgacgtattgcgacggaaaatggcggtaacattttaa

SEQ ID NO: 642 - protein, 212 aa, Artificial Sequence
  Description of Artificial Sequence: synthetic amino acid sequence
MKNLRNRSFLTLLDFSRQEVEFLLTLSEDLKRAKYIGTEKPMLKNKNIALLFEKDSTRTRCAFEVAAHDQGAHVTYLGPTGSQMGKKETAKDTARVLGGMYDGIEYRGFSQRTVETLAQYSGVPVWNGLTDEDHPTQVLADFLTAKEVLKKEYADINFTYVGDGRNNVANALMQGAAIMGMNFHLVCPKELNPTEELLNRCDVLRRKMAVTF

SEQ ID NO: 643 - DNA, 1194 bp, Artificial Sequence
  Description of Artificial Sequence: synthetic nucleic acid sequence
atgaatataattaagggaaatattgcaagtcctcttggattttcagctgatggtctgcacgctggctttaaaaagaaaaaattagactttggttggattgtttcagaagtacctgcaaatgtagctggtgtatttacaactaataaggtcattgctgcaccattaaaattaacaaaaaacagcatcgaaaaaagtggtaaaatgcaagctattgttgttaattcaggtattgctaattcttgtactggtaaacaaggagaaaaagatgcttttaaaatgcaacaactggccgcaaataaattacaaattcaaccagaatatgttggtgtcgcatctactggtgttattggaaaggtgatgccaatgtctattctaaagaatggcttttccaaactagttaaaaacggtaatgctgatgactttgcaaaagcgatattaacaacggatactcatacaaaaacatgcgttgtaaacgaagaatttggtagcgatacagtaacgatggcaggtgtagcaaaagggtcaggaatgatacatcctaatttggctacaatgctagcatttataacctgtgacgctaacatctcatcacaaacattacaacaggctttaaaagatgtggttgaagttacattcaatcaaatcactgtagatggtgacacttcaacaaatgatatggtgcttgtgatgtcaaatggatgtacaaataataacgaaattaaaaaagacagcgaagactactataaatttaagcagatgcttctatatattatgaccgatttagcaaaaagtattgcaagggatggcgaaggtgcttctaaattaatagaagtcacggttaaaggtgcaaaagaatctagtgctgcaagaatgattgctaaaagtgtggtgggttcaagtttagtaaaaaccgcaatttttggcgaagatcctaattggggtagaattattgctgctgcaggttatgctaaaacatattttgatattaatcaggtagacatttttataggtaggatacctgtattaataagatcctcaccagtaaagtacgataaagaagaaattcaagaaataatgagtgctgaagaaatatcaattcagcttgaccttcatcaagggaattgtgaaggtcaagcatggggatgtgatttatcgtatgactacgttaaaatcaacgcactatacaccacttag

SEQ ID NO: 644 - protein, 397 aa, Artificial Sequence
  Description of Artificial Sequence: synthetic amino acid sequence
MNIIKGNIASPLGFSADGLHAGFKKKKLDFGWIVSEVPANVAGVFTTNKVIAAPLKLTKNSIEKSGKMQAIVVNSGIANSCTGKQGEKDAFKMQQLAANKLQIQPEYVGVASTGVIGKVMPMSILKNGFSKLVKNGNADDFAKAILTTDTHTKTCVVNEEFGSDTVTMAGVAKGSGMIHPNLATMLAFITCDANISSQTLQQALKDVVEVTFNQITVDGDTSTNDMVLVMSNGCTNNNEIKKDSEDYYKFKQMLLYIMTDLAKSIARDGEGASKLIEVTVKGAKESSAARMIAKSVVGSSLVKTAIFGEDPNWGRIIAAAGYAKTYFDINQVDIFIGRIPVLIRSSPVKYDKEEIQEIMSAEEISIQLDLHQGNCEGQAWGCDLSYDYVKINALYTT

SEQ ID NO: 645 - DNA, 468 bp, Artificial Sequence
  Description of Artificial Sequence: synthetic nucleic acid sequence
atgaactttaaagaaataaaagaattaatcgaaattcttgatcaatctagtttaactgaaataaatattgaagataataaaggtagcgtagttaatttaaaaaaagaaaaagagactgaaatagttacaccgcaagttactcaacaaccaactcaaccgataaatcatacgcataatgaaacacaacaaaagccatcacatagctctaaagatgaacaaagtagtgataatgaatacaataccattaatgcaccaatggttggtacattttataaatcaccttcaccagatgaagaagcatacgttcaagttggagataaagttacgaatgaaagtactgtttgtatattagaagctatgaaattatttaatgagattcaagccgaaacaacaggtgaaatcatagaaattttagtagaagacggacaaatggtagagtatggccagccgttatttaaggtgaaataa

SEQ ID NO: 646 - protein, 155 aa, Artificial Sequence
  Description of Artificial Sequence: synthetic amino acid sequence
MNFKEIKELIEILDQSSLTEINIEDNKGSVVNLKKEKETEIVTPQVTQQPTQPINHTHNETQQKPSHSSKDEQSSDNEYNTINAPMVGTFYKSPSPDEEAYVQVGDKVTNESTVCILEAMKLFNEIQAETTGEIIEILVEDGQMVEYGQPLFKVK

SEQ ID NO: 647 - DNA, 925 bp, Artificial Sequence
  Description of Artificial Sequence: synthetic nucleic acid sequence
atgggaataaaagatattgctaaagctgaaatgattaaagccaatgtacctgtagtaccaggaagtgaaggacttattcaaagtatagatgacgctaaaaaaatagctaaaaaaatcggctatccagttatcatcaaagccacagcaggtggtggtggaaaaggtattcgggttgctcgtgatgagaaagaacttgaaactggttaccgtatgacacaacaagaagctgaaaccgcgttcggaaatggtggtttatacttagaaaaatttatagaaaactttagacatatagagattcaaattattggcgatacttatggaaacgttatacatttaggtgaacgtgattgtacaattcaaagaagaatgcaaaagctcgttgaagaagcaccctcaccagttttaagtgaagataaacgccaagaaatgggtaatgctgcaattagagccgcaaaagctgtaaattatgaaaacgcaggtacaattgaatttatatatgatttagatgataaccaattttatttcatggaaatgaatacacgtattcaagttgaacacccagtaactgaaatggtaacaggagtagatttagtaaaattacaactcaaagttgctatgggtgaggcgttaccttttaaacaagaagatatttccattaacggtcacgctattgaatttcgaatcaatgctgaaaatccttacaaaaactttatgccatcaccaggcaagattacccaatatcttgctccaggcggttttggagtgagaattgaatcagcatgttatactaattatacgataccaccttactatgactccatggtggcaaaacttatagttcacgaacctacacgtgaagaatcaattatgacaggcattcgtgctttaagtgaatatcttgttttaggtatcgacactatgattt

SEQ ID NO: 648 - protein, 309 aa, Artificial Sequence
  Description of Artificial Sequence: synthetic amino acid sequence
  MOD_RES (309): variable amino acid
MGIKDIAKAEMIKANVPVVPGSEGLIQSIDDAKKIAKKIGYPVIIKATAGGGGKGIRVARDEKELETGYRMTQQEAETAFGNGGLYLEKFIENFRHIEIQIIGDTYGNVIHLGERDCTIQRRMQKLVEEAPSPVLSEDKRQEMGNAAIRAAKAVNYENAGTIEFIYDLDDNQFYFMEMNTRIQVEHPVTEMVTGVDLVKLQLKVAMGEALPFKQEDISINGHAIEFRINAENPYKNFMPSPGKITQYLAPGGFGVRIESACYTNYTIPPYYDSMVAKLIVHEPTREESIMTGIRALSEYLVLGIDTMIX

SEQ ID NO: 649 - DNA, 915 bp, Artificial Sequence
  Description of Artificial Sequence: synthetic nucleic acid sequence
atgttaaacgaaaccattgattatttaaatattaaagaagatggtgtgtatgttgactgtacgttgggtggagcaggacatgccctctatttacttaatcaattaaatgataaaggtagacttattgcgattgatcaagatttaacagccatagaaaatgcgaaagaagttttaaaagaacatttgcacaaagtcacttttgttcataacaactttcgagaattaacaaatattttaaatgaattagaaattgaaaaagtagatggtatttattatgacttaggtgtttcaagcccgcaattggatgtgcctgaaagaggctttagttatcacaatgatgcgaaactagatatgcgaatggatcaaacacaatcactttctgcgtatgaagtagttaatcaatggtcttatgaagcattagttaggattttctttcgttacggtgaagagaaattttctaaacaaattgcacgcagaattgaagcccatcgagaacaacaacctatagaaacaactttagaactagttgatgtcattaaagaaggcataccagcgaaagcaagacgaaaagggggacatcctgcgaaacgcgtgttccaagctattcgaattgctgtgaatgatgagttatcagcttttgaagattcagttgagcaagccattgaatgtgtgaaggtcggaggtagaatttcagttattactttccactctttggaagatcgtttgtgtaaacaaattttccaagagtttgagaaaggtccagacgtaccaagaggtctccccgttattcctgaagcatatacacctaagttaaaacgagtaaatcgtaaaccgattaccgctactgatgacgatttaaacgaaaacaatcgagcacgtagcgccaagttacgcgtagcagaaatattaaaataa

SEQ ID NO: 650 - protein, 304 aa, Artificial Sequence
  Description of Artificial Sequence: synthetic amino acid sequence
MLNETIDYLNIKEDGVYVDCTLGGAGHALYLLNQLNDKGRLIAIDQDLTAIENAKEVLKEHLHKVTFVHNNFRELTNILNELEIEKVDGIYYDLGVSSPQLDVPERGFSYHNDAKLDMRMDQTQSLSAYEVVNQWSYEALVRIFFRYGEEKFSKQIARRIEAHREQQPIETTLELVDVIKEGIPAKARRKGGHPAKRVFQAIRIAVNDELSAFEDSVEQAIECVKVGGRISVITFHSLEDRLCKQIFQEFEKGPDVPRGLPVIPEAYTPKLKRVNRKPITATDDDLNENNRARSAKLRVAEILK

SEQ ID NO: 651 - DNA, 2241 bp, Artificial Sequence
  Description of Artificial Sequence: synthetic nucleic acid sequence
gtgctaaggttttcttatgtaatgattactggccactctaatggtcaagatttaattatgaaagccaatgagaaatacttagtcaaaaattctcaacaaccagaacgaggtaagatttacgatcgtaatggtaaagttttagcagaagatgtagaaagatataaacttgttgcagttgtggataaaaaagcaagtaaagaaagtaaaaagccgcgacacgtggttgataaaaaaaagacagcaaaaaaattagctgaaatcatagatatggacgctgacgaaatagaaaaacgacttaataataagaaagcctttcaaatcgaatttggtcagaaaggtactaatttaacttatcaagaaaaagaaaaaatagagaaaatgaaattacctggtatagcactttacccagaaactgagcgattttatcctaatggtaattttgcctcccatttaatagggatggcacagaaagatcctgatactggtgaattaaatggtgcattaggtgttgaaaaaatatttaatagttatttaaatggatcaagaggtgcacttaaatatatacatgatatatggggctacatcgcacctaatacgaagaaagagcagcaacctaaacgtggagatgatgtacacttaacaattgattctaatatacaagtctttgtggaagaagctcttgatgacatggttgaacggtatgctccaaaagatttatttgcagtagtaatggacgcaaaaactggtgaaatacttgcatatagccaacgtccaacttttaatcctgaaacaggtaaagattttggcaaaaagtgggcgaacgatttatatcaaaatacatatgaaccgggctctacttttaaaacatacggcttagctgcagcaattcaagaaggtaaattcaaaccggatgaaaagtataaatcaggtcatagaaatattatgggctctgaaatttccgattggaataaaactggttggggacgtatacctatgtcgttaggttttacttattcatcaaatacgttgatgatgcacttacaagatttggttggtgccgataaaatgaaatcttggtatgaacgctttggatttggcaaaaaaacgggtggtatgtttgatggagaagctgcaggtaatattggttgggcaaatgaattacaacaaaaaacgtcagcatttggtcaatccacaactgttacccctgctcaaatgattcaagcacaatcggctttctttaataaaggaaatatgcttaaaccatggtttgtaagtagtattgataatccaataactaaaaagaattattactctggtaaaaaagagtttgtcggtaaaccagtaacggaagaaacagccaataaagttgaagaagaacttgataaagtagtaaatagtaagaagagtcatgctatgaattatcgcgtaaaaggttatgatattgaaggtaagacaggaacagcacaagtagctgattcaaatggaggcggttatgttaaaggtgaaaatccttactttgtaagcttcatgggggatgcacctaagaaaaatcctaaagtcattgtctatgcaggtatgagtcttgctcaaaaaaatgatcaagaagcatatgaaatgggtgtgagcaaagcatttaaaccaattatggagaatacgctgaaatatttaaatgttggaaaatctagtgatacttcatcaaaaactgactatagtaaagtgcctaacgtgcaaggagatgaagttcaaaaagcagaggatagcgtcaatgctcaatctcttaaacctattacgattggtaatggcaaacagattaaacaacaatcagttaagtcaggtaccaaagtcctaccacacagtaaagtaatgttaatgacagacggggaattaacaatgccggatatgaccggatggacaaaggaagatgtacttgcttttgaagatttaacgaaacttaaagtttctactaaaggtaatggatttgtcacgaatcaaagtatctcaaaaggtcaaatcattaaaaataaagataagatagaagtgtcattatctgctgaagatacggatgatgaccaagagaaaactgatgaggactcttcggataacaaatcaaagaaagataaagctgatgaggatcattcaaatacatcttcgtcaactaagaatgataagtcaaacgccgactcgaaaaatgattctgatgacagcacaaatgaaacatcaggttctgagagaaataattaa

SEQ ID NO: 652 - protein, 746 aa, Artificial Sequence
  Description of Artificial Sequence: synthetic amino acid sequence
VLRFSYVMITGHSNGQDLIMKANEKYLVKNSQQPERGKIYDRNGKVLAEDVERYKLVAVVDKKASKESKKPRHVVDKKKTAKKLAEIIDMDADEIEKRLNNKKAFQIEFGQKGTNLTYQEKEKIEKMKLPGIALYPETERFYPNGNFASHLIGMAQKDPDTGELNGALGVEKIFNSYLNGSRGALKYIHDIWGYIAPNTKKEQQPKRGDDVHLTIDSNIQVFVEEALDDMVERYAPKDLFAVVMDAKTGEILAYSQRPTFNPETGKDFGKKWANDLYQNTYEPGSTFKTYGLAAAIQEGKFKPDEKYKSGHRNIMGSEISDWNKTGWGRIPMSLGFTYSSNTLMMHLQDLVGADKMKSWYERFGFGKKTGGMFDGEAAGNIGWANELQQKTSAFGQSTTVTPAQMIQAQSAFFNKGNMLKPWFVSSIDNPITKKNYYSGKKEFVGKPVTEETANKVEEELDKVVNSKKSHAMNYRVKGYDIEGKTGTAQVADSNGGGYVKGENPYFVSFMGDAPKKNPKVIVYAGMSLAQKNDQEAYEMGVSKAFKPIMENTLKYLNVGKSSDTSSKTDYSKVPNVQGDEVQKAEDSVNAQSLKPITIGNGKQIKQQSVKSGTKVLPHSKVMLMTDGELTMPDMTGWTKEDVLAFEDLTKLKVSTKGNGFVTNQSISKGQIIKNKDKIEVSLSAEDTDDDQEKTDEDSSDNKSKKDKADEDHSNTSSSTKNDKSNADSKNDSDDSTNETSGSERNN

SEQ ID NO: 653 - DNA, 888 bp, Artificial Sequence
  Description of Artificial Sequence: synthetic nucleic acid sequence
atgaagtttggacaaagtatccgtgaggaagggcctcaaagccatatgaaaaaaacaggtactcctactatgggtgggcttacatttttaattagtattataattacctctatcattgcaattatctttgtagaccattcaaatccaattattttgttactatttgtaacaatcggttttggtcttattggatttattgatgactatattattgtagttaaaaagaataaccaaggattaactagtaaacaaaagtttctagcacaaataattattgcagttatattctttgtgctaagtgatgtatttcaccttgtgcattttacgacagatttgcatattccatttgtgaattttgatattccgttgtcatttgcttatgtgatatttatcgtcttttggcaagttggtttctcaaatgctgtaaacttaactgatggtttagatggattggcaactggtttgtcaataataggttttgcaatgtatgctgtaatgagttacatgttagattcaccggctattggcatattttgtattataatgattttcgctttactaggtttcttaccttacaatttaaatccagcgaaagttttcatgggagacacaggaagtcttgctctaggtggtatttttgcaacgatttcaatcatgttgaatcaagaattatcattaatattaattggttttgtgtttgtagttgagacattatctgtaatgttacaagtagcctcatataaattaacgaagaaacgtattttcaagatgagtcctatacatcaccacttcgaattaagtggttggggtgaatggaaagtagtaacagtattttggacggtaggtttaattacgggattaataggtttatggattggagtgcattaa

SEQ ID NO: 654 - protein, 295 aa, Artificial Sequence
  Description of Artificial Sequence: synthetic amino acid sequence
MKFGQSIREEGPQSHMKKTGTPTMGGLTFLISIIITSIIAIIFVDHSNPIILLLFVTIGFGLIGFIDDYIIVVKKNNQGLTSKQKFLAQIIIAVIFFVLSDVFHLVHFTTDLHIPFVNFDIPLSFAYVIFIVFWQVGFSNAVNLTDGLDGLATGLSIIGFAMYAVMSYMLDSPAIGIFCIIMIFALLGFLPYNLNPAKVFMGDTGSLALGGIFATISIMLNQELSLILIGFVFVVETLSVMLQVASYKLTKKRIFKMSPIHHHFELSGWGEWKVVTVFWTVGLITGLIGLWIGVH

SEQ ID NO: 655 - DNA, 1188 bp, Artificial Sequence
  Description of Artificial Sequence: synthetic nucleic acid sequence
atgggcattgaggtaattagcggtagtcatcctttttctttattagatgatgatcctatcattgtgaaaaacccaggtattccatatactgtatcaattattaaagaagcagcaaatagagggcttaaaatcttaacagaggttgaacttagctatttaatttctgaggcaccaatcatagcagttactggaactaacggtaaaactactgtcacttcactaatcggtgatattttccaaaaaagcgtgttgactggacgactttctgggaatattggttatgtagcctcaaaagttgcacaagaagttaaatcagatgagtatttaataacagaattatcatcttttcaattattaggcattgaagaatataaaccacatatcgctatcattactaatatttattctgcacatttggattaccatgaaacgttagagaactatcaaaatgctaaaaagcaaatatataaaaatcaaactaaagatgattatctcatttgtaattatcatcaaagacacctaattgaatcagaaaatctagaagcgaaaacattttatttttcaacacagcaagaagttgatgggatatacattaaagatggtttcattgtttttaacggcattcgcattattaacactaaagacttagtgctaccaggagaacataacctggaaaatattttagcagctgttctagcatcaatcattgctggagtgccagtcaaagctattgtagatagtcttgttactttttccggtattgatcatagacttcagtatattggtacaaatcgcacaaataaatattataatgattcaaaagcaactaatactttagctactcaatttgcgcttaactcttttgatcaaccaattatttggttgtgtggtggattagatcgtggtaatgaattcgatgaacttattccttatatggaaaatgtacgtgtgatggttgtttttggagaaacacaagataaatttgctaaattgggaaatagtcaaggtaagtatgtgattaaagcaacagatgtagaggatgctgttgataaaattcaagatatagtcgagccaaatgatgttgttctattatcaccagcttgtgcaagttgggatcagtatcatacatttgaagaacgtggtgagaagtttatcgatagattccgagcgcacttgccatcatactaa

SEQ ID NO: 656 - protein, 395 aa, Artificial Sequence
  Description of Artificial Sequence: synthetic amino acid sequence
MGIEVISGSHPFSLLDDDPIIVKNPGIPYTVSIIKEAANRGLKILTEVELSYLISEAPIIAVTGTNGKTTVTSLIGDIFQKSVLTGRLSGNIGYVASKVAQEVKSDEYLITELSSFQLLGIEEYKPHIAIITNIYSAHLDYHETLENYQNAKKQIYKNQTKDDYLICNYHQRHLIESENLEAKTFYFSTQQEVDGIYIKDGFIVFNGIRIINTKDLVLPGEHNLENILAAVLASIIAGVPVKAIVDSLVTFSGIDHRLQYIGTNRTNKYYNDSKATNTLATQFALNSFDQPIIWLCGGLDRGNEFDELIPYMENVRVMVVFGETQDKFAKLGNSQGKYVIKATDVEDAVDKIQDIVEPNDVVLLSPACASWDQYHTFEERGEKFIDRFRAHLPSY

SEQ ID NO: 657 - DNA, 1419 bp, Artificial Sequence
  Description of Artificial Sequence: synthetic nucleic acid sequence
atgctcatggaagagaataaaaatcaacctaataaggagaatatgtcgaataaagacgataatgcaactcatttgaatgacagtcacagaaatgaagatttagagctttttagacggaataaaaacgctcgccaacgcagaagacgtcgtatagataaccaaagtaaagaaaaggatgctacgtctacacaatcacagttagaaactaaaccaatggataaatttttagataatcacaagtcgcataatcaaaacaaagaaataaaaagtgacttaattgaagaaaatgttaatgatgaaaacgacaatcaaaaaaatattaatgataaattaaatgaccgtattgtccaagaaacaaatgaaagtcgtcaaagtactgaagacgatgaggaatttctacttgatcatcggagtgaacaacaacctaaagcctctcgtcattctaaaaagcataaattactaagtaaatttacttctaaaaaagaaaaggaaacatctacatcgttcaatagtaatgagaaggtaactcaaattaaaccgcttagtttagaagaaaaaagagccataagacgtaaaaagcaaaaaagaatccaatataccattatcacactactcattcttatcattgttctcattttactctatatgtttacaccactgagtaaaatatcaaatgtaaatgttaaaggtaataacaacgtaagtacgagtaaaataaagaaagaacttaacgttacttcgcgatcacgaatgtatacttttagtaaaaataaagcgattaggaacttaaaacagaatcctttaatcaaagaagttgatattcataaacaattaccaaacacgttaactgtcaacgtgactgagtaccaaattgtcggtttagaaaaaaataaagataaatatgtgccaattatagaagatggtaaagaattaacagaatacaaagatgaagtgtcacatgatgggcctatcattgatggtttcaaaggagacaaaaaaacacgaattataaaagctttatcagaaatgtcacctaaagtgagaaacttaattgcagaggtgagttacgcaccaactaaaaataaacaaagtcgcataaaaatcttcaccaaagataatatgcaagttattggtgacattacaacgattgcagacaaaatgcaatattatcctcaaatgtcacaatcattaagcagagatgactctggcgaacttaagacaaatggctatattgatttatcggttggagcgtcatttattccttatcaaggttcatcaactgttcaatcgggtacagaacaaaatgtaaccaagtcaacacaagaagaaaatgatgcaaaagaagaacttcaaaatgtgttgaataaaataaataaacaatctaccagtggcgaaggcgactttctggtctgtaactga

SEQ ID NO: 658 - protein, 472 aa, Artificial Sequence
  Description of Artificial Sequence: synthetic amino acid sequence
MLMEENKNQPNKENMSNKDDNATHLNDSHRNEDLELFRRNKNARQRRRRRIDNQSKEKDATSTQSQLETKPMDKFLDNHKSHNQNKEIKSDLIEENVNDENDNQKNINDKLNDRIVQETNESRQSTEDDEEFLLDHRSEQQPKASRHSKKHKLLSKFTSKKEKETSTSFNSNEKVTQIKPLSLEEKRAIRRKKQKRIQYTIITLLILIIVLILLYMFTPLSKISNVNVKGNNNVSTSKIKKELNVTSRSRMYTFSKNKAIRNLKQNPLIKEVDIHKQLPNTLTVNVTEYQIVGLEKNKDKYVPIIEDGKELTEYKDEVSHDGPIIDGFKGDKKTRIIKALSEMSPKVRNLIAEVSYAPTKNKQSRIKIFTKDNMQVIGDITTIADKMQYYPQMSQSLSRDDSGELKTNGYIDLSVGASFIPYQGSSTVQSGTEQNVTKSTQEENDAKEELQNVLNKINKQSTSGEGDFLVCN

SEQ ID NO: 659 - DNA, 345 bp, Artificial Sequence; identical to SEQ ID NO: 329
  Description of Artificial Sequence: synthetic nucleic acid sequence

SEQ ID NO: 660 - protein, 114 aa, Artificial Sequence; identical to SEQ ID NO: 256
  Description of Artificial Sequence: synthetic amino acid sequence

SEQ ID NO: 661 - DNA, 417 bp, Artificial Sequence
  Description of Artificial Sequence: synthetic nucleic acid sequence
atgcatgttggctaccaggcacgcaaaataacatatcaaaatcattcctataagatacactttgataatggacatattgttcactctcatactgaaccgattattgcaactggatttgatgttacccaaaaccctttaatagaacaactatttcaagtacgacaatcagaagttcaattaacagaattagacgaatctacaaagtttcctaatgtatttttaattggggcgactgtacgtcatcaaaatgccattctttgttatatatataaattcagagcacgttttgcagtattagcacgcatagtaagcctacgcgaaggcttacctgaagatacatcattaattcagtcgtatcgtcaaaaaaatatgtttctagacgattatagttgttgtgatgtgaattgcacatgttaa

SEQ ID NO: 662 - protein, 138 aa, Artificial Sequence
  Description of Artificial Sequence: synthetic amino acid sequence
MHVGYQARKITYQNHSYKIHFDNGHIVHSHTEPIIATGFDVTQNPLIEQLFQVRQSEVQLTELDESTKFPNVFLIGATVRHQNAILCYIYKFRARFAVLARIVSLREGLPEDTSLIQSYRQKNMFLDDYSCCDVNCTC

SEQ ID NO: 663 - DNA, 1188 bp, Artificial Sequence
  Description of Artificial Sequence: synthetic nucleic acid sequence
atgattaaaaagttagagacttttgttaaggagagcaaagcataccatcctcaatttcacaatattatttgtggatggtgctttattgtacttatgtttgctttacccatctacttgtcttatcacgtttcagacggattacaatactacgtgtcacactggttaactaaactatcccaaatatcattatttcaagaaaataagctacaacatattttattcggtcattatggtgtcatttctttaggtacatattcattcgtctgggcgttaccagttgttttcatgattagtttatctacagctcttatagatataactcatttaaagcattatatcgtttggtctatcgaacctacgatgatgagacttggtcttcatgaatcagatatcatacccttgttagaaggatttggatgtaatgctgctgctattactcaagctacacatcaatgtcatcgttgtacaaaagtacaatgtatgagcttggtaagtttcggaactgcatgtagttatcaaattggtgctacattatcgatattcaacgcaagccaccgctcttggttgtttttgccatacataggcatggttttcttaggaggaatcatacataacaaactatggtatagtcatcaaacacctatgacaacacagtctgtttttcaacgacaacctgtacgttggcccaaaccaaagctactcttaaaagcagcgtggaaaagtattcaaatgtttattgtacaagccttacctatttttataggaatttgccttattgtaagtctattgtctcttacgtctattttgacttttatatcaaatgcattcatacctttattatggctactagatgtacctacacagcttgcaccaggtattctgttttcaatgatacgtaaggatgggatgttgttgtttaatatgaatggcggtactttaattcaaagactttccgcattccaattattgttgctagtcttttttagttcaacatttacagcatgttcagtaacaatgactatgctcatgcgtcgactcggttcaattctaggaattaaaatgataatgaaacaaatggtatcgtccacaatttgcgtcaccatactagccatagcaatgttaagcataactaaaatttcagacttaggagtgatgttatggaaatcattattatcggtggttttttag

SEQ ID NO: 664 - protein, 395 aa, Artificial Sequence
  Description of Artificial Sequence: synthetic amino acid sequence
MIKKLETFVKESKAYHPQFHNIICGWCFIVLMFALPIYLSYHVSDGLQYYVSHWLTKLSQISLFQENKLQHILFGHYGVISLGTYSFVWALPVVFMISLSTALIDITHLKHYIVWSIEPTMMRLGLHESDIIPLLEGFGCNAAAITQATHQCHRCTKVQCMSLVSFGTACSYQIGATLSIFNASHRSWLFLPYIGMVFLGGIIHNKLWYSHQTPMTTQSVFQRQPVRWPKPKLLLKAAWKSIQMFIVQALPIFIGICLIVSLLSLTSILTFISNAFIPLLWLLDVPTQLAPGILFSMIRKDGMLLFNMNGGTLIQRLSAFQLLLLVFFSSTFTACSVTMTMLMRRLGSILGIKMIMKQMVSSTICVTILAIAMLSITKISDLGVMLWKSLLSVVF

SEQ ID NO: 665 - DNA, 777 bp, Artificial Sequence
  Description of Artificial Sequence: synthetic nucleic acid sequence
atgaatgaatttggaaaaagaagtgttgatggccaacttatagaacatcctgaagtacctatgagtgaaatcactgaaggatgcatttgttgtgcgatgaaatcagacgtatcacaacaactacatgaactatacttaaaatatcaaccagatatcatctttattgaatgcagtggtgtagctgaaccactagctgtcgtcgatgcattcttcacacccgtacttgcaccttttatcactttaaggagtatggtgggaattattgatgcaagcatgtattcacgaattaaatcttatccacaagacattgcagctctattttatgaacaacttcgtcattgttcgactttatttgttaataaaatagataagatagaggtggaagaaaccgcccgcttgctacgtcaactcgagcgtctcaatagcgatgccaatattcaagttggtcaatttggagaattaaatttaaaatcactgctagagccaacacatataaattcaaatgcatgtggcactttgcatagtaatataaatcatcaattcatcgaaaatcctaggctacaaacaaaagaagaaatgattagtgcgttagataacttgcctcaagatgtttaccgtgtcaaagggtttgttcgtttttcagatcagcaacacgtttatttagtacagtatgcacaaggaaatatagaattatctcccattcaacttaaaaacgatgtaccattgtacctcattgttataggaaaacatttaaaacaaatacaatttgatttataa

SEQ ID NO: 666 - protein, 258 aa, Artificial Sequence
  Description of Artificial Sequence: synthetic amino acid sequence
MNEFGKRSVDGQLIEHPEVPMSEITEGCICCAMKSDVSQQLHELYLKYQPDIIFIECSGVAEPLAVVDAFFTPVLAPFITLRSMVGIIDASMYSRIKSYPQDIAALFYEQLRHCSTLFVNKIDKIEVEETARLLRQLERLNSDANIQVGQFGELNLKSLLEPTHINSNACGTLHSNINHQFIENPRLQTKEEMISALDNLPQDVYRVKGFVRFSDQQHVYLVQYAQGNIELSPIQLKNDVPLYLIVIGKHLKQIQFDL

SEQ ID NO: 667 - DNA, 1188 bp, Artificial Sequence
  Description of Artificial Sequence: synthetic nucleic acid sequence
atgaagaaaaaattaagttatatgattaccattatgcttgcttttacgctaagtttagcacttggcctatttttcaatagtgctcacgccgactcgttaccacaaaagaatggtgcaaaccaaaaaacaactaaagtcactgtcagtaataaagacgttccagatgcagttcgcaaacttgctgaagaacaatatttatctcgtgtagctttattagataaagcttccaaccacaaagcaacatcgtatacacttggtgaaccttttaaaatttataaatttaataaggaaagcgacggcaattattattatccagtgctcaataaaaaaggagatgtcgtttatgtagtaacaatttctcctaatccttcaaattctaaagcttcaaaacagcaaaacaattattccattaatgtttctccatttctttctaaaatattaaaccaatataaaaatcaaaagataacaattttgactaatacaaaaggatattttgcacttactgaagatggtaaagtgacacttgtgcttaaaacgccacgtaataatgaaaaaacatatgaaaatgccactgaatccactaaacctaaagatttaaatgattttaaacaaactgcatcagtaacaaaaccaactttagaatatcaaagtacacgaaatgaaatgtacgcagaatatgtaaatcaattaaagaatttcagaatacgagaaacacaagggtataatagttggtgtgccggctataccatgtcagcactattcaatgccacatataatacaaatcgatataatgcagaatcagtaatgagatatttacatcctaatttaagaggtcacgacttccaatttacaggactaacatctaacgagatgcttcgttttggtagatcacaaggcagaaatactcaatatcttaatagaatgacttcatataatgaagtagaccaattaacaactaataatcaaggtatagctgtattaggtaagcgtgttgaatcaagcgatggtattcacgctggacatgccatggctgtggctggtaatgctaaagttaacaacggacaaaaagtcattttaatttggaacccatgggacaatggtctcatgactcaagatgcacatagtaatatcattccagtatcaaatggcgatcactatgaatggtatgcatcaatttatggttattaa

SEQ ID NO: 668 - protein, 395 aa, Artificial Sequence
  Description of Artificial Sequence: synthetic amino acid sequence
MKKKLSYMITIMLAFTLSLALGLFFNSAHADSLPQKNGANQKTTKVTVSNKDVPDAVRKLAEEQYLSRVALLDKASNHKATSYTLGEPFKIYKFNKESDGNYYYPVLNKKGDVVYVVTISPNPSNSKASKQQNNYSINVSPFLSKILNQYKNQKITILTNTKGYFALTEDGKVTLVLKTPRNNEKTYENATESTKPKDLNDFKQTASVTKPTLEYQSTRNEMYAEYVNQLKNFRIRETQGYNSWCAGYTMSALFNATYNTNRYNAESVMRYLHPNLRGHDFQFTGLTSNEMLRFGRSQGRNTQYLNRMTSYNEVDQLTTNNQGIAVLGKRVESSDGIHAGHAMAVAGNAKVNNGQKVILIWNPWDNGLMTQDAHSNIIPVSNGDHYEWYASIYGY

SEQ ID NO: 669 - DNA, 381 bp, Artificial Sequence
  Description of Artificial Sequence: synthetic nucleic acid sequence
gtgatttcatctactggttgttttgttattttttctgttggttcaccttcgccaactttttcccctgttaatgggttcttagttgttggtgttgtaattgtttttgttcctggttcacctttctgtttaacacgctcttcacctggttttaaatcaggattgaattcacgtttcttgtcgaatggaatttcttccgttgacgtaatcgaatctccatcaactggaccatattttgtcacatcatccactggtggtgtgactacttcgcctgtatcaggatttttaactcctggtttacctggaacgtcctcttggctacctttcggtgcgtttggatcaaattcatccttatggcctggcttgatttcttcgccaccataa

SEQ ID NO: 670 - protein, 126 aa, Artificial Sequence
  Description of Artificial Sequence: synthetic amino acid sequence
VISSTGCFVIFSVGSPSPTFSPVNGFLVVGVVIVFVPGSPFCLTRSSPGFKSGLNSRFLSNGISSVDVIESPSTGPYFVTSSTGGVTTSPVSGFLTPGLPGTSSWLPFGAFGSNSSLWPGLISSPP

SEQ ID NO: 671 - DNA, 1110 bp, Artificial Sequence
  Description of Artificial Sequence: synthetic nucleic acid sequence
atgctattaggttcgtctaatattccatcgattgagctagccgaacagttagtcaaattaacaccagatagattacaaaaagtgttttactctgatacagggagtgcgtcggtagagattgctattaagatggcttatcaatattggaagaatatcgatgctgaacgatatgcgaagaagaataaatttcttacattacatcatggatatcatggagatacaataggttctgttagcgttggtggtatcgatagtttccacaaaatttttaaagaccttatttttgaaaatatacagatagaaacaccgtgtttatataaaagtaagtaccgcaatgaagcggaaatgcttaattcaatactgaatcaaattgaaaatatattatctgagagaaatgatgaaatagtaggatttattctagagccacttatacaaggtgcaacaggtttattcgttcatccgcatggttttttgaaagctgtagaacagttatgtagaaaatatgatgtattactaatttgtgatgaagtagcggttggtttcggacgtacgggagaaatgtttgcttgtaaccatgaagatgtacaaccagatattatgtgtctgggtaaggcgattacaggtggttatttaccgttagcggcaactttaacatctcaaaagatatatgatgcttttttaagtcagagtcacggtaagaatacgtttttccacggtcatacatatacaggtaatcagttagtttgttccgtagcacttgagaatattaatctttttaaaaagaagcatctgattgggcacattcaaaagacatctcaaacattaaagcaacgcttagaggcacttcaacctcataaaaatattggagatattagagggcggggattaatgtatggtgtggaattagttgaaaacaaatcaacgcagacaccactcgatattccaactgtagaactgattatacatcgatgtaaagagaatggattgatgattcgtaatttggaaaatgtcatcactttcgtacctattttaagtatgtctaataaagaaattaaaaaaatggttaaaattttcaacaaagccttacatcaaacattgggtaagaagtaa

SEQ ID NO: 672 - protein, 369 aa, Artificial Sequence
  Description of Artificial Sequence: synthetic amino acid sequence
MLLGSSNIPSIELAEQLVKLTPDRLQKVFYSDTGSASVEIAIKMAYQYWKNIDAERYAKKNKFLTLHHGYHGDTIGSVSVGGIDSFHKIFKDLIFENIQIETPCLYKSKYRNEAEMLNSILNQIENILSERNDEIVGFILEPLIQGATGLFVHPHGFLKAVEQLCRKYDVLLICDEVAVGFGRTGEMFACNHEDVQPDIMCLGKAITGGYLPLAATLTSQKIYDAFLSQSHGKNTFFHGHTYTGNQLVCSVALENINLFKKKHLIGHIQKTSQTLKQRLEALQPHKNIGDIRGRGLMYGVELVENKSTQTPLDIPTVELIIHRCKENGLMIRNLENVITFVPILSMSNKEIKKMVKIFNKALHQTLGKK

SEQ ID NO: 673 - DNA, 672 bp, Artificial Sequence
  Description of Artificial Sequence: synthetic nucleic acid sequence
atgcgtgcaagccacgaagatattcatattagtggtgctgaaacaatgtgtgaatttgaggatttagaaaattatttaaaaaaatattttaataaagcatttaatcatgaaaatggaaatatagatttcttaaatttgaaaattgaaaaggttaaggcaccgattcaaacgttagtagcattaccagtggttgaaaatctaaacgatactttaacacaattagcaaaacaaacaggtgtttctgaatatgcgctaaacaaagggttagaatttataaaaaatgatattacttatactggagccattattctatctgcacaaaccggacaacgacttgatagcactgaacaacgaggtatcagggtaacacaattagcatttaaaacatgcaaatgtaatggagaaatatcagaaagagtaaaagatgcacgtgcacttgcaacttgtatcaatgcatttgaaggtgtaaaggcagaactatgtgtatcagacgatttgcattacacgactggatattttgcgtcgcctaagttaggatatcgtagaatctttaatattaaagaaaaaggtacgcgtcacggaggaagaattatcttcgtagacgaagaaataaatttaaatgaatatgtttcctttttagaaacagtacctaaagaaatcatagaaaaataa

SEQ ID NO: 674 - protein, 223 aa, Artificial Sequence
  Description of Artificial Sequence: synthetic amino acid sequence
MRASHEDIHISGAETMCEFEDLENYLKKYFNKAFNHENGNIDFLNLKIEKVKAPIQTLVALPVVENLNDTLTQLAKQTGVSEYALNKGLEFIKNDITYTGAIILSAQTGQRLDSTEQRGIRVTQLAFKTCKCNGEISERVKDARALATCINAFEGVKAELCVSDDLHYTTGYFASPKLGYRRIFNIKEKGTRHGGRIIFVDEEINLNEYVSFLETVPKEIIEK

SEQ ID NO: 675 - DNA, 1941 bp, Artificial Sequence
  Description of Artificial Sequence: synthetic nucleic acid sequence
gtgatttttttgaaaaataataatgaaacaagaagatttagcattaggaagtacacggtgggagtcgtgtcaatcattactgggattacaatatttgtcagtggtcagcatgctcaagctgctgaaatgacacaatcatcatcagattttaacgaacagtcacaacaaacagaacaagttgaacacaaagaagatacaactcatttatcatacgaattgaatcaagagggtgacacagctagccaatcaaagactaatcaagagaaccaatctgatgaaaatgtacaaaaaaagaataatcaaactcaacaagattcaacacaaacgtcaccattaaatgaccaagaacaaactttaaaggggcaacaatcaaaagacaatcatgttaccccaaattcacgtcaggatacatatccaaaaggccaaaatcaagatgataaaggcaaacaacagtttaaagataatcaacactcacaaacagaacatcaacctaatactcaaaaccaaaataatgatcaagattcatcagataaaaagcaacacccatctgatcaaactcaagccccatcttcaaaaggaacacaacctaaacaatcacagtctataggagatagagataaaacagtaaaacaaccatcttctaaagtacacaaaataggtaatacaaaaactgataaaacagttaaaacaaatcaaaaaaagcaaacatcattaacttcaccacgcgttgtgaaatcaaaacaaactaaacatatcaatcaacttactgcgcaagctcaatataaaaatcaatatccagtcgtgtttgtacatggatttgtaggtttagtcggtgaagattcattcagcatgtacccaaattattggggtggtactaaatataacgtgaaacaagaacttacaaaattaggttaccgagttcacgaagccaatgtaggagcatttagcagcaattatgaccgtgctgttgaactgtattattatattaaaggtggaagagtagattatggtgcagcacatgctgcaaaatatggtcacaagcgttatggcagaacatatgaaggcatcatgcctgattgggaaccaggtaaaaagatacatcttgttggacatagtatgggtggccaaacgatacgcttgatggaacattttttaagaaatggaaatcaagaagaaatagattatcaacgtcaatatggtggtacggtatctgatttgtttaaaggtggacaagataacatggtgtctacgattactacattaggaacacctcataatggcacacctgctgcagataaactagggtcgactaaatttatcaaagatacaattaatagaattggaaaaattggtggaactaaagcgctcgatttagaactaggtttttctcaatggggcttcaaacagaaacctaatgaatcatatgctgaatatgcaaaacgtatagcgaatagtaaagtttgggagactgaagatcaggctgtaaatgatttaacaactgttggagcagaaaagttaaaccaaatgacgacattgaatcctaatatcgtctatacatcatatacaggtgctgcaacacatactggaccattaggcaatgaagtgccgaatattagacaattcccactattcgatttaacaagtcgtgtgataggtggagatgataataaaaatgtcagagtaaatgatggcatagtacctgtgtcttcttcactacatccaagtgatgaagcatttaagaaggtaggtatgatgaacctagcaactgacaagggtatttggcaagtgagacccgtacaatatgattgggatcatctagatttagtcggcttagatactactgattataagcgaactggagaagaattaggtcaattctatatgagtatgataaataatatgttgaaagtcgaagagttagatggtattacacgtaagtag

SEQ ID NO: 676 - protein, 646 aa, Artificial Sequence
  Description of Artificial Sequence: synthetic amino acid sequence
VIFLKNNNETRRFSIRKYTVGVVSIITGITIFVSGQHAQAAEMTQSSSDFNEQSQQTEQVEHKEDTTHLSYELNQEGDTASQSKTNQENQSDENVQKKNNQTQQDSTQTSPLNDQEQTLKGQQSKDNHVTPNSRQDTYPKGQNQDDKGKQQFKDNQHSQTEHQPNTQNQNNDQDSSDKKQHPSDQTQAPSSKGTQPKQSQSIGDRDKTVKQPSSKVHKIGNTKTDKTVKTNQKKQTSLTSPRVVKSKQTKHINQLTAQAQYKNQYPVVFVHGFVGLVGEDSFSMYPNYWGGTKYNVKQELTKLGYRVHEANVGAFSSNYDRAVELYYYIKGGRVDYGAAHAAKYGHKRYGRTYEGIMPDWEPGKKIHLVGHSMGGQTIRLMEHFLRNGNQEEIDYQRQYGGTVSDLFKGGQDNMVSTITTLGTPHNGTPAADKLGSTKFIKDTINRIGKIGGTKALDLELGFSQWGFKQKPNESYAEYAKRIANSKVWETEDQAVNDLTTVGAEKLNQMTTLNPNIVYTSYTGAATHTGPLGNEVPNIRQFPLFDLTSRVIGGDDNKNVRVNDGIVPVSSSLHPSDEAFKKVGMMNLATDKGIWQVRPVQYDWDHLDLVGLDTTDYKRTGEELGQFYMSMINNMLKVEELDGITRK

SEQ ID NO: 677 - DNA, 816 bp, Artificial Sequence
  Description of Artificial Sequence: synthetic nucleic acid sequence
atgtatacaataatagagagatgtgaaaagatgaaatattatgggaagtgcatttcttacataagcattttaatattaacgttttttattggcggatgtggatttatgaataaagaaaataataaagaagcggaaattaaagaaaattttaataaaacattaagtatgtatccaattaaaaatttagaagatttatacgataaagaaggctatcgtgatgaagaatttgaaaaagaggacaaagggacatggattattaattcagaaatgaatattcagaaaaaagatcaagcgatgaaatctagaggtatggttttgtatatgaatagaaatactagaaagacgactggtcatttttatacaaatataattacagaagataaaaaagggagagtgcacagtaaagataaagaatatccggttcgccttaaaaacaataaaattgaaccgactaaacctatcgccgatgaaaaattaaaaaatgaaattaaaaactttcagtttttctctcaatatgggaattttaaaaatttaaaagactacaagaatggaaatgtgtcttataacccaaacgtaccaagctattcggcagagtaccaattaagtaatgaagatgacaatgtgaagcaactcagaaagaggtatgatattccgattaagagagctcctaaactaatattaaaaggggacggtgaccttaaaggttcatctataggttataaagatatcgagttttcttttgtcgacaataaagaagaaagcgtctactttgcggatagtttggaatttaatccaagtgaggtaaataatgagtag

SEQ ID NO: 678 - protein, 271 aa, Artificial Sequence
  Description of Artificial Sequence: synthetic amino acid sequence
MYTIIERCEKMKYYGKCISYISILILTFFIGGCGFMNKENNKEAEIKENFNKTLSMYPIKNLEDLYDKEGYRDEEFEKEDKGTWIINSEMNIQKKDQAMKSRGMVLYMNRNTRKTTGHFYTNIITEDKKGRVHSKDKEYPVRLKNNKIEPTKPIADEKLKNEIKNFQFFSQYGNFKNLKDYKNGNVSYNPNVPSYSAEYQLSNEDDNVKQLRKRYDIPIKRAPKLILKGDGDLKGSSIGYKDIEFSFVDNKEESVYFADSLEFNPSEVNNE

SEQ ID NO: 679 - DNA, 396 bp, Artificial Sequence
  Description of Artificial Sequence: synthetic nucleic acid sequence
atgcctttttctaaacctataattgcgcttggtgaagtaataccattttcttctgtaattagacctatagctttttcaacatatggtactaatgtttcatcaacagaatttgtaataataactttatcagataaatctttaccttctaaatcactagcactatctgcgacaattgcatggcctacaacagatcctctaccaacaccttggcctttagcaatctcatcacctactaagtggattttcatcatatttgtagttcctttttctccagtaggtacaccagcagtaataataattaaatctccgtttgaaactctaccagtttctactgctgttgctacagcattatttagtaaagcatcagttgttttacgtccttctttaacgacctga

SEQ ID NO: 680 - protein, 131 aa, Artificial Sequence
  Description of Artificial Sequence: synthetic amino acid sequence
MPFSKPIIALGEVIPFSSVIRPIAFSTYGTNVSSTEFVIITLSDKSLPSKSLALSATIAWPTTDPLPTPWPLAISSPTKWIFIIFVVPFSPVGTPAVIIIKSPFETLPVSTAVATALFSKASVVLRPSLTT

SEQ ID NO: 681 - DNA, 306 bp, Artificial Sequence
  Description of Artificial Sequence: synthetic nucleic acid sequence
gtgagacgaggcgaaatgtacctgaataatatgcatattgcaccatatgaagaagggaaccgttttaatcatgaccctttacgtacacgtaaattactcttgcacaaaaaagaaattcaaaaattaggtgagcgtacacgagaaataggttattctattattccgttgaagttatatttaaaacatggtcaatgtaaagttttattaggcgttgctagaggtaaaaagaaatacgacaaacgtcaagcacttaaagaaaaagcggtaaaacgagatattgatcgcgcagttaaagcccgttattaa

SEQ ID NO: 682 - protein, 101 aa, Artificial Sequence
  Description of Artificial Sequence: synthetic amino acid sequence
VRRGEMYLNNMHIAPYEEGNRFNHDPLRTRKLLLHKKEIQKLGERTREIGYSIIPLKLYLKHGQCKVLLGVARGKKKYDKRQALKEKAVKRDIDRAVKARY

SEQ ID NO: 683 - DNA, 924 bp, Artificial Sequence
  Description of Artificial Sequence: synthetic nucleic acid sequence
atgaagcctaaagtattgttagcaggtggcaccggctatattggtagatatttaagtcgagtcattgaacatgatgctcaattatttgctttatctaaatatcccaaacctgacaaaggatctacgaacaaaatcacatggttaaaacgcgatatatataatcataaagatgtagttgaagctatgaaaggtatagacattgcggtatattatttagatccaactaaacattctgctaaattaacacatgcaacagcacgagatttaaactttatagcggcagataactttggtagagctgcatcaataaataagctgaaaaagattgtgtatattccggggagccgtcatgataatgaagctattgaacgtttaggcgcttatggcgtaccagttgattgtacggatgttgaagtgaaacgtcctcatattaacgtagaattacaaacagctaaatatgatgatgttcgaacagcgatgaagatgattttaccaaagaaatggacgctcaatcaacttgtagactattttagtaggtggttagatgagacaaaaggaacttttgtacatactcaaaaacaagatcatcactacatcatttacaataggaacattaaaagacctttagctattttcaaaatggttaatacaacagaagatataattacattacatcttgttgatggtaaattgatgaaacctaaatcaaagaagcaagcaaaattagaatttagacttcttaaaggaacacgtttaattatggttcatttatacgattatatccctagattattttggccaatttactatttcatacaagcaccgattcaaggacttcttatgagaggttttgaaattgattgtagaattaagcattatcaaggtcgcattcaatcaggtgagaagattaaatatactaaataa

SEQ ID NO: 684 - protein, 307 aa, Artificial Sequence
  Description of Artificial Sequence: synthetic amino acid sequence
MKPKVLLAGGTGYIGRYLSRVIEHDAQLFALSKYPKPDKGSTNKITWLKRDIYNHKDVVEAMKGIDIAVYYLDPTKHSAKLTHATARDLNFIAADNFGRAASINKLKKIVYIPGSRHDNEAIERLGAYGVPVDCTDVEVKRPHINVELQTAKYDDVRTAMKMILPKKWTLNQLVDYFSRWLDETKGTFVHTQKQDHHYIIYNRNIKRPLAIFKMVNTTEDIITLHLVDGKLMKPKSKKQAKLEFRLLKGTRLIMVHLYDYIPRLFWPIYYFIQAPIQGLLMRGFEIDCRIKHYQGRIQSGEKIKYTK

SEQ ID NO: 685 - DNA, 426 bp, Artificial Sequence
  Description of Artificial Sequence: synthetic nucleic acid sequence
atggatcaagtgatgagtatggaacttggtgcagatgattatatgcaaaaaccattttatacaaacgtcttaattgctaagctacaagctatttatagacgcgtttatgaatttggagttgaagaaaagagaacgttaagttggcaagacgctactgtggatttatcaaaagatagtattcaaaaagatgataaaactatctttttgtctaaaacagagatgattattttagagatgttaatcaataaacgtaatcaaatcgtgacacgagacactctcattactgctttgtgggatgatgaagcttttgttagtgataatactttaacagttaatgttaatagattaagaaaaaaattatcagaaattgacatggatagtgcaattgaaaccaaagttggtaaaggatacttagctcatgaataa

SEQ ID NO: 686 - protein, 141 aa, Artificial Sequence
  Description of Artificial Sequence: synthetic amino acid sequence
MDQVMSMELGADDYMQKPFYTNVLIAKLQAIYRRVYEFGVEEKRTLSWQDATVDLSKDSIQKDDKTIFLSKTEMIILEMLINKRNQIVTRDTLITALWDDEAFVSDNTLTVNVNRLRKKLSEIDMDSAIETKVGKGYLAHE

SEQ ID NO: 687 - DNA, 630 bp, Artificial Sequence
  Description of Artificial Sequence: synthetic nucleic acid sequence
atgaaattattgatagatcaagagaatgatgatcagcgtaagcgagcgttattatttgaatggtctcgtattaatgagatgttagataagcaattatatttaacaaggcttgaaacacatcatcgtgatatgtattttgattatatttcattaaagagaatggttatagatgaaatacaagttactcgacatatcagtcaggcaaaagggataggttttgaattagattttaaagacgaacaaaaggtttatacagatgttaaatggtgccgtatgatgattaggcaagttctatctaactctttgaaatatagtgataattctacaataaatttaagtggttataacatagaaggacacgttgttttaaaaattaaagactacggtcgtggaattagtaaaagagatttaccacgtatatttgatagaggatttacttctacaacagaccgcaacgatactgcgtcttctggtatgggattataccttgtacaaagcgtgaaagaacaacttgggattgaagttaaagttgattcaatagtggggaaaggaacaacgttttatttcattttcccacaacaaaatgaaatcattgagcgcatgtctaaagtgacaagattgtcattttaa

SEQ ID NO: 688 - protein, 209 aa, Artificial Sequence
  Description of Artificial Sequence: synthetic amino acid sequence
MKLLIDQENDDQRKRALLFEWSRINEMLDKQLYLTRLETHHRDMYFDYISLKRMVIDEIQVTRHISQAKGIGFELDFKDEQKVYTDVKWCRMMIRQVLSNSLKYSDNSTINLSGYNIEGHVVLKIKDYGRGISKRDLPRIFDRGFTSTTDRNDTASSGMGLYLVQSVKEQLGIEVKVDSIVGKGTTFYFIFPQQNEIIERMSKVTRLSF

SEQ ID NO: 689 - DNA, 552 bp, Artificial Sequence
  Description of Artificial Sequence: synthetic nucleic acid sequence
atgataacaatgaaagatattataagagatggtcatccaacacttcgtgaaaaagcgaaagaattaagcttcccactttctaacaatgataaagaaacattgcgcgcaatgcgtgaatttctaatcaatagtcaggatgaagaaaccgcaaaacgttatggtttacgttctggcgtaggtttagctgctccacaaattaatgaaccaaaacgtatgattgctgtctacttacctgatgatggaaacggtaaatcgtatgattatatgctcgtaaatcctaaaataatgagttacagtgtacaagaagcttatttaccaactggcgaaggttgtctaagtgttgatgaaaacatcccaggtttagtgcatcgtcatcatagagtcactattaaagctcaagatattgatggaaatgatgttaaattacgtctcaaaggctatcctgcaattgtatttcaacacgaaattgatcatctaaatggcattatgttttatgattatattgatgccaatgaacctctaaaaccacatgaagaggccgtagaagtctaa

SEQ ID NO: 690 - protein, 183 aa, Artificial Sequence
  Description of Artificial Sequence: synthetic amino acid sequence
MITMKDIIRDGHPTLREKAKELSFPLSNNDKETLRAMREFLINSQDEETAKRYGLRSGVGLAAPQINEPKRMIAVYLPDDGNGKSYDYMLVNPKIMSYSVQEAYLPTGEGCLSVDENIPGLVHRHHRVTIKAQDIDGNDVKLRLKGYPAIVFQHEIDHLNGIMFYDYIDANEPLKPHEEAVEV

SEQ ID NO: 691 - DNA, 615 bp, Artificial Sequence
  Description of Artificial Sequence: synthetic nucleic acid sequence
atggctcaattaggtcatgaaggtgtgttgtgcttactatcagactcaacaaacgcactagttccagattttactttaagtgaacgtgaagttggacagaatgtcgataaaattttcagaaattgtaaggggcgtattatctttgcaacttttgcttctaatatttatcgtgttcagcaagcagttgaagcagcaattaaatataatcgtaaaatcgttacatttggacgttcaatggaaaacaatatcaaaattggtatggaactaggatatatcaaagcgccaccagaaacgtttatagaacctaataaaataaatagtgtacctaaacacgagttactcattctttgtactggttctcaaggtgaacctatggctgcattatcaagaattgcaaatggtacacataagcaaataaaaattataccggaagacactgtagtatttagttcttcgcctattccaggtaacactaagagtatcaatcgtacaattaatgcgttgtacaaagctggtgcagatgtgattcatagtaaaatttcaaacatcttgcacaattttagatgctacttcgtttccccatatacaagctttttcaatactttggttatctag

SEQ ID NO: 692 - protein, 204 aa, Artificial Sequence
  Description of Artificial Sequence: synthetic amino acid sequence
MAQLGHEGVLCLLSDSTNALVPDFTLSEREVGQNVDKIFRNCKGRIIFATFASNIYRVQQAVEAAIKYNRKIVTFGRSMENNIKIGMELGYIKAPPETFIEPNKINSVPKHELLILCTGSQGEPMAALSRIANGTHKQIKIIPEDTVVFSSSPIPGNTKSINRTINALYKAGADVIHSKISNILHNFRCYFVSPYTSFFNTLVI

SEQ ID NO: 693 - DNA, 627 bp, Artificial Sequence
  Description of Artificial Sequence: synthetic nucleic acid sequence
atgaattttaaaaagactgtagcaattgtcctaacgtcagcagtgttattagctggatgtactatagataaaaaagaaattaaaaaatatgatgatcaagtacaaaaagctatggaccaagagaaaaccgttaatcaagtaagtaaaaaaataaacgaattagaagagaaaaagcaaaaattatttaaaaaggtaaatgataaagatcaaagcacacgtaaaaaagcagctgaagatatagttgaaaatgtaaaacaaagacaaaaagaatttgaaaaagaagagaaggctctagataattctgaaaaagcatttaaacaagccaagcaatatcttgaacatgtagaaaacaaagcaaagaaaaaagaagttgaacaacttgatagtgctattaaagaaaaatataaatcacatgatgcttatgcaaaggcttacaaaaaagcacttaataaggaaaaagaactgttttcttatttgaatgaagataatgcaacacaatcggaagtagacggaaaatcgaaagatctttctaaagcatataaagaaatgaataataaatttaatgcttactcaaaagccattgagaaagtaaaaagagaaaaacaagatgtagaccaattaaaataa

SEQ ID NO: 694 - protein, 208 aa, Artificial Sequence
  Description of Artificial Sequence: synthetic amino acid sequence
MNFKKTVAIVLTSAVLLAGCTIDKKEIKKYDDQVQKAMDQEKTVNQVSKKINELEEKKQKLFKKVNDKDQSTRKKAAEDIVENVKQRQKEFEKEEKALDNSEKAFKQAKQYLEHVENKAKKKEVEQLDSAIKEKYKSHDAYAKAYKKALNKEKELFSYLNEDNATQSEVDGKSKDLSKAYKEMNNKFNAYSKAIEKVKREKQDVDQLK

SEQ ID NO: 695 - DNA, 1113 bp, Artificial Sequence
  Description of Artificial Sequence: synthetic nucleic acid sequence
atggctcctaagttacaagcccaattcgatgcagttaaagttttaaatgagactcaatcgaaatttgaaatggttcaaattttggatgaagacggaaatgtcgttaatgaagacttagtacctgatttaacagacgaacaattagtggaattaatggaaagaatggtatggactagaattcttgatcaacgttctatttcgttaaatagacaaggacgtttaggtttctatgcaccaacagcaggacaagaagcttcacaattagcatctcagtatgctttagaaagtgaagacttcattttacctggttatcgtgatgtgcctcagattatttggcatggcttacctcttacagacgcattcttattctcaagaggacacttcaaaggtaaccaattccctgagggagttaatgcacttagccctcaaattattatcggtgcacaatatattcaaactgccggtgtagcgtttggacttaaaaaacgtggcaaaaatgcagtcgcaattacttatacaggtgatggtggttcatcacaaggtgacttctatgaaggaattaactttgcatctgcatacaaagcacctgcaatttttgtaattcaaaacaataactatgccatctctacaccacgtagtaaacaaacagctgcagaaacattagcacaaaaggctatttcagttggtatccctggaattcaagttgatggtatggatgctttagctgtttatcaagcaacattagaagcacgtgaacgtgcagtagcaggagaaggtcctactgttatcgaaactttaacttatcgttatggaccacatactatggctggtgatgatcctactcgttatagaacttcagatgaagatgctgaatgggagaaaaaagacccattagtacgtttcagaaaatatttagaagctaaaggtctttggaatgaagacaaagaaaatgaagtggttgaacgtgcaaaatctgaaataaaagcagctattaaagaggctgacaatacagaaaaacaaactgttacttctctaatggatatcatgtatgaagaaatgcctcaaaatttagcagaacaatatgaaatttacaaagagaaggagtcgaagtaa

SEQ ID NO: 696 - protein, 370 aa, Artificial Sequence
  Description of Artificial Sequence: synthetic amino acid sequence
MAPKLQAQFDAVKVLNETQSKFEMVQILDEDGNVVNEDLVPDLTDEQLVELMERMVWTRILDQRSISLNRQGRLGFYAPTAGQEASQLASQYALESEDFILPGYRDVPQIIWHGLPLTDAFLFSRGHFKGNQFPEGVNALSPQIIIGAQYIQTAGVAFGLKKRGKNAVAITYTGDGGSSQGDFYEGINFASAYKAPAIFVIQNNNYAISTPRSKQTAAETLAQKAISVGIPGIQVDGMDALAVYQATLEARERAVAGEGPTVIETLTYRYGPHTMAGDDPTRYRTSDEDAEWEKKDPLVRFRKYLEAKGLWNEDKENEVVERAKSEIKAAIKEADNTEKQTVTSLMDIMYEEMPQNLAEQYEIYKEKESK

SEQ ID NO: 697 - DNA, 978 bp, Artificial Sequence
  Description of Artificial Sequence: synthetic nucleic acid sequence
atggcacaaatgacaatggttcaagcgattaacgatgcgcttaaaagtgaactcaaaagagacgaagacgttttagttttcggtgaagacgttggtgttaacggtggtgtattccgtgttactgaaggtttacaaaaagaatttggcgaagatcgagtatttgatacaccattagcagagtctggaattggtgggcttgcactaggcttagcagtgactggcttccgtcctgttatggaaattcaattcttaggattcgtttatgaagtatttgacgaagtagctggtcaaattgctcgtactcgtttccgttcaggtggaactaaaccagcgcctgttacaattcgtacaccttttggtggtggcgtccacactccagagttgcatgctgataatttagaaggtatcttagctcaatcacctggtttgaaagtagttattccatcaggtccttatgatgctaaaggattattaatttcttctattcaaagtaatgatccagttgtatatctagaacatatgaaattatatcgttctttccgtgaagaggttcctgaagaagaatacaaaattgacattggaaaagccaatgttaaaaaagaaggtaatgatattactctaatatcttacggggcaatggtacaagaatcactaaaagctgctgaagagttagaaaaagatggttattcagttgaagttattgacttacgtactgtacaaccaattgatatagatactttagtagcatcagttgagaaaactggacgtgctgtagttgtacaagaagcacaacgtcaagctggtgtgggtgcacaagtggcagcagaattagcagagcgagcaattctttcattagaagctccaatagctcgagtagccgcatcagatacaatttatccatttactcaagctgaaaacgtttggttaccaaataaaaaagatattatagagcaagctaaggcaactttagaattctaa

SEQ ID NO: 698 - protein, 325 aa, Artificial Sequence
  Description of Artificial Sequence: synthetic amino acid sequence
MAQMTMVQAINDALKSELKRDEDVLVFGEDVGVNGGVFRVTEGLQKEFGEDRVFDTPLAESGIGGLALGLAVTGFRPVMEIQFLGFVYEVFDEVAGQIARTRFRSGGTKPAPVTIRTPFGGGVHTPELHADNLEGILAQSPGLKVVIPSGPYDAKGLLISSIQSNDPVVYLEHMKLYRSFREEVPEEEYKIDIGKANVKKEGNDITLISYGAMVQESLKAAEELEKDGYSVEVIDLRTVQPIDIDTLVASVEKTGRAVVVQEAQRQAGVGAQVAAELAERAILSLEAPIARVAASDTIYPFTQAENVWLPNKKDIIEQAKATLEF

SEQ ID NO: 699 - DNA, 312 bp, Artificial Sequence
  Description of Artificial Sequence: synthetic nucleic acid sequence
gtggcatttgaatttagattacccgatatcggggaaggtatccacgaaggtgaaattgttaaatggtttattaaagccggcgatacaattgaagaagatgatgtattagcagaagttcaaaatgataaatctgtagtagaaattccttctccagtaagtggtactgttgaagaagtgttagtagatgaaggaacagtggcagtagtaggagatgtcatcgttaaaattgatgcacctgatgcagaagaaatgcaatttaaaggtcatggcgatgatgaggattctaagaaagaagaaaaagaaatgatttga

SEQ ID NO: 700 - protein, 103 aa, Artificial Sequence
  Description of Artificial Sequence: synthetic amino acid sequence
VAFEFRLPDIGEGIHEGEIVKWFIKAGDTIEEDDVLAEVQNDKSVVEIPSPVSGTVEEVLVDEGTVAVVGDVIVKIDAPDAEEMQFKGHGDDEDSKKEEKEMI

SEQ ID NO: 701 - DNA, 1143 bp, Artificial Sequence
  Description of Artificial Sequence: synthetic nucleic acid sequence
atggctcaattaggtcatgaaggtgtgttgtgcttactatcagactcaacaaacgcactagttccagattttactttaagtgaacgtgaagttggacagaatgtcgataaaattttcagaaattgtaaggggcgtattatctttgcaacttttgcttctaatatttatcgtgttcagcaagcagttgaagcagcaattaaatataatcgtaaaatcgttacatttggacgttcaatggaaaacaatatcaaaattggtatggaactaggatatatcaaagcgccaccagaaacgtttatagaacctaataaaataaatagtgtacctaaacacgagttactcattctttgtactggttctcaaggtgaacctatggctgcattatcaagaattgcaaatggtacacataagcaaataaaaattataccggaagacactgtagtatttagttcttcgcctattccaggtaacactaagagtatcaatcgtacaattaatgcgttgtacaaagctggtgcagatgtgattcatagtaaaatttcaaacattcacacttctggacacggttctcaaggtgatcaacaattaatgttacgtctgattcaacctaaatacttcctgccaattcacggtgaatatcgtatgcttaaagctcatggtgagactggtgttcaatgcggtgttgatgaagataatgtatttattttcgatatcggtgatgtacttgctttaacacatgattctgcacgaaaagcaggaagaattccttccggcaatgtacttgttgatggcagtggtataggtgatattggcaatgttgtcatcagagatcgtaaattactttcagaagaagggttagttattgttgttgtgagcattgactttaatactaacaaattactatctggccctgatattatttcacgcggttttgtttatatgcgggaatctggtcaattaatttatgatgctcaacgtaaaattaaaggcgatgtcatttctaaacttaacagcaataaagatattcaatggcatcaaattaaatcttcaattatcgaaacattacatccttatctttatgaaaaaacagctcgaaaacctatgattttacctgtgataatgaaagtaaatgaagataaataa

SEQ ID NO: 702 - protein, 380 aa, Artificial Sequence
  Description of Artificial Sequence: synthetic amino acid sequence
MAQLGHEGVLCLLSDSTNALVPDFTLSEREVGQNVDKIFRNCKGRIIFATFASNIYRVQQAVEAAIKYNRKIVTFGRSMENNIKIGMELGYIKAPPETFIEPNKINSVPKHELLILCTGSQGEPMAALSRIANGTHKQIKIIPEDTVVFSSSPIPGNTKSINRTINALYKAGADVIHSKISNIHTSGHGSQGDQQLMLRLIQPKYFLPIHGEYRMLKAHGETGVQCGVDEDNVFIFDIGDVLALTHDSARKAGRIPSGNVLVDGSGIGDIGNVVIRDRKLLSEEGLVIVVVSIDFNTNKLLSGPDIISRGFVYMRESGQLIYDAQRKIKGDVISKLNSNKDIQWHQIKSSIIETLHPYLYEKTARKPMILPVIMKVNEDK

SEQ ID NO: 703 - DNA, 435 bp, Artificial Sequence
  Description of Artificial Sequence: synthetic nucleic acid sequence
atgaagcaagctttagaaaaatatttacaagcgaatagcgatgtacttgataataagtatgtcatgcaacataaattagataaacaaagtgatagtaatcctaaaatcacagaatcacaagctgatcgtcttagcaagttatccaatttagcagttaagaacgatttacatttcaaaaaatttataaaaaacaatcacatccctgaagaatataaagatccaacagatcgcataattaattattttcacgctttaaatagtaccatttcaaatgtagatgaagacattgagaaattaaactaccaaccacaaaattcaattaacgttgttgatgtagccacaaaatattcaggtgatgtaaataaaaaacaacaagataaaattactactttccttaagaaaaaaggaatagacacagaagtatttaataaataa

SEQ ID NO: 704 - protein, 144 aa, Artificial Sequence
  Description of Artificial Sequence: synthetic amino acid sequence
MKQALEKYLQANSDVLDNKYVMQHKLDKQSDSNPKITESQADRLSKLSNLAVKNDLHFKKFIKNNHIPEEYKDPTDRIINYFHALNSTISNVDEDIEKLNYQPQNSINVVDVATKYSGDVNKKQQDKITTFLKKKGIDTEVFNK

SEQ ID NO: 705 - DNA, 393 bp, Artificial Sequence
  Description of Artificial Sequence: synthetic nucleic acid sequence
atgaggaaaatcattatgaagatacgtttaacatttattatcttagcaatactatccaccatcggcttagtacttgttttagcaaaatatccaacaggcccacacacaatcaactataacgaaccttatacagtactcatagccattacgacaatagttataatggctttaccagcactcatattaggtatatttaatcatcttgcatgtagaatcatatcggcgatattacaaataagtgcactgatgatgtgggggtttttagtaatcattagcttaattatgggacaaattgtcattatgcttatggcttccttaacgatacttgcattacttgttagttctattgtcacactttcagtgcacccatctacttcagataaaataaattaa

SEQ ID NO: 706 - protein, 130 aa, Artificial Sequence
  Description of Artificial Sequence: synthetic amino acid sequence
MRKIIMKIRLTFIILAILSTIGLVLVLAKYPTGPHTINYNEPYTVLIAITTIVIMALPALILGIFNHLACRIISAILQISALMMWGFLVIISLIMGQIVIMLMASLTILALLVSSIVTLSVHPSTSDKIN

SEQ ID NO: 707 - DNA, 633 bp, Artificial Sequence
  Description of Artificial Sequence: synthetic nucleic acid sequence
atggacggtttaattacatttatcattatcacattattgattattatagtacctgggccagatttcattattgtaatgaaaaacactattaattcaagtaaaatgaatggttttatggctgcatttggtattactacggggcatattttatactcttcattagctatttttggaattatatacatacttacgagtttacactttgtttttttaacaataaaaatattgggtgcttgttatcttatttatctcggaatcaaaagtattttgagtgcgcacagttctgttgattttagtaaacaagctttagctgatgtcagaaatgtgagttatatcacttcttttagacaaggttttttaagtacaagtcttaaccctaaggctttattattttatgttagtatattcccgcagttcctttctaacggtaatatacatatgaaatctgaagttgcgttatttgctttttcagttgttgtagttatatgcttatggtttttattttgtgtattcatctttcaatatattaaattattattcagcagaccgagattcaaggctatatttgattatattgtagggtttgttttaattggcttatctattaatttattattaagtaaaagtagctaa

SEQ ID NO: 708 - protein, 210 aa, Artificial Sequence
  Description of Artificial Sequence: synthetic amino acid sequence
MDGLITFIIITLLIIIVPGPDFIIVMKNTINSSKMNGFMAAFGITTGHILYSSLAIFGIIYILTSLHFVFLTIKILGACYLIYLGIKSILSAHSSVDFSKQALADVRNVSYITSFRQGFLSTSLNPKALLFYVSIFPQFLSNGNIHMKSEVALFAFSVVVVICLWFLFCVFIFQYIKLLFSRPRFKAIFDYIVGFVLIGLSINLLLSKSS

SEQ ID NO: 709 - DNA, 2106 bp, Artificial Sequence
  Description of Artificial Sequence: synthetic nucleic acid sequence
atgacatgttttttaaatatatataaagaatatcattctccccctgaacgcaatattaatagaattattctgatgttttcacttacaaatgacttaaaaatcactattaatggtgaaacaaaagatttaggtaatcatatagctatcattaatcaatctgacatctattttattaatagtgcttcaaatctcgtattactctctattccagttatttatttttatagtaaagataataaattttttaaatgttattttgacagacatttattacaatcaagcagttttgttaaaacaattattttacaagctattcaacatttaataaaaggagaaaatcaagatgagcaatccatctctaaaataatacaaacgctactaaaagaagcagtcattcgatataagaaaaaatatattcctcaaattgcagttaatcattcagtgtttactgaaggattaacatttattcattcaaaagtatcacagtcactttcactacgagaagtagctcaacattgtaatatatctgaatcttattgttctaacctatttgcaagatatcttaatatgaattttaaagattattttacaagcttaaaagtgattgactctataaaaaggctactttcatctgaggactcaattaacgctatttcagaacaatctggatttagtagtcataccaattttacaaatcaatttaaaaattatttaggttgtagcccaaaacaataccgaacgattatctctaagttagactccttaccttcgataagttttagtgatactgacttttcacaatatattgatttaattaatcaatttgagtttagtgatcatttggctactgaaacgactgaaagagatatcaatgaattttatcctcaagatcagactaaaaactctaaagcgtttatacgttttcaaaatttcaacgaattatttcaatttgtttttaatgaatattacaacattgattttacctccctgccacaagctgtaatttttatcaatgatatcactgatatttcgacgcgagaggtgaactttaatttattaaatcgatgctttgaaaaattattcgaaaaaaatataggtttagccatgagattaacatctacaaatgaatttgaatctatcaaagaaataattttattatttcttaatagccaccaagattataaaatgaacaaaaaaatggttaaatttatgttagtctttgaaactaagaatatgtcagtgaacgatatacatttatgccatttaaaaattaaaaataaaaataaagctatccgttatagtataactgttgaaggattactacaccaaaattcttctattgatcgaacttatgatatgatgaagcgattaaatttcgattactattttatagacattgaaaatctagaaaccaaaaactcattaattaccaaacgtaaatcgtacttacattcgtccacacactttgaaaattataaacaatttatattagattccggtataccttcaactaaatttgtttacaataatttatctttaaagtgttttaaatatacaaacaatggtacttatccacttcaattatctgaccttgtttgtcatttagtcgcattaatgcgttacgggggtggtgtaagttatcaactgatagaagatgagagtccttttattgccttatttaatcgttatggtagtcccctacctctcatgcacctctataaattaatcgaaccatttttaaatgaacctttagagatagctaacaattttttaatgagtcgcaaagatggtaactatcactttttattatttaataaaataaatgatcgttatctatctgatagtcaacagcgctacgtttttaaaaatacattatcaaccaactcattaattattattaaaacgttaaatcatgagcatggcgcaattcaaaaccttctaccacaaactaaacaacaattttatattgaacgtagtattcttgatgaacttgataaatcaaatcaaccaaaaacagaattagctatacaacatgaccatcatcttcctttccaagtcaccttaaaacacgatgaagtcaaatatatttgttttaaaccttcttaa

SEQ ID NO: 710 - protein, 701 aa, Artificial Sequence
  Description of Artificial Sequence: synthetic amino acid sequence
MTCFLNIYKEYHSPPERNINRIILMFSLTNDLKITINGETKDLGNHIAIINQSDIYFINSASNLVLLSIPVIYFYSKDNKFFKCYFDRHLLQSSSFVKTIILQAIQHLIKGENQDEQSISKIIQTLLKEAVIRYKKKYIPQIAVNHSVFTEGLTFIHSKVSQSLSLREVAQHCNISESYCSNLFARYLNMNFKDYFTSLKVIDSIKRLLSSEDSINAISEQSGFSSHTNFTNQFKNYLGCSPKQYRTIISKLDSLPSISFSDTDFSQYIDLINQFEFSDHLATETTERDINEFYPQDQTKNSKAFIRFQNFNELFQFVFNEYYNIDFTSLPQAVIFINDITDISTREVNFNLLNRCFEKLFEKNIGLAMRLTSTNEFESIKEIILLFLNSHQDYKMNKKMVKFMLVFETKNMSVNDIHLCHLKIKNKNKAIRYSITVEGLLHQNSSIDRTYDMMKRLNFDYYFIDIENLETKNSLITKRKSYLHSSTHFENYKQFILDSGIPSTKFVYNNLSLKCFKYTNNGTYPLQLSDLVCHLVALMRYGGGVSYQLIEDESPFIALFNRYGSPLPLMHLYKLIEPFLNEPLEIANNFLMSRKDGNYHFLLFNKINDRYLSDSQQRYVFKNTLSTNSLIIIKTLNHEHGAIQNLLPQTKQQFYIERSILDELDKSNQPKTELAIQHDHHLPFQVTLKHDEVKYICFKPS

SEQ ID NO: 711 - DNA, 465 bp, Artificial Sequence
  Description of Artificial Sequence: synthetic nucleic acid sequence
atgtgtgataaggatatatacaataataaggagatgataattttgaataaacaacaagtgacaaaagcaatagaaaaagtattaaattcttcaaaaattggtgtcctatcaacagcacatcataataaacctaatagcagatatatggtcttttacaacgatgacttaaacttatatacaaaaacgaatatcaattcactaaaagtcgaagaaatagaaaataatcctgatgctcatattttattaggctataacgaaacaacaaacaatagctttgttgaaatagatgccactatagaagttgtcaaaaatcaaaaagttattgattggttatgggaaactcaagacaaaacatttttcaattcaaaagaagatcctgaattatgtgtactcaaagttatacctcgttcaattaaattaatgaatgatgatgaactagatacgccagctacaattgagttataa

SEQ ID NO: 712 - protein, 154 aa, Artificial Sequence
  Description of Artificial Sequence: synthetic amino acid sequence
MCDKDIYNNKEMIILNKQQVTKAIEKVLNSSKIGVLSTAHHNKPNSRYMVFYNDDLNLYTKTNINSLKVEEIENNPDAHILLGYNETTNNSFVEIDATIEVVKNQKVIDWLWETQDKTFFNSKEDPELCVLKVIPRSIKLMNDDELDTPATIEL

SEQ ID NO: 713 - DNA, 399 bp, Artificial Sequence
  Description of Artificial Sequence: synthetic nucleic acid sequence
atgatagaagaattgattaaccgtgaaaaaatgaattttggtgtaatcaatatacttttacagtttgttatgttaaaagaagatatgaagttgccaaaatcttatatttttgaaattgcttccaactggaagaaaattggtatttcaaatgccaaacaagcatatgaatatgcattacaagttaatcaacctaaaaattacgaaacacattctaatgataaacgacagaacaatcgtggaagacaaaatcaatttttatccaaagaaaagacacctaaatggcttcaaaatagggacgatcaagaagaaaataaagaaataaatgatgacactctcgaagaagatcgacaagcatttcttgaaaagttaaatcaaaagtggaaggaggaagataactaa

SEQ ID NO: 714 - protein, 132 aa, Artificial Sequence
  Description of Artificial Sequence: synthetic amino acid sequence
MIEELINREKMNFGVINILLQFVMLKEDMKLPKSYIFEIASNWKKIGISNAKQAYEYALQVNQPKNYETHSNDKRQNNRGRQNQFLSKEKTPKWLQNRDDQEENKEINDDTLEEDRQAFLEKLNQKWKEEDN

SEQ ID NO: 715 - DNA, 468 bp, Artificial Sequence
  Description of Artificial Sequence: synthetic nucleic acid sequence
atgggcgattctcaaaatctagataaacgtatacaaaaaataaaacaaaatgtaatcaatgatactgacgttaaacattttcttgagaaaaatcgtagtaatataactaatgagatgatagacgaagatttaaatgttcttcaagagtataaagatcaacaaaaagtttatgatggacatcgctatgatgattgtccgaattttgtaaaaggacatgttcctgaactatatattgaaaatgaaagaatcaaaattagatatctaccttgcccgtgtaaaattaaacatgatgaggaacgatttgattcacaacttattacatctcaccatatgcaaagagatacacttcatgcaaagctcaaagatatttatatgaataatcgagagagacttgatgtagcaatggcagctgatcaaatctgtacagcaattactcaaattaaaattagaaagttttatacgtcctaa

SEQ ID NO: 716 - protein, 155 aa, Artificial Sequence
  Description of Artificial Sequence: synthetic amino acid sequence
MGDSQNLDKRIQKIKQNVINDTDVKHFLEKNRSNITNEMIDEDLNVLQEYKDQQKVYDGHRYDDCPNFVKGHVPELYIENERIKIRYLPCPCKIKHDEERFDSQLITSHHMQRDTLHAKLKDIYMNNRERLDVAMAADQICTAITQIKIRKFYTS

SEQ ID NO: 717 - DNA, 1368 bp, Artificial Sequence
  Description of Artificial Sequence: synthetic nucleic acid sequence
atggatacgttatttcataaaattaattttaatttcactgcaattggtgaaatgcgactatatgcaactttaagaggtatgtttaaggtaaatcaaacctcattgataaacatgtttaaagaaaataaagtatttcgtttaaatgtatcttacattctttctaaaattggtaaaaatgtataccctttgtttccagatcaaatgttacccactaagcgaaatattttattaatgttttgtccgttgttaccatttatcgggttcgcattcatttttttaattccttcaaaaggtatattaatatgtcttacttttatgattttaaatgcaatattatctttcaaactaaaaaaatcttatgaccaagatttaaaatcaattttttatactgctaatgttataaagcaaagtcaagctttaagtaagattgagagcacgcccgcgataagtgttgattttactcattttaaagcttcacgccgttttagtggtttattagctagagtagaatcacaagatatggcgagtagcataatcatgtttattaaattagtattcatgatagattatgttttatttcatttaatacaacgcagctactttaagtatcaagaagaagttatgacatgttatgactacataagcatattagataatcattactctatagctatgtatcaacatactttgacacattattgttatcctaaaatcaatcacaatattaatggtcttcaaatgaaatcaatcattcatcctctactagatgaagaaaatgcgattgctaacacaattgacatttcaaatcatatattgctcacaggctctaatgcatcaggaaaatctacatttatgaaagcagttgcactaaatttgattttagctcaatcgatacaaactgcaacagctcactcatttatttatcaacctggctatgtaatgacatcaatggcaaatgcggatgacgttttaagtggtgacagttatttcatgtcagaacttaagtctattcgtagattatttaacactcatcagtgcaataagatatattgttttatagatgaaatttttaaaagaacgaatacaactgaacgtattgcggcttctgaatcagtattatcgtatttagataatcaaaaagcatatcaggttatcgctgcgacacatgatgttgaattatcaacattattagaaaatacatataataattatcattttaatgaatcaattcaagaaaatagcatatttttcgattacaaaattaaaccaggtaaagccaatacacgtaatgcaattgaattactacgcattacgcagtttcctatcgatatttatcagcgtgctcaacaaaatattcgaaacctctag

SEQ ID NO: 718 - protein, 455 aa, Artificial Sequence
  Description of Artificial Sequence: synthetic amino acid sequence
MDTLFHKINFNFTAIGEMRLYATLRGMFKVNQTSLINMFKENKVFRLNVSYILSKIGKNVYPLFPDQMLPTKRNILLMFCPLLPFIGFAFIFLIPSKGILICLTFMILNAILSFKLKKSYDQDLKSIFYTANVIKQSQALSKIESTPAISVDFTHFKASRRFSGLLARVESQDMASSIIMFIKLVFMIDYVLFHLIQRSYFKYQEEVMTCYDYISILDNHYSIAMYQHTLTHYCYPKINHNINGLQMKSIIHPLLDEENAIANTIDISNHILLTGSNASGKSTFMKAVALNLILAQSIQTATAHSFIYQPGYVMTSMANADDVLSGDSYFMSELKSIRRLFNTHQCNKIYCFIDEIFKRTNTTERIAASESVLSYLDNQKAYQVIAATHDVELSTLLENTYNNYHFNESIQENSIFFDYKIKPGKANTRNAIELLRITQFPIDIYQRAQQNIRNL

SEQ ID NO: 719 - DNA, 477 bp, Artificial Sequence
  Description of Artificial Sequence: synthetic nucleic acid sequence
atgctacgttattctctacgcacagcatcgcacacagtcaaattagcagaagaattaagctacattgagcagtatgttgccatacaaaatatccgcttcgatgatatgatacagctttacatcgatgctactgagggtgtacaacatcaaacaattggtaagatgatgcttcaaccactcgtagaaaatgccatcaagcatggtcgtgatagtgaacctttaaagataacaattcgtatcagacttacgaagcgcaaattacatattctggttcatgataatggcatcggtatgtctccatcacatttagaacacgtgcgccaatcccttcatcacgatgtttttgatacgacacacctaggtttaaatcatttacataatagagccatgattcaatatggaacatatgcacgtctgcacattttctcaagaagccagcaagggacattaatgtgttaccaaataccacttgtctag

SEQ ID NO: 720 - protein, 158 aa, Artificial Sequence
  Description of Artificial Sequence: synthetic amino acid sequence
MLRYSLRTASHTVKLAEELSYIEQYVAIQNIRFDDMIQLYIDATEGVQHQTIGKMMLQPLVENAIKHGRDSEPLKITIRIRLTKRKLHILVHDNGIGMSPSHLEHVRQSLHHDVFDTTHLGLNHLHNRAMIQYGTYARLHIFSRSQQGTLMCYQIPLV

SEQ ID NO: 721 - DNA, 756 bp, Artificial Sequence; identical to SEQ ID NO: 297
  Description of Artificial Sequence: synthetic nucleic acid sequence

SEQ ID NO: 722 - protein, 251 aa, Artificial Sequence; identical to SEQ ID NO: 298
  Description of Artificial Sequence: synthetic amino acid sequence

SEQ ID NO: 723 - DNA, 507 bp, Artificial Sequence
  Description of Artificial Sequence: synthetic nucleic acid sequence
atggaggacatcatgattttaactattttatttatctttttctgtattcgactcatcagcttaaagatatctatgcaacacgcaaaacagctaaaggtagagggcgcggtggaatatggtgtgaaaaattcaaaatatctagccattacgcatgtattaatttacatgagtgcagctatagaagcattcattcgtaaggatacatttagtctacttaacggcattggcttaatcatattgatcatcgcttatatcatgctatttatagttattaagacattaggtcgtatttggacattgaaattatttatactgcccaatcaccctattattaagtcagggttatataaagtaacgaaacatccaaactattttttaaatatcattcccgaattaattggtgtattactactaacaaatgctacatacacaacactcttattagttccatatgcttattttttaattgtacgtatccgtcaagaagagaaattaatgaatatataa

SEQ ID NO: 724 - protein, 168 aa, Artificial Sequence
  Description of Artificial Sequence: synthetic amino acid sequence
MEDIMILTILFIFFCIRLISLKISMQHAKQLKVEGAVEYGVKNSKYLAITHVLIYMSAAIEAFIRKDTFSLLNGIGLIILIIAYIMLFIVIKTLGRIWTLKLFILPNHPIIKSGLYKVTKHPNYFLNIIPELIGVLLLTNATYTTLLLVPYAYFLIVRIRQEEKLMNI

SEQ ID NO: 725 - DNA, 816 bp, Artificial Sequence
  Description of Artificial Sequence: synthetic nucleic acid sequence
gtggatcaattaaaagtaaaatattcaatcaaattgatactagaagtattaaacatacctaaatcaacatattaccgatggaaaaacaaaacctataaaaatgataccgtaacacaaaaagtcattgaattatgtaaagctaaccactatacctacggttatcgtaagattacagcattgattaatcaatgttatacatcaccaattaatcataagagagtacagagaatgatgcagaagcatcatttgaactgccgagttagacctaaaaagacgacaagaataggtaaaccgtattataaaacggacaatttattacaaagacaatttaaagcgagttgtcccatggaagtattaacaaccgatattacttatttaccatttggtcattctatgttgtatttatcttcgataatggatatttataacggagaaattgtggcgtataaaatagatgataaacaagaccaaagtttagttaatgatacattaaatcaaatcgatatacctgaaggttgtatattacatagtgatcaaggcagcgtttatacatcttatgcttattatcaattgtgcgaagaaaaaggcattatcagaagtatgtcccgaaagggaacacctgccgataacgccccgatagaaagtttccattcctcgctaaagtctgaaactttttacatcaataatgagcttaatcgctctaatcatattgtaatagatattgtcgaaaagtacattaaaaactataataataatcgaattcaacaaaaactaggctacttatccccagtaaaatacagagaattaatagcctag

SEQ ID NO: 726 - protein, 271 aa, Artificial Sequence
  Description of Artificial Sequence: synthetic amino acid sequence
VDQLKVKYSIKLILEVLNIPKSTYYRWKNKTYKNDTVTQKVIELCKANHYTYGYRKITALINQCYTSPINHKRVQRMMQKHHLNCRVRPKKTTRIGKPYYKTDNLLQRQFKASCPMEVLTTDITYLPFGHSMLYLSSIMDIYNGEIVAYKIDDKQDQSLVNDTLNQIDIPEGCILHSDQGSVYTSYAYYQLCEEKGIIRSMSRKGTPADNAPIESFHSSLKSETFYINNELNRSNHIVIDIVEKYIKNYNNNRIQQKLGYLSPVKYRELIA

SEQ ID NO: 727 - DNA, 822 bp, Artificial Sequence
  Description of Artificial Sequence: synthetic nucleic acid sequence
gtgagtgcaaaagtgaaaatggaagacattgacgctattgcagtaacacaaggcccaggattaataggagctttattgattggtattaatgcggctaaagctttggcatttgcttatgataagcctattattccagtacatcatattgctggtcatatttatgccaatcacttagaacaaccattaacgtttccactaatgtcattgattgtatctggtggtcatactgaactagtatatatgaaaaatcatttagatttcgaagtgattggtgaaacgagagatgatgcagtaggagaagcttatgataaagttgctcgaacaatcaatcttccttatcctggtggaccgcatattgatcgattagcagctaaaggtaaagatgtatatgattttccaagagtttggctcgaaaaagatagttatgattttagttttagtggtcttaaaagtgctgtaataaataaactgcataatttaagacagaaaaatattgaaattgtagctgaagatgttgcaacgagtttccaaaatagtgttgtagaagttttaacctataaagctattcatgcttgtaaaacttataatgttaatcgcttaattgttgcaggtggtgttgctagtaataaaggattaagaaatgcactaagtgaagcatgtaaaaaagagggtatacaccttactattccaagtcctgttctttgcactgataatgcagcgatgattggtgctgctggatattatttatatcaagctggtttgcgtggcgatttagctttaaatggacaaaataatattgatattgaaactttttctgtttaa

SEQ ID NO: 728 - protein, 273 aa, Artificial Sequence
  Description of Artificial Sequence: synthetic amino acid sequence
VSAKVKMEDIDAIAVTQGPGLIGALLIGINAAKALAFAYDKPIIPVHHIAGHIYANHLEQPLTFPLMSLIVSGGHTELVYMKNHLDFEVIGETRDDAVGEAYDKVARTINLPYPGGPHIDRLAAKGKDVYDFPRVWLEKDSYDFSFSGLKSAVINKLHNLRQKNIEIVAEDVATSFQNSVVEVLTYKAIHACKTYNVNRLIVAGGVASNKGLRNALSEACKKEGIHLTIPSPVLCTDNAAMIGAAGYYLYQAGLRGDLALNGQNNIDIETFSV

SEQ ID NO: 729 - DNA, 336 bp, Artificial Sequence
  Description of Artificial Sequence: synthetic nucleic acid sequence
gtggaaaattctattaaacatgcatttaaaaatcgtaaaaagaataatcatattgatgtggatgttagcatgaagcaagactacttaagtatatctgttcaagataatggtcaaggcataccagctgatcaattagatactattggatatacgacagtaacgtctaccactggtactggtaatgccttagtcaatcttaataaaagacttactggactatttggaacaacatcggcactgaacattcaatcttctcaatcaggcacgactgtaagttgtttaattccatataaatcttctaaggaggaacactttaatgaaagcgttaatcgttga

SEQ ID NO: 730 - protein, 111 aa, Artificial Sequence
  Description of Artificial Sequence: synthetic amino acid sequence
VENSIKHAFKNRKKNNHIDVDVSMKQDYLSISVQDNGQGIPADQLDTIGYTTVTSTTGTGNALVNLNKRLTGLFGTTSALNIQSSQSGTTVSCLIPYKSSKEEHFNESVNR

SEQ ID NO: 731 - DNA, 591 bp, Artificial Sequence
  Description of Artificial Sequence: synthetic nucleic acid sequence
atggatgaaagtggtattgatttagctcaaaaaattaataaaatgaagcgatcaccacatattatctttgcaaccgctcacgagaaatttgcagtcaaagcctttgaattaaatgcaaccgattatatattaaaaccttttgaaaaagaacgtattaatcaagctgtaaataaggttgacatggctaaagataaatcaaaaaacaaagataaaactatcacacctaaatatattgattatagtgatgatgagcgcgctcaaacacatgtactcccaattgaagtggatgaacgtattcacatcttaaatttcacagacattatcgcattatctgttaataatgggattacaacgatagatacaacaaaacaaagttatgaaacgaccgaaacacttaatcattacgagaaaaaactaccttcctctctatttattaaaatacatcgcgctactatcgttaataaagaacatatccaaacaatagagcattggtttaattatacgtatcagctgacgttaacacatgaatttaaatatcaagttagtcgttcttatatgaagacttttaaacaacaacttggtcttcaataa

SEQ ID NO: 732 - protein, 196 aa, Artificial Sequence
  Description of Artificial Sequence: synthetic amino acid sequence
MDESGIDLAQKINKMKRSPHIIFATAHEKFAVKAFELNATDYILKPFEKERINQAVNKVDMAKDKSKNKDKTITPKYIDYSDDERAQTHVLPIEVDERIHILNFTDIIALSVNNGITTIDTTKQSYETTETLNHYEKKLPSSLFIKIHRATIVNKEHIQTIEHWFNYTYQLTLTHEFKYQVSRSYMKTFKQQLGLQ

SEQ ID NO: 733 - DNA, 399 bp, Artificial Sequence
  Description of Artificial Sequence: synthetic nucleic acid sequence
atgaaatacagtatttttcaacaagcattaacgattgcagtgattttacttatatcaaaaattattgaatcatttatgcctattccaatgccagcttcagtaattggacttgtactattatttatcgcattgtgtacaggcattgtgaaattaggtcaagttgagactgtgggaactgcattaaccaataatattggattcctattcgtaccagccggtatttcagtcattaactctttaccaatccttaagcaaagccctattttaattattttacttattattatttcaacacttttattattaatttgtactggctttgcgtcacaattattagtgacgaaatcacttttcccttctaaagagaaaaatgaagaaacaagtcacataggagggtaa

SEQ ID NO: 734 - protein, 132 aa, Artificial Sequence
  Description of Artificial Sequence: synthetic amino acid sequence
MKYSIFQQALTIAVILLISKIIESFMPIPMPASVIGLVLLFIALCTGIVKLGQVETVGTALTNNIGFLFVPAGISVINSLPILKQSPILIILLIIISTLLLLICTGFASQLLVTKSLFPSKEKNEETSHIGG

SEQ ID NO: 735 - DNA, 702 bp, Artificial Sequence
  Description of Artificial Sequence: synthetic nucleic acid sequence
atgattgaacatttaggaattaatacaccttattttgggatattagtatcattaataccatttgtcatagcgacttatttttataaaaaaacgaatggtttctttttactagcacctttattcgtaagtatggttgcaggtattgcttttttgaaattgacaggaattagttatgagaattataaaatcggtggcgacattattaatttctttctagaaccagctacaatatgctttgcgattcctttatatcgcaagcgcgaagtattaaaaaggtattggttacaaatatttggtggtatagctgttggtacaattattgccttgttattaatttatcttgttgcaataacattccaatttggcaatcaaattatagcatctatgctacctcaagctgcaacgacagcaattgcattacctgtatctgacggtatcggtggtgtcaaagaattaacctcactcgcagttattttaaatgcagttgtcatttctgctttaggtgctaaaatagttaaattatttaaaatatctaaccctattgccagaggacttgcactagggacaagtggacacactttaggtgtcgcggcagctaaagaattgggtgagactgaagaatcaatgggaagtattgcagttgtcatcgttggcgttattgttgtagcagtagttcctatccttgctccaatcttattataa

SEQ ID NO: 736 - protein, 233 aa, Artificial Sequence
  Description of Artificial Sequence: synthetic amino acid sequence
MIEHLGINTPYFGILVSLIPFVIATYFYKKTNGFFLLAPLFVSMVAGIAFLKLTGISYENYKIGGDIINFFLEPATICFAIPLYRKREVLKRYWLQIFGGIAVGTIIALLLIYLVAITFQFGNQIIASMLPQAATTAIALPVSDGIGGVKELTSLAVILNAVVISALGAKIVKLFKISNPIARGLALGTSGHTLGVAAAKELGETEESMGSIAVVIVGVIVVAVVPILAPILL

SEQ ID NO: 737 - DNA, 396 bp, Artificial Sequence; identical to SEQ ID NO: 51
  Description of Artificial Sequence: synthetic nucleic acid sequence

SEQ ID NO: 738 - protein, 131 aa, Artificial Sequence; identical to SEQ ID NO: 52
  Description of Artificial Sequence: synthetic amino acid sequence

SEQ ID NO: 739 - DNA, 872 bp, Artificial Sequence
  Description of Artificial Sequence: synthetic nucleic acid sequence
atgaaagcagcagtatggtatggacaaaaggatgtacgcgttgaagatcgcgaacccaaagcaataaaagacaatgaagtgcaagttaaagtctcttgggccggtatctgtggtactgatttacatgaatatttggaaggacctatctttatttcaactgatcaaccggacccactacttggtcaaactgcacctgtgactttaggtcatgaattttcaggtgtcatagaaaatgttggtaaagacgtatcacgttttaaaaaaggggatcgtgtggtagttaatccaacagtgtctaaaagagaaaagccggaaaatgttgacttgtatgatggttattcatttataggactaggttctgatggtgcatttgccgagtttactaatgctcctgaaacaaatgtttatcatctaccagataatgtttcagcacgagaaggtgctcttgtagaaccaacagccgttgctgtccaagcagttaaagaaggcgaattattattcggtgatactgtagcagtatttggcgctgggccaattggtttgttaactattgttgcagcaaaagctgctggtgcaagtaaaatatttgtctttgacttatcagaagaacgtttagcgaaagctaaaagtgtcggtgcgactcacgtgtataactcaggtaacgtcgatccagtacaaacggtttatgaacacactgacaacggtgtagatgtgtcatttgaagttgctggtgtaggtattactttacaacaatctattgaagtaacacgtccgcgtggtactgctgtcatcgtatcaatcttcggtcatcccgtagaattcaatccattattacaaatgaataaaggtgtcaagttaacaactacaattgc

SEQ ID NO: 740 - protein, 291 aa, Artificial Sequence
  Description of Artificial Sequence: synthetic amino acid sequence
MKAAVWYGQKDVRVEDREPKAIKDNEVQVKVSWAGICGTDLHEYLEGPIFISTDQPDPLLGQTAPVTLGHEFSGVIENVGKDVSRFKKGDRVVVNPTVSKREKPENVDLYDGYSFIGLGSDGAFAEFTNAPETNVYHLPDNVSAREGALVEPTAVAVQAVKEGELLFGDTVAVFGAGPIGLLTIVAAKAAGASKIFVFDLSEERLAKAKSVGATHVYNSGNVDPVQTVYEHTDNGVDVSFEVAGVGITLQQSIEVTRPRGTAVIVSIFGHPVEFNPLLQMNKGVKLTTTIA

SEQ ID NO: 741 - DNA, 1107 bp, Artificial Sequence
  Description of Artificial Sequence: synthetic nucleic acid sequence
atgattgaggcgacagatggacagattatgatgaatggaaaagatgtccgtaatatgaatcctgttgaattgcggagaagtatcggttatgtcattcaacaaattggtttgatgccacatatgactattcgagaaaatattgttttagtacctaaacttttaaaatggtctaaagagaagaaagatgaaaaagctaaagaacttattaaactggtagatttacctgaagaatatttggatcgttatccagctgaattgtcaggagggcaacaacaacgaattggtgttgtgcgcgctttagcagctgaacaagatattatattaatggatgaacctttcggtgcattagatcctattacacgcgatacattacaagatttagtaaaggaattacaacaaaaattaggaaaaacatttatttttgtcactcatgatatggatgaggctattaaattagcagacaaaatatgtattatgtctaagggaaaagtcgttcaatacgatacacctgacaatattttacgatatcctgcaaatgactttgttagagattttattgggcaaaatcgcttgattcaggatcgtcctaatatgaaatctgtggaaagtgctatgatcaaacccgtcactgttaaagcagatgattcattgaatgatgcagtaaatattatgagaacacgtcgagtagacactatttttgtagtcaataatcaaaataaattattaggatttttagatattgaagatatcaatcaaggattacgtgcgcgtaaagaattaattgataccatgcaaagggatgtctacaaagtacatatcaattcaaagttacaagactcagtgcgtactattctaaaacgtaatgttagaaatgtccctgtggtcgataatgatgaacatctcattggtttaattacacgtgcaaacttagtcgatattgtgtatgactcaatttggggcgaagaagattctgatagttatgagatcccaaatgaaagcttagatgagaataatcacgatttaccacaaaatcaaactgatacacgaacaaatataaatgaagatgtgaatgattatcatgatgctcaacatagaggtgaggattaa

SEQ ID NO: 742 - protein, 368 aa, Artificial Sequence
  Description of Artificial Sequence: synthetic amino acid sequence
MIEATDGQIMMNGKDVRNMNPVELRRSIGYVIQQIGLMPHMTIRENIVLVPKLLKWSKEKKDEKAKELIKLVDLPEEYLDRYPAELSGGQQQRIGVVRALAAEQDIILMDEPFGALDPITRDTLQDLVKELQQKLGKTFIFVTHDMDEAIKLADKICIMSKGKVVQYDTPDNILRYPANDFVRDFIGQNRLIQDRPNMKSVESAMIKPVTVKADDSLNDAVNIMRTRRVDTIFVVNNQNKLLGFLDIEDINQGLRARKELIDTMQRDVYKVHINSKLQDSVRTILKRNVRNVPVVDNDEHLIGLITRANLVDIVYDSIWGEEDSDSYEIPNESLDENNHDLPQNQTDTRTNINEDVNDYHDAQHRGED

SEQ ID NO: 743 - DNA, 636 bp, Artificial Sequence
  Description of Artificial Sequence: synthetic nucleic acid sequence
atgaaagcattcttacaagaatatggtagtcaacttttatcaaaagcagtagaacatttttatatttctatgtttgcattattgttagcgattgtagtagctgtccctttaggtattttattatcaaaaacgcaacgcacagctaatgtggtattaacagttgctggcgtgcttcaaaccattcctactttggctgtgctagctatcatgattccaatatttggggtaggaaaaacaccagctattgttgcattatttatctatgtattattaccaattttaaataatacagtattaggtgttaaaaatatcgataaaaatgtcattcaagctggtcaaagtatgggaatgactaaatttcaattaatgaaagatgtagaaatgcctttagctttaccacttattattagtggtattcgtctatcaagtgtatacgtcattagttgggcaacactcgcaagttatgtaggtgcaggtggacttggggatcttgtatttaatggattaaatctctatcaaccacctatgattattagtgcagcgattgttgttactttattagcattagttattgactttatactttcattagttgaaaaatgggttgtacctaaaggattaaaagtatctagataa

SEQ ID NO: 744 - protein, 211 aa, Artificial Sequence
  Description of Artificial Sequence: synthetic amino acid sequence
MKAFLQEYGSQLLSKAVEHFYISMFALLLAIVVAVPLGILLSKTQRTANVVLTVAGVLQTIPTLAVLAIMIPIFGVGKTPAIVALFIYVLLPILNNTVLGVKNIDKNVIQAGQSMGMTKFQLMKDVEMPLALPLIISGIRLSSVYVISWATLASYVGAGGLGDLVFNGLNLYQPPMIISAAIVVTLLALVIDFILSLVEKWVVPKGLKVSR

SEQ ID NO: 745 - DNA, 894 bp, Artificial Sequence; identical to SEQ ID NO: 65
  Description of Artificial Sequence: synthetic nucleic acid sequence

SEQ ID NO: 746 - protein, 297 aa, Artificial Sequence; identical to SEQ ID NO: 66
  Description of Artificial Sequence: synthetic amino acid sequence

SEQ ID NO: 747 - DNA, 609 bp, Artificial Sequence; identical to SEQ ID NO: 67
  Description of Artificial Sequence: synthetic nucleic acid sequence

SEQ ID NO: 748 - protein, 202 aa, Artificial Sequence; identical to SEQ ID NO: 68
  Description of Artificial Sequence: synthetic amino acid sequence

SEQ ID NO: 749 - DNA, 479 bp, Artificial Sequence
  Description of Artificial Sequence: synthetic nucleic acid sequence
gtggtacgtatgccgggtactacgacaccaaagtataagcgtaattttaatcgtgaaacatcacgttgggattatttaatttcgccaaatagatattcaactgaaatatttagaagtgctttttggatggatgaagaaagaatattagagataggttatccaagaaatgatgtattagttaatagagccaatgatcaagagtatttagatgaaattagaactcacttaaatttacctagtgataaaaaggttattatgtatgctccgacatggagagacgatgaatttgtgagtaaaggaaaatatttgtttgaattaaaaattgatttagacaacctttataaagaactcggagatgattatgtgattttattacgcatgcattatctcatttctaacgcacttgatttatctggttatgaaaattttgcaattgatgtttcaaactataatgacgtctctgaattatttttaataag

SEQ ID NO: 750 - protein, 160 aa, Artificial Sequence
  Description of Artificial Sequence: synthetic amino acid sequence
  MOD_RES (160): variable amino acid
VVRMPGTTTPKYKRNFNRETSRWDYLISPNRYSTEIFRSAFWMDEERILEIGYPRNDVLVNRANDQEYLDEIRTHLNLPSDKKVIMYAPTWRDDEFVSKGKYLFELKIDLDNLYKELGDDYVILLRMHYLISNALDLSGYENFAIDVSNYNDVSELFLIX

SEQ ID NO: 751 - DNA, 822 bp, Artificial Sequence
  Description of Artificial Sequence: synthetic nucleic acid sequence
atgtgtaaacacctctctcttcaactcagtgaaaataaaggcgatattattaaatattgtaaatctattaaaaatgaaaattatagctctgatgtagacgttttatttattttaggtggagatggtacacttaatgaactagtaaatggcgttatgcagtatcagttaaatttaccaatcggtgtaataccaggtggtacctttaacgattttacaaaaacacttcaactgcaccctaattttaaaacagctagtgagcaattattaacatcacatgctgaatcatatgatgtgttaaaagtgaacgacttatatgtacttaatttcgttggacttggcttaatagtacaaaatgcagagaatgttcaagatggttctaaagatatattcggtaaattcagctatattggatcaaccgttaaaacgttattaaatcctgttaaatttgatttctcattgactgttgatggtgaaacaaaagaaggcaatacttcgatgatgttaatagcaaacggtcccaatataggtggtggacaaattccgctaaccgatttatcgccacaagatggaagagcaaacacatttgtatttaatgatcaaacactaaatatattgaatgatatattaaaaaaacgtgatagtatgaattggaacgaaatcacacaaggtattgatcacatatcaggtaagcacatcacactctcaacaaaccctagtatgaaagtggatattgatggcgaaattaatttagaaacaccaattgagattcaagtattacccaaagcgatacaacttcttactgcaactgaacaaaataattaa

SEQ ID NO: 752 - protein, 273 aa, Artificial Sequence
  Description of Artificial Sequence: synthetic amino acid sequence
MCKHLSLQLSENKGDIIKYCKSIKNENYSSDVDVLFILGGDGTLNELVNGVMQYQLNLPIGVIPGGTFNDFTKTLQLHPNFKTASEQLLTSHAESYDVLKVNDLYVLNFVGLGLIVQNAENVQDGSKDIFGKFSYIGSTVKTLLNPVKFDFSLTVDGETKEGNTSMMLIANGPNIGGGQIPLTDLSPQDGRANTFVFNDQTLNILNDILKKRDSMNWNEITQGIDHISGKHITLSTNPSMKVDIDGEINLETPIEIQVLPKAIQLLTATEQNN

SEQ ID NO: 753 - DNA, 2652 bp, Artificial Sequence
  Description of Artificial Sequence: synthetic nucleic acid sequence
atgtttgtgaattatttcacaatatctaaggagtggttgtatatgttatctgtaactaaaaaaaatacatatgaatcaaacaaagatgaagtcacacaaatgattgattcattagcagaaaaaggacaagaagctctaaaagaactatctaaaaaatcacaacatgagattaatgacattgtacatcagatgagcatggctgctgttgatcagcatatgcatttagctaaactagcttacgacgaaacaggtagaggtatttatgaagacaaagctatcaaaaatttatatgcctcagagtacatatggaattcaatcaaagacaataaaacagtaggtatcataggtgaagataaacaaaaaggattaacgtatgtagctgaacctataggcgtgatttgtggagtgacaccaacgaccaaccctacatctacaactattttcaaagcaatgattgctattaaaacaggtaatccaattattttcgcatttcatccaagtgcacaacaatcatcaaaatatgctgctaaagtcattttagaagctgcaacaaaagcaggtgctcctaaagattgtattcaatggatagaagtgccatcaattgaggcaactaaacaattaatgaatcataaagatattgctttagttctagcgactggaggctctggaatggtaaagtccgcatattcgacaggtaaacctgcattaggagtcggtccaggtaatgttcctacttatattgaaaaaactgctcatatcaaacgtgctgttaatgatatcattggttctaaaacttttgataatggtatgatttgtgcttctgaacaagtcatggttgttgataaagaagtatacactgacgtcgttaaagaattcaaattacaccaaacatattttgttaataaaaatgaactacaacaattagaagatgccatcatgaatgaagataaaactgcagttaaacctgatatagttggtaaatctgctgtagatatagcgaaattgtcaggaattagtgttccagaaaaaacaaaattattagtcgcagaaattgatggaattggaaaagattatcctttatcacgtgaaaaattatcacctgtactcgcaatggtaactgcaaaatcaacaggacatgcactacaaatttgtgaagacatattaaaatttggtggtttaggtcacactgctgtaattcacaccgaggatagtcaattacaacaaaaattcggtctaaaaatgaaagcttgccgtgtattggtaaatacaccttctgctgtcggaggaattggaaatatgtataatgaactcattccttcactcacgttaggttgtggttcatatggtagaaattctatttctcataatgtaagcgcagtagacttattaaatattaaaacaatagcaaaacgtcgtaataatatgcaatggtttaaactcccacctaaagtttattttgaagaaaattcagttatgtatttgacagagatggataatgttgaacgtgtaatgatagtttgtgatccaggaatggttaatattggttatactgatatagttgaacaagtgctgagacgccgagaaaaccaaccacaaatcaaagtgtttaacgaagttgaacctaatccatcaactcatacagtctataaggggttagaaatgtttataaatttccaacctaatactattattgcactcggtggcggttcggcaatggatgcagccaaagcaatatggatgttctttgagcatccagaaacttcattttttggggcaaaacaaaagttcttagatattcgtaaacgtacttataaaattaccaaacctaaaaacgcaaaatttatatgtataccaacgacatcaggaactggttctgaagtgacaccttttgcagtaattactgatagcgagacacacgttaagtatccactagcagattatgcgttaactcccgatattgctatcgtcgatccacaattcgtattaagtgtacctaaagatgttgccgcagatacaggaatggatgttttgacacatgccattgaatcttacgtctctgtcatggcttcagattatacaagaggcttaagcttacaagcaataaagttaacttttgattatctaaaatcatcagttcaagaaaatgacaaacactcacgagaaaaaatgcataatgcttcaacaatggccggtatggcatttgccaatgcttttttaggaatttctcattctatcgcacataaaattggtggtgaatatggtattccccacggcagaacaaatgctattttattaccacatgtcattcgctataatgccaaagatccacaaaaacatgcactgtttcctaaatatgatttctttagagcagatactgactatgctgacattgcaaaatttttaggactcaaaggtaatacaactgaagaattagtggatgctctagctaatgcggtgtatgatttaggatgttcagttggtattgatatgaatttaaaatcacaaggcgtaactgaagagcttcttcactctactatagacagaatggctgaattagcatttgaagatcaatgtacaactgctaatccaaaagaaccgctaattagtgaacttaaaggcattatcgaaacagcatatgattatgaaagataa

SEQ ID NO: 754 - protein, 883 aa, Artificial Sequence
  Description of Artificial Sequence: synthetic amino acid sequence
MFVNYFTISKEWLYMLSVTKKNTYESNKDEVTQMIDSLAEKGQEALKELSKKSQHEINDIVHQMSMAAVDQHMHLAKLAYDETGRGIYEDKAIKNLYASEYIWNSIKDNKTVGIIGEDKQKGLTYVAEPIGVICGVTPTTNPTSTTIFKAMIAIKTGNPIIFAFHPSAQQSSKYAAKVILEAATKAGAPKDCIQWIEVPSIEATKQLMNHKDIALVLATGGSGMVKSAYSTGKPALGVGPGNVPTYIEKTAHIKRAVNDIIGSKTFDNGMICASEQVMVVDKEVYTDVVKEFKLHQTYFVNKNELQQLEDAIMNEDKTAVKPDIVGKSAVDIAKLSGISVPEKTKLLVAEIDGIGKDYPLSREKLSPVLAMVTAKSTGHALQICEDILKFGGLGHTAVIHTEDSQLQQKFGLKMKACRVLVNTPSAVGGIGNMYNELIPSLTLGCGSYGRNSISHNVSAVDLLNIKTIAKRRNNMQWFKLPPKVYFEENSVMYLTEMDNVERVMIVCDPGMVNIGYTDIVEQVLRRRENQPQIKVFNEVEPNPSTHTVYKGLEMFINFQPNTIIALGGGSAMDAAKAIWMFFEHPETSFFGAKQKFLDIRKRTYKITKPKNAKFICIPTTSGTGSEVTPFAVITDSETHVKYPLADYALTPDIAIVDPQFVLSVPKDVAADTGMDVLTHAIESYVSVMASDYTRGLSLQAIKLTFDYLKSSVQENDKHSREKMHNASTMAGMAFANAFLGISHSIAHKIGGEYGIPHGRTNAILLPHVIRYNAKDPQKHALFPKYDFFRADTDYADIAKFLGLKGNTTEELVDALANAVYDLGCSVGIDMNLKSQGVTEELLHSTIDRMAELAFEDQCTTANPKEPLISELKGIIETAYDYER

SEQ ID NO: 755 - DNA, 477 bp, Artificial Sequence
  Description of Artificial Sequence: synthetic nucleic acid sequence
gtgaataaggatgctgagaaccctaaacctaaagaagggatagggacttggattggaaaagatattaaaacactaacgcatcattatggacaagctgatcggtcttatccatataaaaatgggttaaaaaattatgtctttaaacagaaagatgaatattatattgtaagtactaataaaggaacaatcacatcagtttatgccacaggtaaaggtgtgaaagtgagcccacttaaaataggtgaaagttcatctcatatttttgaagatactagtattaatccagaaccaactgtcaaaacgaaaggtaaaacttataaatttgaaatgtctgatgaagacttaaagacacagacgttaattaaatatggagatgtttatgctcaaatatattctgatcaacaaactaataaaattttggcagtgagatttttagatgcaaatacattggcaacactacaaccatataagttataa

SEQ ID NO: 756 - protein, 158 aa, Artificial Sequence
  Description of Artificial Sequence: synthetic amino acid sequence
VNKDAENPKPKEGIGTWIGKDIKTLTHHYGQADRSYPYKNGLKNYVFKQKDEYYIVSTNKGTITSVYATGKGVKVSPLKIGESSSHIFEDTSINPEPTVKTKGKTYKFEMSDEDLKTQTLIKYGDVYAQIYSDQQTNKILAVRFLDANTLATLQPYKL

SEQ ID NO: 757 - DNA, 873 bp, Artificial Sequence
  Description of Artificial Sequence: synthetic nucleic acid sequence
atggatgcgattacgcctgaagttgagcaatatatttataagataagttattggctgacgaatattgctgtcgcctttggtgcgctcataggtggattgatgtatggggcacataaatctatgttgtttttcatcgcttttgtcatttacattatggtttttatagcacttatcgtatggttgcctaaagatttaaatattgttactcagtcgcacacacatcatgctaatgagaaacaattctccatgggtcaaatattaaaaagttataaaccagcatttaaagatacaacatatctacttctaattataggatttagtattttaacaatgggtgagttatctgcatcatcgtacatttcagtgcgtttaaaacaagagtttgatccgatgatattgttttcgttacatatcaatggcgttaaaatgtattcacttctattaatgacgaatacaatcattgttataatttttacctattttatttcaaaaattgttatgagaatgaatgttaaaacagcattattggttggaattattttttatgtcattggatattcgaacctcacttatcttaatgattttacgttacttatcatatttatgattatagcgacgataggtgaaatggtatattctccaattcttgaagaaaatcgttttaaaatggttccttctcataaaagagggacatattcagcagtgcatgctttaggatttaacctagctgaattacttgcaagatttggaattatattaggagtgtttttaacttcaatggagatggggatctatatgtttgttttattattactaggtggcatgtcactttacattgcagtgagtcgttttaataatacaaattcacaataa

SEQ ID NO: 758 - protein, 290 aa, Artificial Sequence
  Description of Artificial Sequence: synthetic amino acid sequence
MDAITPEVEQYIYKISYWLTNIAVAFGALIGGLMYGAHKSMLFFIAFVIYIMVFIALIVWLPKDLNIVTQSHTHHANEKQFSMGQILKSYKPAFKDTTYLLLIIGFSILTMGELSASSYISVRLKQEFDPMILFSLHINGVKMYSLLLMTNTIIVIIFTYFISKIVMRMNVKTALLVGIIFYVIGYSNLTYLNDFTLLIIFMIIATIGEMVYSPILEENRFKMVPSHKRGTYSAVHALGFNLAELLARFGIILGVFLTSMEMGIYMFVLLLLGGMSLYIAVSRFNNTNSQ

SEQ ID NO: 759 - DNA, 6968 bp, Artificial Sequence
  Description of Artificial Sequence: synthetic nucleic acid sequence
gtgacatactgggtaaagttaagtcgcgacattgagttacgtagattaatgtatgcattattagatgtcgttcaaagtcaacctgtgttgcgtacacagtttgtgacagatgattttaatcaactcaagataaatttaagagatttttttccatttattgaaattaaagaagttaatgaaatgtcgcaaagcatagatttagaagcattctttacacgtaatttaaattcctaccatttcaatcaattacctctgtttaattttaagatatatcaatttctagatggcgcctacctacttttagatttccacgctactatttttaatgaaagtcaattaactccatttttacaacaattaaatattgcttatacccactctttaaaaagtgaatatagtatctcggatttttataattggattaaagaaatgaatcaaaagatggatcaaaatcaagttgtgtgtccatcaaagcacttcaacgtattgaatgcagacggtgataattacgcttacatacctgtaaagaatacatctgaaaagaaaaaaatgtgttctttgcatgcagaactaccatctttagacattgatgcgtggattgtaagtatttacttagcgcatcattttataagtcagtcttctgatgtgacgttaggcatccatttttcgatagataataaaaatactgagaatatgatggttttaaacacagacattgccccacttaatttaagtattagtcaaagtgacgccgtaaaagatatggtggatgagtgttccgcgctacttgaagagcttcaaatgtgtggtgcgtcttttgttgttcaacctaaagcagtacaaatagatgtagaaacgatgattcatattgaaaaagtacaagaacaatttgagcttaatcatatatgtcatcatatacatcgtctatacaatgaagcatcatcattcgcggatttagagttttatcctcatgtgcagggtggttttgatatagtttataatgacaacgtttatgatgaattaactgtaaatacgttagtcaaattaattaatgggatttatatgcaaattacacaaaatccatcattattaattaaagatataaaactcagtgatcgctcagatttagctaaatataatgacatcaatcttcaaaacaatgacattaattatagtgaggtcacttataaaaccgtggttgaaagattcgaacgtcaagtgcaccaacatcccgatagtattgcgttgcaatatgaacaacgatcgatgacatatcatcaattaaatcaatgtgcgaatcttttagcatatagattgcgtttaaatcatcagattgaacctaatgatatggtggcattaatagcagaacgcagcttagaaatgattattggaatgttagggatcttgaaagctggtgcaggctacataccaattgatccggattatcctgaagaaagaatgaattatattattgaggacgcaaaacctaaagcggttgtaacatatcgtacatcatttcaatcaggtttacctcaaatggatatagaattgatagttgattcaagagaacatgatattgataacccgagaggcattaattgttcagaagatatcgcttatgtcatctatacatcaggaacgactggtaaacctaaagggacactggtgccacatagaggaattgatcgcttagtacacaatccaaattatgtcgaattgaacgaaaatacaaccgtcttattatcaggaacagtagcttttgatgcagcaacctttgaaatatatggtccattattgaatggtggacggttagtcattacatctaaagatacgttgttaaatcctcaattgttagatcaagctattactgaaaataaagtcaacacgatgtggttaacgtcatctttatttaatcaaattgctagcgaacgtatcgaagcactagaatctttaacttatttacttattggtggggaagtgttaaatgctaaatgggttcacttattaaattcgcgtgagtgtcatcctcaaataatcaatggttatggaccgacagagaatacaacatttactacaacttttgcgattccacaagagatgccttcacgtatacctattggtttacctattagtggaacgacagtttatgtcatgcaaggtaatcgtatttgtggcgtaggtgttccaggtgaattgtgcattggtggtgcaggtttagcaaaaggttatttaaatcaacctaaacttactgctgaacgttttattcagtcaccttttaacaatgaaatgctttatcgaagcggtgatttagttcgtcttcaagaagatggctatattgattatattagtcgtatcgataagcaagttaaaatacgcggttttagaatagaattatcagaaattgaaaaagcattagaagctatacgtgatattaataaagctgtagtcatcgttcgagagcaagaccaagataaacaaatagtggcatattatgaagcatcgcaattaaaatcaacaggtcaattaaaagatattttaagtgaaacattacctgaatatatgatacctgtgcattttatgaaggtggatcgtatacctatcacgatgaatgggaaattagatgtgcgtgcattacctgaaattaatctaaagaataatagaaattatgtagaaccacgtaacgatattgaacgcacagtttgccgtattttcgaagagattttacatgttgatcaggtaggtgttaaagataatttctttgaactaggtggacactctcttagagcaacattagttgtaaaccgtattgaagaaaggttaaaaaaacgtcttaaagtaggtgatttaatgaaatcgcctactgtagagcaacttggacaacaaattgaagaactgcaaaatgatgtctatgaagtgattcccaaagcaaatgaatcgtatcaatatgatttaagtgcgtctcaaaaaagtatgtatcttttatggaaggtcaatcctaaagacacagtgtataacattccattcttatggagattatcttctgaacttaatgttatgcaattgcaacgtgcattatctaagttgattgaacgtcatgaaatattacgaacacaatatgtaattgatgacaatgaagttaaacaacgtattgcgacacatgtttcgcctgattttgaagaggtaacgacatctctaacgaacgagcaagatattattcaatcatttatggaaccgtttgatttagaacaaccaagtcagatgcgagttaaatatatacatggaccacaacaagattatttatttatggatactcatcatagtattaatgatggtatgagtaacacgattttactatctgatttgaacgctttataccaagataaatcattacctgaacttaagcttcagtataaagattatagtgagtggatggtgcacagagacttatctaaacaacgtcacttttggttacagcaatttgaaaatcaggttccaatattaaatatgcctacggattatcctagaccaagtattaaaacaaccaacggtaatatgttgacgtttcattacaatcgtcaaatcaaacagcaattgaaatcttatgtagaacaacatcaagtgacagactttatgttctttgctagtgcaatcatggtattattgcacaaatatacacgtcaggacgatatcgctattggtagtgtaatcagtgcgcgtactcatcgcgatactgaaaatatgttaggtatgtttgctaatacacttgtatatcgtggtcgaccacatgatcaaaagacatgggatcaattgatggctgagatgaaagagatgtgtctaggggcatatgaacatcaagaatatccttttgaaagcttagtcaatgatcttgttgatgaaagagatgcttcacataatccgttatttgatgtgatgctcgtacttcaaaataatgaaacaaatcatgcgaattttggacatagtcaattgacacatattccacctcagtcaacaacagctaaatttgatttgtcatttattattgaagaagatcaagatgactatgtcgtcaatattgaatataatacagatttatataaacaagagaccattcatcatattgctgaacaacttcaaatgattattaaacatgtaatatctaccgaaaacctaaaaattcaagatattgatgaaaatgatgacttattaatttggttggacaagcatgtgaatgattgttctttagacttgccaaaaaataagtcaatacagcaacttttacatgatgtcatgaaagcgaaagcagatgatgtagcacttaaaatgaatggacaatcgatgacgtatcaagaacttgatgattattctaatagtatggctcaaacattgatacaaaatggcattcaaaaaggggaacgtgtagcccttttaactgaacgaagttttgaaatggttgctagtatgattgctgtattaaaagttggaggttcttatgtacctattgacgtcacttatcccgataaacgcattgaatttattattgaagacgctgaagtcgcagcagtgctcacatatggaaaagcaatatcctcacatataccagtaattaaaattgaagatattgataacactgaaaataataaaaggttaaatatagaatatgcagggaatttggaagatgatatgtatcatatttatacatctggaacaacaggaaagcctaaagcagtatcagtgaaacaacgtaatatattaaatttagtatgtgcttggacaaaaagactcaatttatccgatgatgaagtctatctgcagtacgctaattatgtgttcgatgcttcggcaactgatttctactgtagtttattaaatggatatccgcttgtcattgcaacatcagttgagcggaccaatacagatttattagaaaagttaatttcacaagaaaatatcaccatcgcatctattccactacaggtatataatgtgatgcatcatttctatattcctaaagtgattacaggaggtgcgccaagtactccagcatttgttcaacatatttctaagcattgtgatatgtacgttaatgcctatgggccttctgaaaatacagttataacatcttgttggatatacgaaaaaggtgacgccataccatcgactattccgattgggaaaccgttagctaatgttgatatttttattatgtcaggcggtaaactatgtggcgttggtattccaggtgaattatgtattgcaggagaaagtttaacttcaggatatttaaacagacccgaactttctgctgaaaaatttataaataatccttttgggccaggacaactttatcgaagtggtgatttagcacgattgatgccagatgggcaaattgaatttcttggtagaatagacaagcaagttaaagtacatggctatcgcattgaactaggtgaaattgaaaatatcattaattcagtagatactgttacagatagcgttgttattttagctaaacagggtgagcgtgaagtgctgcatgcttattatgttggaagtcaagaagatgaaagtcatatttcacaacatttaaatcaatatttgcctaaatacatgattcctaagacattaacagctattagcgaaattccattaacaggaaatgataaggtggatgagtcaagattacctgtacctaatgtacacaaaaataaatttgttgcaccacgtaataatatcgaacgagaaatagcacaaatcgttagcggagtgttggacgtatcgtctatgagtatagatgatgacttctttgaaatgggtggtacatcactagatgctatggtggtagtatcaaaactaaaatcaaatggcatacacattacaatgcaagatgtatatcaatttaaaactgttcgttatatagctaatcacacagaaaaacgccaagcactaccagaagtagtattaccagatcatctaccacaattacaatctttggttgaaagacgataccaactaaaatcacaacacctaacgcaatcatctctaggtcatgtattgctaactggtgcaacagggttcctaggcgcatatttaattgatgaaatgcaagatgatgctgatcaaattacatgtattgtcagaggtcatgatatcaatcaagctaaaactaacttggaaaataatttaaattgttattttgatacggctcatgtggataaattaatgaagcacattgatattattttagcggatttatcagaacttgaccatcttattatcgattcagccattgatacaattattcatgctggagctcgtacagatcactttggcgatgatgaaacatttttcgatgtcaatgtaagaagtacacaagcattaattgatttagctaaggataaaaaagcgaaattaatctatatatcaacgataagtgtgggtacggtatttgaagtacatcaagacgatattacattttctgaaaaagatttatataaaggccagttatttacatcaccatacactaaaagtaagttttatagcgagattaaagtgttagaagcggttaatgaaggtttagcagctcagattataagattaggaaatctgacaagtgcttctactggaccattaaatatgaaaaatttaacaactaatcgttttagtattgtcatgcatgatttattaaaaatgccgtttataggagaaagtatatcgaaagctaaagttgaattttcatttatcgatgtcacagcgcgccatattattaaattggcaagatccaatgcaatacctattatttatcatgtatacgcaccatgttcgataactatgaaacaagtaattgacaatgccaaagggtcagaaatgactgtagtaagtgatagtgagtttgaacagaaattacatgaattaggtatgcatgaattgattggtcttaatagtaatggagataatcaaatttcaggtgt

SEQ ID NO: 760 - protein, 2323 aa, Artificial Sequence
  Description of Artificial Sequence: synthetic amino acid sequence
VTYWVKLSRDIELRRLMYALLDVVQSQPVLRTQFVTDDFNQLKINLRDFFPFIEIKEVNEMSQSIDLEAFFTRNLNSYHFNQLPLFNFKIYQFLDGAYLLLDFHATIFNESQLTPFLQQLNIAYTHSLKSEYSISDFYNWIKEMNQKMDQNQVVCPSKHFNVLNADGDNYAYIPVKNTSEKKKMCSLHAELPSLDIDAWIVSIYLAHHFISQSSDVTLGIHFSIDNKNTENMMVLNTDIAPLNLSISQSDAVKDMVDECSALLEELQMCGASFVVQPKAVQIDVETMIHIEKVQEQFELNHICHHIHRLYNEASSFADLEFYPHVQGGFDIVYNDNVYDELTVNTLVKLINGIYMQITQNPSLLIKDIKLSDRSDLAKYNDINLQNNDINYSEVTYKTVVERFERQVHQHPDSIALQYEQRSMTYHQLNQCANLLAYRLRLNHQIEPNDMVALIAERSLEMIIGMLGILKAGAGYIPIDPDYPEERMNYIIEDAKPKAVVTYRTSFQSGLPQMDIELIVDSREHDIDNPRGINCSEDIAYVIYTSGTTGKPKGTLVPHRGIDRLVHNPNYVELNENTTVLLSGTVAFDAATFEIYGPLLNGGRLVITSKDTLLNPQLLDQAITENKVNTMWLTSSLFNQIASERIEALESLTYLLIGGEVLNAKWVHLLNSRECHPQIINGYGPTENTTFTTTFAIPQEMPSRIPIGLPISGTTVYVMQGNRICGVGVPGELCIGGAGLAKGYLNQPKLTAERFIQSPFNNEMLYRSGDLVRLQEDGYIDYISRIDKQVKIRGFRIELSEIEKALEAIRDINKAVVIVREQDQDKQIVAYYEASQLKSTGQLKDILSETLPEYMIPVHFMKVDRIPITMNGKLDVRALPEINLKNNRNYVEPRNDIERTVCRIFEEILHVDQVGVKDNFFELGGHSLRATLVVNRIEERLKKRLKVGDLMKSPTVEQLGQQIEELQNDVYEVIPKANESYQYDLSASQKSMYLLWKVNPKDTVYNIPFLWRLSSELNVMQLQRALSKLIERHEILRTQYVIDDNEVKQRIATHVSPDFEEVTTSLTNEQDIIQSFMEPFDLEQPSQMRVKYIHGPQQDYLFMDTHHSINDGMSNTILLSDLNALYQDKSLPELKLQYKDYSEWMVHRDLSKQRHFWLQQFENQVPILNMPTDYPRPSIKTTNGNMLTFHYNRQIKQQLKSYVEQHQVTDFMFFASAIMVLLHKYTRQDDIAIGSVISARTHRDTENMLGMFANTLVYRGRPHDQKTWDQLMAEMKEMCLGAYEHQEYPFESLVNDLVDERDASHNPLFDVMLVLQNNETNHANFGHSQLTHIPPQSTTAKFDLSFIIEEDQDDYVVNIEYNTDLYKQETIHHIAEQLQMIIKHVISTENLKIQDIDENDDLLIWLDKHVNDCSLDLPKNKSIQQLLHDVMKAKADDVALKMNGQSMTYQELDDYSNSMAQTLIQNGIQKGERVALLTERSFEMVASMIAVLKVGGSYVPIDVTYPDKRIEFIIEDAEVAAVLTYGKAISSHIPVIKIEDIDNTENNKRLNIEYAGNLEDDMYHIYTSGTTGKPKAVSVKQRNILNLVCAWTKRLNLSDDEVYLQYANYVFDASATDFYCSLLNGYPLVIATSVERTNTDLLEKLISQENITIASIPLQVYNVMHHFYIPKVITGGAPSTPAFVQHISKHCDMYVNAYGPSENTVITSCWIYEKGDAIPSTIPIGKPLANVDIFIMSGGKLCGVGIPGELCIAGESLTSGYLNRPELSAEKFINNPFGPGQLYRSGDLARLMPDGQIEFLGRIDKQVKVHGYRIELGEIENIINSVDTVTDSVVILAKQGEREVLHAYYVGSQEDESHISQHLNQYLPKYMIPKTLTAISEIPLTGNDKVDESRLPVPNVHKNKFVAPRNNIEREIAQIVSGVLDVSSMSIDDDFFEMGGTSLDAMVVVSKLKSNGIHITMQDVYQFKTVRYIANHTEKRQALPEVVLPDHLPQLQSLVERRYQLKSQHLTQSSLGHVLLTGATGFLGAYLIDEMQDDADQITCIVRGHDINQAKTNLENNLNCYFDTAHVDKLMKHIDIILADLSELDHLIIDSAIDTIIHAGARTDHFGDDETFFDVNVRSTQALIDLAKDKKAKLIYISTISVGTVFEVHQDDITFSEKDLYKGQLFTSPYTKSKFYSEIKVLEAVNEGLAAQIIRLGNLTSASTGPLNMKNLTTNRFSIVMHDLLKMPFIGESISKAKVEFSFIDVTARHIIKLARSNAIPIIYHVYAPCSITMKQVIDNAKGSEMTVVSDSEFEQKLHELGMHELIGLNSNGDNQISGV

SEQ ID NO: 761 - DNA, 417 bp, Artificial Sequence
  Description of Artificial Sequence: synthetic nucleic acid sequence
atgttcccaccccgaacacctagtagagatgccactaacccacctcaacaactcttacaattactaggaataccgtcaaatattacccatctcacatacaatttttctgagcatgcattaccttggataagttttatcgtacactatagtttttctatcgctattgcaataatctatatttatatcgcaaagaaatatacaaaaatcacactaggttatggtgctttatttggtatagttatttggattgtttttcatttaatcttaatgccaattatgcatgtcgtaccgaatgcttttgatcaaccattttcagaacacctatcagaattttttggacacattgtttggatgattacgtctacgtacaacacgcattttcattttttgtcgttgttttttcttattttcttgtga

SEQ ID NO: 762 - protein, 138 aa, Artificial Sequence
  Description of Artificial Sequence: synthetic amino acid sequence
MFPPRTPSRDATNPPQQLLQLLGIPSNITHLTYNFSEHALPWISFIVHYSFSIAIAIIYIYIAKKYTKITLGYGALFGIVIWIVFHLILMPIMHVVPNAFDQPFSEHLSEFFGHIVWMITSTYNTHFHFLSLFFLIFL

SEQ ID NO: 763 - DNA, 480 bp, Artificial Sequence
  Description of Artificial Sequence: synthetic nucleic acid sequence
atgagtatgttagtaacacttaaaggcttacccttagcttataataaagacatgcaagaagataaagaaggtttatttgatgctgtacacacacttaaaggctctcttcgaatcttcgaaggtatggttgcatctatgaaagttaattcaaaccgtttaagtcaaacagtaaaaaatgatttttcaaatgcaacagaattagcagactatttagtcagtaaaagtgtaccttttagaaccgctcatgaaatcgttggtaaaatcgtattaaattgtattcataaaggtatatacctattagacgtacctttaagcgaatatcaagaacatcatgagaatattgaggaagatatatatgattatttaacacctgaaaattgtctcaagcgtcgccaaagctatggttcaactggtcaagaatcagtaaaacatcaactaaaagtcgcaaaagcattattaaaagacaacgaatcaaaatag

SEQ ID NO: 764 - protein, 159 aa, Artificial Sequence
  Description of Artificial Sequence: synthetic amino acid sequence
MSMLVTLKGLPLAYNKDMQEDKEGLFDAVHTLKGSLRIFEGMVASMKVNSNRLSQTVKNDFSNATELADYLVSKSVPFRTAHEIVGKIVLNCIHKGIYLLDVPLSEYQEHHENIEEDIYDYLTPENCLKRRQSYGSTGQESVKHQLKVAKALLKDNESK

SEQ ID NO: 765 - DNA, 345 bp, Artificial Sequence
  Description of Artificial Sequence: synthetic nucleic acid sequence
gtgacaaaccggaggaaggtggggatgacgtcaaatcatcatgccccttatgatttgggctacacacgtgctacaatggacaatacaaagggcagcgaaactgcgaggtcaagcaaatcccataaagttgttctcagttcggattgtagtctgcaactcgactatatgaagctggaatcgctagtaatcgtagatcagcatgctacggtgaatacgttcccgggtcttgtacacaccgcccgtcacaccacgagagtttgtaacacccgaagccggtggagtaaccatttggagctagccgtcgaaggtgggacaaatgattggggtgaagtcgtaacaaggtag

SEQ ID NO: 766 - protein, 114 aa, Artificial Sequence; identical to SEQ ID NO: 256
  Description of Artificial Sequence: synthetic amino acid sequence

SEQ ID NO: 767 - DNA, 1437 bp, Artificial Sequence
  Description of Artificial Sequence: synthetic nucleic acid sequence
atgcaagattttccggtcgaaattcaattggtaagtcgattccgcacagctaaagaaataagggaaactaaagaagggctcaaatcaggatatgttgacattgtcgtaggtacacataaattattaggtaaagatattcaatataaagatttgggattgcttattgttgatgaagaacaacgttttggagtgcgacataaagaacgcattaaaactttgaaaaaaaacgttgatgtactgacgcttactgcaacaccaataccaagaacattgcatatgagtatgttaggtgtacgtgacttatcagtgattgaaacaccacctgaaaatcgttttcctgtacaaacttatgtcttagaacagaatacgaactttattaaagaggcattagagcgtgaattatctcgcgatggacaagtattttatttgtataacaaagtgcagtccatttatgaaaaaagagaacaacttcaaaggttaatgcctgacgctaacattgctgtagcacatggccaaatgactgaacgtgatttagaggaaacaatgttaagctttattaatcacgagtacgatattttagtaacgactacaattattgaaacaggtgtagatgtaccaaatgctaatactttaatcatagaagaggctgatcgttttggtttaagccagctataccaattaagaggacgtgtaggacgttcaagtagaattggttacgcttatttcttacatccagctaacaaagtgttaaatgagactgctgaagagcgattgcaagctattaaggagtttaccgaactaggttcaggttttaaaatcgctatgcgagatttaaatattcgtggtgcaggcaatttactcggtaagcaacaacatggctttattgattcggttggtttcgatttatactctcaaatgttagaagaagcagtaaacgaaaaacgtggcattaaagaagaatcgccggatgcaccagatattgaagtagaattgcacttagatgcttatttaccagctgaatatatacaaagtgaacaggctaaaattgagatttataaaaaacttcgaaaagtagaaactgaagaacaacttttcgatgtcaaagatgaattaatagatcgttttaatgattatccaattgaagtcgaacgattattagatattgttgaaatcaaagtccacgctctacatgcgggtgtcgaattgataaaagacaaaggcaaatctatacaaatcattttatcacctaaagcgactgaagatattaatggagaagaattgtttaaacagacgcaacctcttggtagagcaatgaaagttggcgtgcaaaataatgcaatgaatgtaacgctaacaaaatcaaaacaatggttagatagtttgaaattcttagttagatgtattgaagaaagtatggcgattaaagatgaagactaa

SEQ ID NO: 768 - protein, 478 aa, Artificial Sequence
  Description of Artificial Sequence: synthetic amino acid sequence
MQDFPVEIQLVSRFRTAKEIRETKEGLKSGYVDIVVGTHKLLGKDIQYKDLGLLIVDEEQRFGVRHKERIKTLKKNVDVLTLTATPIPRTLHMSMLGVRDLSVIETPPENRFPVQTYVLEQNTNFIKEALERELSRDGQVFYLYNKVQSIYEKREQLQRLMPDANIAVAHGQMTERDLEETMLSFINHEYDILVTTTIIETGVDVPNANTLIIEEADRFGLSQLYQLRGRVGRSSRIGYAYFLHPANKVLNETAEERLQAIKEFTELGSGFKIAMRDLNIRGAGNLLGKQQHGFIDSVGFDLYSQMLEEAVNEKRGIKEESPDAPDIEVELHLDAYLPAEYIQSEQAKIEIYKKLRKVETEEQLFDVKDELIDRFNDYPIEVERLLDIVEIKVHALHAGVELIKDKGKSIQIILSPKATEDINGEELFKQTQPLGRAMKVGVQNNAMNVTLTKSKQWLDSLKFLVRCIEESMAIKDED

SEQ ID NO: 769 - DNA, 1479 bp, Artificial Sequence
  Description of Artificial Sequence: synthetic nucleic acid sequence
gtgaagatactaagtgccatttatcgcattccgtatcaaaatgttttaggtgatgacggtttatatgcttatcaacaaatatatcctgtcgtagcactaggggttattttatctatgaatgctattccaagtgctgtgactcaagtgataggtgttaatcgatccgatgaagtctatacaagggttatgtttcgattacaatgcataggttttatcgtctttattttgctttttatgtttgcgaatatgattacccgatggatgggcgattctaatttagcacccatgttaaagatggccagttttagttttattttaataggtgtcttaggagtgttaagaggattttatcaatcaaaacaagtaatgaccataccagcaatttcccaggttatagaacaggtaattagagttagtttaatcattgttgcaattattatgttttcaatgaaacactggtctatttatcaagcaggagcattagctatattggcatcttcgattggttttttaggttcaatgttatatttattacttaaaaaaccacttaaacttaagttatgctatcgctttaataatacttccattcaatggaagcagttgtttatttccatatccatatttgcattgagtcaacttatcgttattttatggcaagttgtggatagttttacaataatacgtttattacaacatagcggtattgcttttaaagaagcaattattcaaaaaggcatttatgatcgtggtgcttcatttatacaaatgggtttgattgtaactacgacttttagtttcgttcttatcccattacttactcaagcaattcgtgaacataatcaaattcatatgaatcgttatgcaaatgcatcaattaaaatcacggtagtaataagtacagcagctagtataggattaattaatctgcttccacttatgaatgttgtattctttaaaagtaatcatttaactctaactttgagtgtttatatgtttacagtgatatgtgtttcgttaataatgatgaatatctcattattacaagttcaaaccagtattcgtcccattattatgggtgtgataataggaatactgtccaaaattattttaaatgttatattaatacctttttggggtatcgtgggtgcaagtgtgagtacagtcttatcactactactttttgtcataatattgcaagttgcagtcttaaagtactaccgttttaatcgtatatctttatttatcgttaaacttattttaggtatgataattatgagtatagttgttcaaactgtcatgcttgccttaccttcaaaaagtaggatgttaggattactagaacttatagttagctcaattataggcatagtgattataatgttgtatattattatatttaatgtattaggatacaaagaaataaagcacttaccttttggagacaaattatatcaaatgaagagaggaagacggtcatga

SEQ ID NO: 770 - protein, 492 aa, Artificial Sequence
  Description of Artificial Sequence: synthetic amino acid sequence
VKILSAIYRIPYQNVLGDDGLYAYQQIYPVVALGVILSMNAIPSAVTQVIGVNRSDEVYTRVMFRLQCIGFIVFILLFMFANMITRWMGDSNLAPMLKMASFSFILIGVLGVLRGFYQSKQVMTIPAISQVIEQVIRVSLIIVAIIMFSMKHWSIYQAGALAILASSIGFLGSMLYLLLKKPLKLKLCYRFNNTSIQWKQLFISISIFALSQLIVILWQVVDSFTIIRLLQHSGIAFKEAIIQKGIYDRGASFIQMGLIVTTTFSFVLIPLLTQAIREHNQIHMNRYANASIKITVVISTAASIGLINLLPLMNVVFFKSNHLTLTLSVYMFTVICVSLIMMNISLLQVQTSIRPIIMGVIIGILSKIILNVILIPFWGIVGASVSTVLSLLLFVIILQVAVLKYYRFNRISLFIVKLILGMIIMSIVVQTVMLALPSKSRMLGLLELIVSSIIGIVIIMLYIIIFNVLGYKEIKHLPFGDKLYQMKRGRRS

SEQ ID NO: 771 - DNA, 852 bp, Artificial Sequence
  Description of Artificial Sequence: synthetic nucleic acid sequence
gtgaaggtacttggaggaaaaagttttattgatgacatttttgaagcggttgatgtagaccccaatgatggttttacactgcttgatggtacgtcattaaaagaatcggccttaaatgttcgtacaaatacagtaattactcaagtttatagcgtaatgatagctgccgatttaaaacttactttaatggaaagatatcctgatgattttaatgtgaaaataattactggttctcatagtgatggagctcacgtaattgaatgcccactttatgaaattgatcgctacgacgattattttaataatcttacaagtttatttattccaaaaatcaatgaggatacattactttatcaagattttgattacgcagttcaaactattgatttactcgttgataatgaaaaagggtgtccgtgggataaagtacaaactcacgactcattaaaacggtatcttttagaagaaacgtttgaattatttgaagccattgataatgaagatgattggcatatgatagaggaattaggagatatacttttacaagtattattacattctagtataggtaaaaaagaaggatatattgatatcaaagaaattatagaaagtctcaacaccaagatgattcatagacatccacatatctttggtaatgcgcatgtaacttcgcaagaggatttaaaagacatttggtcacgtgctaaagaaaaagaaggtaaagtgcctcgtgttaaatttgagaaagtatttgcagaccacttcttgaaattgtatgataaaacaaaaaataggcaatttgacgaagatgatctcaaacaatttttacaacaaggagagaaaaattcatga

SEQ ID NO: 772 - protein, 283 aa, Artificial Sequence
  Description of Artificial Sequence: synthetic amino acid sequence
VKVLGGKSFIDDIFEAVDVDPNDGFTLLDGTSLKESALNVRTNTVITQVYSVMIAADLKLTLMERYPDDFNVKIITGSHSDGAHVIECPLYEIDRYDDYFNNLTSLFIPKINEDTLLYQDFDYAVQTIDLLVDNEKGCPWDKVQTHDSLKRYLLEETFELFEAIDNEDDWHMIEELGDILLQVLLHSSIGKKEGYIDIKEIIESLNTKMIHRHPHIFGNAHVTSQEDLKDIWSRAKEKEGKVPRVKFEKVFADHFLKLYDKTKNRQFDEDDLKQFLQQGEKNS

SEQ ID NO: 773 - DNA, 645 bp, Artificial Sequence
  Description of Artificial Sequence: synthetic nucleic acid sequence
atgtctaaaatgcaaactgcccaaacaatgattatcatgcaagtatctatctttatcatcgctgcattgttaatcattttcatgcaagcaaccattaaaaatcctactcaattagaacaaggacataaggaacctaaaagatatattttcgcctgggttctattaggattttgtattgtgatgatttaccaagtcatcatcagtataattttatttgccatcaatggcagtccgcaaagaagtccaaacactgaaaggttaatggctattgctaagcaaatgccgatatttatcgttttaatatccatagtaggtcccattttagaggaatacgtttttcgtaaagttatcttcggagaattgtataactttataaagggatcacgtgtggtaagctttatcattgcttctatagtaagttctctaatattcgctttagcacataatgacttcaaatttataccggtatattttggaatgggagtcattttctcacttgcttatgtttacacaaaacgaattgctgtacctataggcatacacatgcttatgaatggttcggttgtattaactcaagttgtgggtggagattctattaaaaaattgcaagaacaagcaacatttatattccatcttatattttaa

SEQ ID NO: 774 - protein, 214 aa, Artificial Sequence
  Description of Artificial Sequence: synthetic amino acid sequence
MSKMQTAQTMIIMQVSIFIIAALLIIFMQATIKNPTQLEQGHKEPKRYIFAWVLLGFCIVMIYQVIISIILFAINGSPQRSPNTERLMAIAKQMPIFIVLISIVGPILEEYVFRKVIFGELYNFIKGSRVVSFIIASIVSSLIFALAHNDFKFIPVYFGMGVIFSLAYVYTKRIAVPIGIHMLMNGSVVLTQVVGGDSIKKLQEQATFIFHLIF

SEQ ID NO: 775 - DNA, 795 bp, Artificial Sequence
  Description of Artificial Sequence: synthetic nucleic acid sequence
gtgaatatattgaaaatccaaatacttcaattcaatgtagaacgtggaaatgttgataaaaatatgcaaaatatcaaaactaagtttaatcaatacttagataaagataccagtgtcgtcgtgcttccagaaatgtggaataacggttatgcattagaagaattagaacaaaaagctgataaaaatcttaaagacagctctctctttataaaagacttagcacatacatttaatgtagatatcattgcaggttcagtgtcaaatataagagaaaaccatatatataatactgcttttgcaattaataaaaacaaagaattgattaatgaatatgacaaagtacatctcgtgccaatgttacgtgagccagactttttatgtggtggaaatgtagtccctgaacctttttatttatctgatcaaacacttttgacgcaaatcatttgttatgacttgcgatttccagagatattgcgctatccagctagaaaaggtgctaaaattgctttttatgtagcgcagtggcctagctcaagactagatcattggttatcattactaaaagcgagagcaatcgaaaatgatatttttattgtagcttgtaatagttgtggtgatgatggtcacaccaattatgctggaaattcaattgtcattaatcctaatggtgaaattttagaccatttagatgataaagaaggtgtactaacaacacatatcgatgtagacttagtagatcaacaaagagaatatattccagttttcagaaatctaaaaccacatctttataaatag

SEQ ID NO: 776 - protein, 264 aa, Artificial Sequence
  Description of Artificial Sequence: synthetic amino acid sequence
VNILKIQILQFNVERGNVDKNMQNIKTKFNQYLDKDTSVVVLPEMWNNGYALEELEQKADKNLKDSSLFIKDLAHTFNVDIIAGSVSNIRENHIYNTAFAINKNKELINEYDKVHLVPMLREPDFLCGGNVVPEPFYLSDQTLLTQIICYDLRFPEILRYPARKGAKIAFYVAQWPSSRLDHWLSLLKARAIENDIFIVACNSCGDDGHTNYAGNSIVINPNGEILDHLDDKEGVLTTHIDVDLVDQQREYIPVFRNLKPHLYK

SEQ ID NO: 777 - DNA, 591 bp, Artificial Sequence
  Description of Artificial Sequence: synthetic nucleic acid sequence
atgacacttgaggagagtagaaaacaagtgaaaatcatcgataaaaaaattgagcaatttgctcaatatttacaacgtaaaaataacttagatcacattgagtttctaaaagttcgtttagggatgcaagtagttgctggtaatattgaaaaaacagtggttctatatggactatcttatttttttgatttgctcatttttacatttttaactcatattagttactttctattaagaatatttgctcatggtgcacatgctaaaacaactcttcaatgtcatatacaaaatattctttattttttatttttaccttggctagtactacaccttcctcttagtacaaatatattttattttttagccatgattagttttttattagtaatatcttttgcaccggctgcaacaaagaaacaacctatacctaaacgtttacttaagaagaaaaaagtactctccatattaagttttattgtaatcataacaatcgctttaacactagaagaagtattcaaaaaaaatgttatctcgggtgttgtaatagagtctattacacttttaccaatattttttcctaaggaggattaa

SEQ ID NO: 778 - protein, 196 aa, Artificial Sequence
  Description of Artificial Sequence: synthetic amino acid sequence
MTLEESRKQVKIIDKKIEQFAQYLQRKNNLDHIEFLKVRLGMQVVAGNIEKTVVLYGLSYFFDLLIFTFLTHISYFLLRIFAHGAHAKTTLQCHIQNILYFLFLPWLVLHLPLSTNIFYFLAMISFLLVISFAPAATKKQPIPKRLLKKKKVLSILSFIVIITIALTLEEVFKKNVISGVVIESITLLPIFFPKED

SEQ ID NO: 779 - DNA, 1299 bp, Artificial Sequence
  Description of Artificial Sequence: synthetic nucleic acid sequence
gtgtattcaatgggtaaacttgactttttaccatttgcagctatacaagtgtttcttttggtttgggttacaaaaactattgctaatattaaatttgtaagaaaggattatattttcattactggaattataatcctttctgcaatattatataatgtttatgcaagccaagcacttgtacttgtagtaataatgattataattttcttctattcaaaagtaagatggtattctattgttatagtgttaatgagcactttgttgtcatatttaacaaattttattacagtagctatcagtttatatactgaaaatataatacataatatttatttttataatatctttcatttttcaatttttatcattttatctttaattttggcacatttatttaaacacttattaattaggtttaggtattcttatttatatttaagcaaaaggtattacattattatttcttttgtattagctattgcttttatatacttctatataatttcacaaactaatttacaagaaagtaatagcttgaacttttatgctattatttttgtttctattaccgtacttttgagtttggttatattattgttatcggctttcgcactacgtgaaatgaaatataaacgtaagctacaagaaatcgaagcatattatgagtacacgttacgtatagaaagcattaacaatgaaatgcgtaagttccggcatgattatgtgaatatcctcaccactctttcagattacattagagaagatgatatgcctggattacgtaaatattttaatgaaaatatcgttccaatgaaagataaattaaaaactcgctctattaaaatgaatggtattgaaaagttgaaagtgagagaaattaaagggctgattactactaaaattattcaagctcaagaaaaacgtattccaattagtattgaggttcctgatgaaattgatcgtatctctatgaatactgttgagcttagtcgtattatcggtattatagttgataatgctattgaagcttcagaaaatcttgaggaaccactcatcaatatcgcattcatcgataatgaggaatctgtcacttttatcgttatgaataaatgtagtgatgatatccctaaaattcatgagttgtttgaacaaggtttttctactaaaggtgataatcgcggtttaggtttatcaactttaaaagaactgacagactcaaacgagaatgttttattagatactgtcatcgaaaatggttactttgtacaaaaagtagaaataaataataaggaatcataa

SEQ ID NO: 780 - protein, 432 aa, Artificial Sequence
  Description of Artificial Sequence: synthetic amino acid sequence
VYSMGKLDFLPFAAIQVFLLVWVTKTIANIKFVRKDYIFITGIIILSAILYNVYASQALVLVVIMIIIFFYSKVRWYSIVIVLMSTLLSYLTNFITVAISLYTENIIHNIYFYNIFHFSIFIILSLILAHLFKHLLIRFRYSYLYLSKRYYIIISFVLAIAFIYFYIISQTNLQESNSLNFYAIIFVSITVLLSLVILLLSAFALREMKYKRKLQEIEAYYEYTLRIESINNEMRKFRHDYVNILTTLSDYIREDDMPGLRKYFNENIVPMKDKLKTRSIKMNGIEKLKVREIKGLITTKIIQAQEKRIPISIEVPDEIDRISMNTVELSRIIGIIVDNAIEASENLEEPLINIAFIDNEESVTFIVMNKCSDDIPKIHELFEQGFSTKGDNRGLGLSTLKELTDSNENVLLDTVIENGYFVQKVEINNKES

SEQ ID NO: 781 - DNA, 627 bp, Artificial Sequence
  Description of Artificial Sequence: synthetic nucleic acid sequence
atggagttagctttagcaacaaatgatccttatgaggtcttagagcaatcaaaagaacttaatgacattggttgttacttccttgatattcaattagaagctgatatgaacggtattaaattagccagtgaaattcgtaaacatgatcctgttggtaatattatatttgtaaccagtcacagtgagctgacttatttgacgtttgtttataaagtggctgctatggattttatttttaaagatgatccatctgaattaaaaatgagaatcatagattgtctcgaaacagcacatacacgactcaaattattatcaaaagaaagtaatgtagatacgattgagttaaagcggggaagtaattcagtatacgttcaatatgatgatattatgttttttgaatcatctacgaaatctcataggctcattgcacatcttgataatcgacaaattgaattttatggaaatttaaaggaattagcacagcttgatgaacgtttctttagatgtcataacagttttgtgataaacaggcataatattgaatctattgactcaaaagaacgtattgtttactttaagaatggcgaaaattgtttcgcttcagtacgtaatgttaaaaaaatataa

SEQ ID NO: 782 - protein, 208 aa, Artificial Sequence
  Description of Artificial Sequence: synthetic amino acid sequence
MELALATNDPYEVLEQSKELNDIGCYFLDIQLEADMNGIKLASEIRKHDPVGNIIFVTSHSELTYLTFVYKVAAMDFIFKDDPSELKMRIIDCLETAHTRLKLLSKESNVDTIELKRGSNSVYVQYDDIMFFESSTKSHRLIAHLDNRQIEFYGNLKELAQLDERFFRCHNSFVINRHNIESIDSKERIVYFKNGENCFASVRNVKKI

SEQ ID NO: 783 - DNA, 702 bp, Artificial Sequence
  Description of Artificial Sequence: synthetic nucleic acid sequence
atgataggagatttaaactttaataatctatttttcgaccatgaaagttttcaagaattggataatggttttgatttctacgcgccacaaacgtttgttgatgcagacgggcaacgcattttaattggatggatgggactaccagatacagagtatcctacagataaagaggggtgggcacattgccttactattcctcgagtacttaccattgaaaatggaaaacttaagcagcgaccttttaagcagttagaagatttaagaactaataaagaaacagctttgggatatgctaataaatttaaacgtaaattacatccatatgaaggtaagcagtatgagatgattatagatatattagaaaatgatgcttcagaaatatattttgaattgcgtagctctcgatctgaatctacactgattacttataataaacacgaaaataaactcactttagaacgtaccgatagtgggacactaccatcaaatgtcgatggaacaacgcgttctaccattttagattcaccattaaaacagttacaaatttttgtggatacatctagtatcgaaatattctgtaatgatggtgagcgtgttttaacctcacgtattttcccaaatgaggatgctacaggtataaaagcttcgactgaatctggtcaagtatatttaaaattcactaaatatgaattaaaagggtga

SEQ ID NO: 784 - protein, 233 aa, Artificial Sequence
  Description of Artificial Sequence: synthetic amino acid sequence
MIGDLNFNNLFFDHESFQELDNGFDFYAPQTFVDADGQRILIGWMGLPDTEYPTDKEGWAHCLTIPRVLTIENGKLKQRPFKQLEDLRTNKETALGYANKFKRKLHPYEGKQYEMIIDILENDASEIYFELRSSRSESTLITYNKHENKLTLERTDSGTLPSNVDGTTRSTILDSPLKQLQIFVDTSSIEIFCNDGERVLTSRIFPNEDATGIKASTESGQVYLKFTKYELKG

SEQ ID NO: 785 - DNA, 960 bp, Artificial Sequence
  Description of Artificial Sequence: synthetic nucleic acid sequence
atgagacgtctatttgctattggagaggcattaattgatttcataccaaatgtaacgcattcaaaattaaaagatgttgaacaatttagtcgacaagttggtggcgcaccgtgtaacgtagcggctacagtaagtaaattaggtggaaaatcagaaatgataacacaactaggaaatgacgcgtttggtgatatcattgtagaaacaattgaacaacttggcgtaggtacgcaatatattaagcgaactaataaagcaaatactgcattggcatttgtcagccttcaagatgatggtcaaagagatttctcattttatcgtaaaccttctgcagatatgttatatcaacctgaaaatattgatgatattcaagtattccaagacgatattttacatttttgttctgtagatttaatagagagtgacatgaaatatgcccatgagaaaatgattgaaaaattcgagtcagtagatggtactattgtttttgaccctaatgtacgcttacctttatgggaagataaactcgaatgtcaacgtacaataaatgcgttcatacctaaagcacatattgttaaaatatctgatgaagaattattatttattactggtaagaggaatgaagatgaagcgattcaatctttatttagaggtcaagttaatgtagtgatttatacacaaggagcgcaaggtgcaactatttataccaaagatgattatcgtattcatcatgaggggtatcaagtacaagcaattgatacaactggtgctggtgacgcatttataggtgctattatttattgcatactcgagtctcggcattctgaatgtaaagatttatttaaggaaaagggcaaggatatactagcgtttagtaatcgtgtcgcagcacttacaacaacgaaacatggtgctattgaaagtttgccaacaaaagaagatataaaagactataattga

SEQ ID NO: 786 - protein, 319 aa, Artificial Sequence
  Description of Artificial Sequence: synthetic amino acid sequence
MRRLFAIGEALIDFIPNVTHSKLKDVEQFSRQVGGAPCNVAATVSKLGGKSEMITQLGNDAFGDIIVETIEQLGVGTQYIKRTNKANTALAFVSLQDDGQRDFSFYRKPSADMLYQPENIDDIQVFQDDILHFCSVDLIESDMKYAHEKMIEKFESVDGTIVFDPNVRLPLWEDKLECQRTINAFIPKAHIVKISDEELLFITGKRNEDEAIQSLFRGQVNVVIYTQGAQGATIYTKDDYRIHHEGYQVQAIDTTGAGDAFIGAIIYCILESRHSECKDLFKEKGKDILAFSNRVAALTTTKHGAIESLPTKEDIKDYN

SEQ ID NO: 787 - DNA, 1461 bp, Artificial Sequence
  Description of Artificial Sequence: synthetic nucleic acid sequence
atgcttacgggctttgctttcatggtaactacatcattattcagtcaccaagcacatgctgaaggtaatcatcctattgacattaatttttctaaagatcagattgatagaaatacagctaagagcaatattatcaatcgagtgaatgacactagtcgcacaggaattagtatgaattcggataatgatttagatacagatatcgtttcaaatagtgactcagaaaatgacacatatttagatagtgattcagactcagatagtgacttagattcagatagtgattcagattcagacagtgactcagattcagatagtgactcagattcagatagtgactcagattcagacagtgattcagactcagatagtgactcagattcagacagtgattcagactcagatagtgattcagattcagatagtgattcagattcagacagtgactcagactcagacagtgattcagattcagatagtgattcagattcagatagtgattcagattcagatagtgattcagattcagacagtgactcagactcagacagtgattcagattcagacagtgactcagattcagatagtgactcagattcagatagtgattcagactctggtacaagttcaggtaagggttcacataccggaaaaaaacctggtaaccctaaaggaaatacaaatagaccttctcaaagacatacgaatcaaccccaaaggcctaaatacaatcaaacaaatcaaaacaatataaacaatataaaccatataaaccataatattaatcatacacgtactagtggagatagtgcgccttttaaacgtcaacaaaatattattaattctaacttaggtcatagaaatcaaaataatataaatcaatttatatggaacaaaaatggcttttttaaatctcaaaataataccgaacatagattgaatagtagtgataataccaattcattaattagcagattcagacaattagccacgggtgcttataagtacaatccgtttttgattaatcaagtaaaaaatttgaatcaattagatggaaaggtgacagatagtgacatttatagcttgtttaggaagcaatcatttagaggaaatgaatatttaaattcattacaaaaagggacaagctatttcagatttcaatattttaatccacttaattctagtaaatactatgaaaatttagatgatcaggttttagctttaattacaggagaaatcggctcaatgccagaacttaaaaaacctacggataaagaagataaaaatcatagcgtcttcaaaaaccatagtgcagatgagataacaacaaataatgatggacactccaaagattatgataagaaaaagaaaatacatcgaagtcttttatcgttaagtattgcaataattggaatttttctaggagtcactggactatatatctttagaagaaaagagtaa

SEQ ID NO: 788 - protein, 486 aa, Artificial Sequence
  Description of Artificial Sequence: synthetic amino acid sequence
MLTGFAFMVTTSLFSHQAHAEGNHPIDINFSKDQIDRNTAKSNIINRVNDTSRTGISMNSDNDLDTDIVSNSDSENDTYLDSDSDSDSDLDSDSDSDSDSDSDSDSDSDSDSDSDSDSDSDSDSDSDSDSDSDSDSDSDSDSDSDSDSDSDSDSDSDSDSDSDSDSDSDSDSDSDSDSDSDSDSDSDSDSDSDSDSDSDSDSDSDSGTSSGKGSHTGKKPGNPKGNTNRPSQRHTNQPQRPKYNQTNQNNINNINHINHNINHTRTSGDSAPFKRQQNIINSNLGHRNQNNINQFIWNKNGFFKSQNNTEHRLNSSDNTNSLISRFRQLATGAYKYNPFLINQVKNLNQLDGKVTDSDIYSLFRKQSFRGNEYLNSLQKGTSYFRFQYFNPLNSSKYYENLDDQVLALITGEIGSMPELKKPTDKEDKNHSVFKNHSADEITTNNDGHSKDYDKKKKIHRSLLSLSIAIIGIFLGVTGLYIFRRKE

SEQ ID NO: 789 - DNA, 1620 bp, Artificial Sequence
  Description of Artificial Sequence: synthetic nucleic acid sequence
atggcaaaagatcttaaattctctgaagatgcgcgtcaagcaatgttacgtggtgttgataaattagcaaacgctgtaaaggttacaattggacctaaagggcgaaatgtggttctagataaggattacacaacacctttaattaccaacgatggtgtaacaattgctaaggaaatagagttagaagatccatatgagaatatgggtgcaaaattagtgcaggaagttgcgaataaaacaaatgaaatcgctggggacggtacaactacagcaacagttttagcacaatcaatgattcaggaaggtcttaagaatgttacaagtggtgcaaatcctgtaggcttaagacaaggtattgacaaagcagtgcaagtggctatagaagcgcttcatgagatttctcaaaaggttgaaaataagaacgagatagcgcaagttggagctatttcagcagcagatgaagaaatcggtcgctacatttctgaagcaatggataaagtaggtaacgatggcgttatcactattgaagaatcaaatgggtttaatacagaattagaagtagttgaaggaatgcaatttgatcgcggttatcaatcaccatatatggtaactgactcagataaaatgatagctgaattagaacgtccatatatattagtaacggataagaaaatttcatcattccaagatattcttccattattagaacaagttgtgcaggctagtcgaccaattttaattgttgcggatgaagtagaaggcgatgcacttactaatattgttttaaaccgtatgcgtggaacatttactgctgtagcagttaaagccccaggatttggtgatcgacgtaaagcaatgttagaagacctagcaatattaactggtgctcaagtcattactgatgatttaggtttagaacttaaagatgcatctcttgatatgctaggtactgctaataaagttgaagtgactaaagatcatacaacagtcgtagatggtaatggtgatgaaaataatattgatgctcgtgtaggtcaaattaaagcacaaattgaagaaactgattcagagtttgataaagaaaaattacaggaacgtttggcaaaactagctggcggcgtagctgttatcaaagtaggggctgcaagtgaaacagagcttaaagaacgtaaattaagaattgaagacgcattaaattcaacacgtgcggcggtggaagaaggtatcgttgctggtggtggtactgcgttagtcaatatatatcaaaaagtaagtgaaattaaagcagaaggtgatgttgaaacgggtgttaatatcgtattaaaagcattacaagcacctgttagacaaattgctgaaaatgcaggattagagggttcaattattgttgaacgtttaaaacatgctgaagcgggcgttggtttcaatgcagcaacaaatgaatgggttaatatgttagaagaaggtatagtagatccaactaaagtaactcgttcagcgttacaacatgcagcaagtgtagctgctatgttcttaacaactgaagcagtcgttgctagtattccagagccagaaaataatgaacaacctggaatgggtggcatgccaggtatgatgtaa

SEQ ID NO: 790 - protein, 539 aa, Artificial Sequence
  Description of Artificial Sequence: synthetic amino acid sequence
MAKDLKFSEDARQAMLRGVDKLANAVKVTIGPKGRNVVLDKDYTTPLITNDGVTIAKEIELEDPYENMGAKLVQEVANKTNEIAGDGTTTATVLAQSMIQEGLKNVTSGANPVGLRQGIDKAVQVAIEALHEISQKVENKNEIAQVGAISAADEEIGRYISEAMDKVGNDGVITIEESNGFNTELEVVEGMQFDRGYQSPYMVTDSDKMIAELERPYILVTDKKISSFQDILPLLEQVVQASRPILIVADEVEGDALTNIVLNRMRGTFTAVAVKAPGFGDRRKAMLEDLAILTGAQVITDDLGLELKDASLDMLGTANKVEVTKDHTTVVDGNGDENNIDARVGQIKAQIEETDSEFDKEKLQERLAKLAGGVAVIKVGAASETELKERKLRIEDALNSTRAAVEEGIVAGGGTALVNIYQKVSEIKAEGDVETGVNIVLKALQAPVRQIAENAGLEGSIIVERLKHAEAGVGFNAATNEWVNMLEEGIVDPTKVTRSALQHAASVAAMFLTTEAVVASIPEPENNEQPGMGGMPGMM

SEQ ID NO: 791 - DNA, 960 bp, Artificial Sequence
  Description of Artificial Sequence: synthetic nucleic acid sequence
atgaaagacaacaaacctaataattcgaaattaattcaaacatatttaagtaagaaaactttaagatatggtacagcaagtgcattaacattggcactctatttatttaacagtaacgtaactgtgtatgcggatgaaaatactgcaaaccaaaatcaaggaacatcaccaaaaacttcacagacagcacctacaaataatactgaaaatacagatgccacagccataacaacagatcaaaataataatgatgaagaagaatacgatgcgtcatatgaacttccaattctttatgtaactgtctggctagatgatcaaggaaatattattaaagatgctgtggaagatgctaaaacccctgcttcagaaaggcaaccggtgaaaattcctgggtaccaacattatagaacttctgtgagtgacggaattactaagtttatttatcgtaaaattagcactgcacaatcacctatagttgaaaataatcaacaagataataatacaaataaagttgttgaaacaaccaatcaaaataaagatgaagtgaatggaaaagaacaaaatcaagcaaatacttcagtaacaaatacacaaattaccaaaaacgagaaagacgaagacacaaaaacactaaagaaagataaagacgagaaagaatctaaagacacaaaaacaccaaagaaagacaaagaaaagaaagacataaaaactccgaagaaagatagagaagagaaaaaaccagtaataccaaaaagcggcaaagacgagaaagacacaaaaataactaagaaagacaaagaagacgaaattacaacaacttccaagaaagataataacaatgatgtacaagataaattaccggaaacaggtaaaacaaacgatattcaaaatcctgctttaataatgttacttgctggtttaggtttattaggattatttagaaataaaataagagaatag

SEQ ID NO: 792 - protein, 319 aa, Artificial Sequence
  Description of Artificial Sequence: synthetic amino acid sequence
MKDNKPNNSKLIQTYLSKKTLRYGTASALTLALYLFNSNVTVYADENTANQNQGTSPKTSQTAPTNNTENTDATAITTDQNNNDEEEYDASYELPILYVTVWLDDQGNIIKDAVEDAKTPASERQPVKIPGYQHYRTSVSDGITKFIYRKISTAQSPIVENNQQDNNTNKVVETTNQNKDEVNGKEQNQANTSVTNTQITKNEKDEDTKTLKKDKDEKESKDTKTPKKDKEKKDIKTPKKDREEKKPVIPKSGKDEKDTKITKKDKEDEITTTSKKDNNNDVQDKLPETGKTNDIQNPALIMLLAGLGLLGLFRNKIRE

SEQ ID NO: 793 - DNA, 321 bp, Artificial Sequence
  Description of Artificial Sequence: synthetic nucleic acid sequence
atgatacctggtgtatcaaacataaatgatttttcgtctaatggaatatctatcatatctaaagttgttcctggaaagcgtgatgtagttactacatctttttctcccacactctgttcaattaatttattaattaatgtagattttccaacattcgttgtacctacaatgtatacgtcatctttatttcttacatggtttatagattgcaataattcatcaatcccccaacctttatttgcagaaataagaacgacatcttctgcttctaatccatatttacgagcagattttctcaaccattcttttacacgtcgatga

SEQ ID NO: 794 - protein, 106 aa, Artificial Sequence
  Description of Artificial Sequence: synthetic amino acid sequence
MIPGVSNINDFSSNGISIISKVVPGKRDVVTTSFSPTLCSINLLINVDFPTFVVPTMYTSSLFLTWFIDCNNSSIPQPLFAEIRTTSSASNPYLRADFLNHSFTRR

SEQ ID NO: 795 - DNA, 471 bp, Artificial Sequence
  Description of Artificial Sequence: synthetic nucleic acid sequence
atgagaattgcacctaatgtgattggtagaatccaaccattaatcgcaccagctattataagtaaactcaccggtttaccaataaataagaaaacaaaagttgaaattacaataaatgtaataacgataagattatttttattgagtaacgatttgtgtagtgtttttaaaaatgttgcgcttgtatatgcagaaccaattactgaggacattgctgctgcaaatattactacgccaaaaatatttttacctataggacctaatgcatgttggaaaactgatgctggtggattttctgaactaagcgtaacgccagttacaacaacacctagtacagctaaaaacaataaggtgcgcatgacaccagttgttaaaatacctgctacagcagatcgatttacgaaaggaaggtatgacttaccttttataccagaatctagaattctatgtgcacctgcaaaagtaatataa

SEQ ID NO: 796 - protein, 156 aa, Artificial Sequence
  Description of Artificial Sequence: synthetic amino acid sequence
MRIAPNVIGRIQPLIAPAIISKLTGLPINKKTKVEITINVITIRLFLLSNDLCSVFKNVALVYAEPITEDIAAANITTPKIFLPIGPNACWKTDAGGFSELSVTPVTTTPSTAKNNKVRMTPVVKIPATADRFTKGRYDLPFIPESRILCAPAKVI

SEQ ID NO: 797 - DNA, 600 bp, Artificial Sequence
  Description of Artificial Sequence: synthetic nucleic acid sequence
atgataccttcatatcgtgctattctaatttactttgataaatcggggataaacggaactgaattattagaaaatttagaactcgatgaaaattcgaacagtagaaaacaatcacattttaaacagcgtatcattcatatacctgtattatatggtggagattttggtccagatttatcagaagtagctaacgttaataaattaagtcaggaagaagttattcaaatacatacacaacaaccttatctaatctatatgcttgggtttatgccgggtttcccatacttaggtggattggatgctaagttgcacacacctagacggtctgaacctagaatcaaaattaacgctggttctgttggaatagcaaataatcaaacaggtttatatcctatggactcacctggtggttggcagataattggtcgcacaccaataaaagtctttgatttaaataggacaccaatgacgttatatgaagctggtgattacatacaattttatagtataaattatcaagagtttgaaaaaatatcaaacgatattaataaaggaaaatttgatatagataagtgggtgacatatcaagatgagtattaa

SEQ ID NO: 798 - protein, 199 aa, Artificial Sequence
  Description of Artificial Sequence: synthetic amino acid sequence
MIPSYRAILIYFDKSGINGTELLENLELDENSNSRKQSHFKQRIIHIPVLYGGDFGPDLSEVANVNKLSQEEVIQIHTQQPYLIYMLGFMPGFPYLGGLDAKLHTPRRSEPRIKINAGSVGIANNQTGLYPMDSPGGWQIIGRTPIKVFDLNRTPMTLYEAGDYIQFYSINYQEFEKISNDINKGKFDIDKWVTYQDEY

SEQ ID NO: 799 - DNA, 639 bp, Artificial Sequence
  Description of Artificial Sequence: synthetic nucleic acid sequence
gtggctcaaagctattctacacatgttagaagtggaatgggcggatttaaaggtcgtgcattaaagaaatacgatgttattgcaactcaagtaaatcataactataaaactaatttaggaaaaacaattgatttctcatctatacctgataataattacatacacgtcattgaaggacctcagatcaatgaatttgatgaagaaacgatagctaaattcgtaaatagcgatttcaaaatttctgatcaatcagatcgaatgggatacagattaaaaggtaatacagtaccacctaaaaatagtgctgatatcatttctgaacctgtcgctttgggaagtattcaagtacctaacgatggtaatcccattattcttttaaatgataagcaaacaattggtggttatacaaaaattgcaacggtaacacaattagatttaagaaaattagcacagatgaagcctggagacattatacagtttaaatggataactgttgaagaagcttcaaaaaagcttaaagaatttaatactaaatttgaacaattattaaagcgttttgatgagcaaccattgtttaacctaaatcaacttagacatacttctaataaaatcgcagaaataattaaggaggatagataa

SEQ ID NO: 800 - protein, 212 aa, Artificial Sequence
  Description of Artificial Sequence: synthetic amino acid sequence
VAQSYSTHVRSGMGGFKGRALKKYDVIATQVNHNYKTNLGKTIDFSSIPDNNYIHVIEGPQINEFDEETIAKFVNSDFKISDQSDRMGYRLKGNTVPPKNSADIISEPVALGSIQVPNDGNPIILLNDKQTIGGYTKIATVTQLDLRKLAQMKPGDIIQFKWITVEEASKKLKEFNTKFEQLLKRFDEQPLFNLNQLRHTSNKIAEIIKEDR

SEQ ID NO: 801 - DNA, 441 bp, Artificial Sequence
  Description of Artificial Sequence: synthetic nucleic acid sequence
atggatattaaaaaaattgaggaagtcattaaattggtaaaagctaatgatgtaaaaaaatttaagtataaggactctcataatgaaatagaacttgattttactaatggagcatctcaacaacattcgcaacaatcatctcaagatattcaacaagagaatattaaatccttagatgaaaagcaagagtccatatcaaatgaccagcaagagattaaatctcctatggttggaacatttttcttacaagatagtaaagaactaacagaacctaagattaaagttggcgatactgtaactgaaggagatattatcggttacattgaagctatgaaagttatgaatgaagtaactacggatgttactggtgaggtcactgaaatattagtagaacatggagacaatgttgaatatgatcagctactagtcagagttaaatag

SEQ ID NO: 802 - protein, 146 aa, Artificial Sequence
  Description of Artificial Sequence: synthetic amino acid sequence
MDIKKIEEVIKLVKANDVKKFKYKDSHNEIELDFTNGASQQHSQQSSQDIQQENIKSLDEKQESISNDQQEIKSPMVGTFFLQDSKELTEPKIKVGDTVTEGDIIGYIEAMKVMNEVTTDVTGEVTEILVEHGDNVEYDQLLVRVK

SEQ ID NO: 803 - DNA, 1362 bp, Artificial Sequence
  Description of Artificial Sequence: synthetic nucleic acid sequence
atgatgtatcgatgtttgattgcaaatagaggcgaaatagcagtaagaattataagagcttgtagagagcttaacatagagacagttgccatttatgcaaaaggtgatgaaaatagcttacatgtaagtttagccgatcaagcaatatgcataggtgaagcaaatccattagacagttatttaaatattgatcgtattatatctgctgcaaaagttacagaatcaaacgtaattcaccctggctatggtttcttatcggaatctacgaattttgcgaaagccgttgaagacaatcatatacattttattggacctagtaagacaactatggaaatgatgggggataaaattactgccagacaaactgttaaacaagcaggagtacctgttataccaggttctaatgatgctgttcaaagtgtagatgaaattaaattattatccaaagaaataggatttccagttgtactaaaagcagctagtggtggtggtgggaaaggcatcagaattgttaaagaagcatctcatttggatcaggctttgaaagaagctaaaagtgaaggacaaaaatattttaatgatgatcgagtgtatgtagaggcgttcataccagtagcaaaacatgtagaagtgcagattatcggagacggtaaaaataactatgttcacttaggtgaacgcgattgttctgttcaacgaaagaatcaaaaattaatagaagaagcgccttgtgctgcattaactgaagaaagaagaacaagaatatgtggcgacgcagttaaagtagctcaagcttcaagatatcgtagtgctggaacaatagaatttttagttacagaagatgcacattattttattgaaatgaatgctcgtattcaagttgaacatacagttacagaaatgcgtgctgatagagacctattacaagctcagttatatttattaacacacggtgaattaccattcactcagaaagatattttatttaatggtcatgtaattgaggcgcgtataaatgctgaaaatcctgaaaaaaactttttacccactccaggaaaagttaataaattacacttaccacaaggatttaatatacgtgtagattctttactttacacaggttatcaggtttctccttattatgattcacttgtagctaaagtgattgtaaaggattctaatagacaaactgctattaataaattaaaagttgcgttagatgaaatggtcatcgaaggttttactactacagctgactttttatatgcggttttaaattatccaatatatgcaaaaggcgatgccagtaaagtagatataaaatttcttgaaaaacatcaaatcattaaagaggtgaaatga

SEQ ID NO: 804 - protein, 453 aa, Artificial Sequence
  Description of Artificial Sequence: synthetic amino acid sequence
MMYRCLIANRGEIAVRIIRACRELNIETVAIYAKGDENSLHVSLADQAICIGEANPLDSYLNIDRIISAAKVTESNVIHPGYGFLSESTNFAKAVEDNHIHFIGPSKTTMEMMGDKITARQTVKQAGVPVIPGSNDAVQSVDEIKLLSKEIGFPVVLKAASGGGGKGIRIVKEASHLDQALKEAKSEGQKYFNDDRVYVEAFIPVAKHVEVQIIGDGKNNYVHLGERDCSVQRKNQKLIEEAPCAALTEERRTRICGDAVKVAQASRYRSAGTIEFLVTEDAHYFIEMNARIQVEHTVTEMRADRDLLQAQLYLLTHGELPFTQKDILFNGHVIEARINAENPEKNFLPTPGKVNKLHLPQGFNIRVDSLLYTGYQVSPYYDSLVAKVIVKDSNRQTAINKLKVALDEMVIEGFTTTADFLYAVLNYPIYAKGDASKVDIKFLEKHQIIKEVK

SEQ ID NO: 805 - DNA, 1245 bp, Artificial Sequence
  Description of Artificial Sequence: synthetic nucleic acid sequence
atgggggaaaatacaaaacaagatttcaatcaaaaaggacaaaattttaaattcacaaaaaaacatagacgattattatatggttcagtttttttaatggctacatcagctattggtccagcatttctgactcaaactgcagtgtttactgcacaattttatgctagttttgcatttgcaatattaatttctattattatagatataggcgctcaaataaatatttggagaatattagtggtaactggattacgtggacaagaaatatctaataaagtattacctggacttggtactattatctccatactaattgcatttggtggtctcgcatttaacataggtaatattgctggtgcaggtttaggtttaaatgcaatgtttggtcttgatgtaaaatggggtgctgcaataacagctatttttgcgatacttatctttgttagtagaagtggtcagaaaataatggatgttattagtatgattctaggtatcgtaatgattttagtagtcgcttatgtcatggttgtttcaaatcccccttatggagatgcattagtacatacatttgcacctgaacatcctttcaaacttatattacctataattacattagttggtggtacagtagggggttatattacttttgcaggtgcacatagaattctagattctggtataaaaggtaagtcataccttcctttcgtaaatcgatctgctgtagcaggtattttaacaactggtgtcatgcgcaccttattgtttttagctgtactaggtgttgttgtaactggcgttacgcttagttcagaaaatccaccagcatcagttttccaacatgcattaggtcctataggtaaaaatatttttggcgtagtaatatttgcagcagcaatgtcctcagtaattggttctgcatatacaagcgcaacatttttaaaaacactacacaaatcgttactcaataaaaataatcttatcgttattacatttattgtaatttcaacttttgttttcttatttattggtaaaccggtgagtttacttataatagctggtgcgattaatggttggattctaccaatcacattaggtgcaattctcattgcaagtaggaaaaaatctatcgttggtaattaccaacacccaacatggatgcttgtttttggtattatagccgtaattgtcacaataatgactggtatcttttcattacaagatttagcaagtctttggaaaggttaa

SEQ ID NO: 806 - protein, 414 aa, Artificial Sequence
  Description of Artificial Sequence: synthetic amino acid sequence
MGENTKQDFNQKGQNFKFTKKHRRLLYGSVFLMATSAIGPAFLTQTAVFTAQFYASFAFAILISIIIDIGAQINIWRILVVTGLRGQEISNKVLPGLGTIISILIAFGGLAFNIGNIAGAGLGLNAMFGLDVKWGAAITAIFAILIFVSRSGQKIMDVISMILGIVMILVVAYVMVVSNPPYGDALVHTFAPEHPFKLILPIITLVGGTVGGYITFAGAHRILDSGIKGKSYLPFVNRSAVAGILTTGVMRTLLFLAVLGVVVTGVTLSSENPPASVFQHALGPIGKNIFGVVIFAAAMSSVIGSAYTSATFLKTLHKSLLNKNNLIVITFIVISTFVFLFIGKPVSLLIIAGAINGWILPITLGAILIASRKKSIVGNYQHPTWMLVFGIIAVIVTIMTGIFSLQDLASLWKG

SEQ ID NO: 807 - DNA, 504 bp, Artificial Sequence
  Description of Artificial Sequence: synthetic nucleic acid sequence
atgccaaatgcatatgtgaaatcaatatttgaaattgatatagaaaaacttgccgatagtggtgttaaaggtatcataactgatttagataatacacttgttggttgggatgttaaagaacctactaagggtgttaaatcatggtttgctaaggctaaagatttaggaataactgtcacaattgtgtcaaataataataaaagtcgagtatcaagtttctcaagtaatttaggtgtagattatatattcaaagcacgtaaaccgatggggaaagcctttaagatggctattaaaaaaatgaaaattcaaccgagagaaaccgttgttgtaggagatcaaatgcttactgatgtgtttggtggcaattgtaatggtttatatacaattatggtagtacctgttaaacggactgatggattaattacaaagtttaatcgattaattgaaagacgattattaaatcattttagaaaaaaaggttatattaaatgggaggaaaattga

SEQ ID NO: 808 - protein, 167 aa, Artificial Sequence
  Description of Artificial Sequence: synthetic amino acid sequence
MPNAYVKSIFEIDIEKLADSGVKGIITDLDNTLVGWDVKEPTKGVKSWFAKAKDLGITVTIVSNNNKSRVSSFSSNLGVDYIFKARKPMGKAFKMAIKKMKIQPRETVVVGDQMLTDVFGGNCNGLYTIMVVPVKRTDGLITKFNRLIERRLLNHFRKKGYIKWEEN

SEQ ID NO: 809 - DNA, 495 bp, Artificial Sequence
  Description of Artificial Sequence: synthetic nucleic acid sequence
atgatagatattccattagacgaaaaatcatttatgtttgatacaccaggtatcattcaatcacatcaaatgacaaattatgtatatgaaaatgagttgaaaatcattatacctaaaaatgaaataaagcaacgtgtgtatcaacttaatgaaaaacagacattatttttcggaggattggcacgcattgattatgtatctggtggtaaaagaccacttgtttgtttcttttcaaatgatttaaatattcatagaactaaaaccgagaaagctaatgatttatggaaatcccaattaggcgcattgctttcaccgcctcaagatgcacaacaatttaatcttaatgatgtaaaagcagtaagactggaaactggtaaaactaaacgtgacatcatgatatctggtttaggattcataactattgatgctggtgcaaaagtgatagttcgtgttccaaaacatgtagatgttattttaagaaattcaattctttaa

SEQ ID NO: 810 - protein, 164 aa, Artificial Sequence
  Description of Artificial Sequence: synthetic amino acid sequence
MIDIPLDEKSFMFDTPGIIQSHQMTNYVYENELKIIIPKNEIKQRVYQLNEKQTLFFGGLARIDYVSGGKRPLVCFFSNDLNIHRTKTEKANDLWKSQLGALLSPPQDAQQFNLNDVKAVRLETGKTKRDIMISGLGFITIDAGAKVIVRVPKHVDVILRNSIL

SEQ ID NO: 811 - DNA, 304 bp, Artificial Sequence
  Description of Artificial Sequence: synthetic nucleic acid sequence
gtgataaaagtgaaatttgcagtaattggaaaccccatttctcattcattatcgccattgatgcatcatgctaattttcaatctttaaatttggaaaacacgtatgaagcgataaatgtaccagttaatcaatttcaagacattaaaaaaataatttcagaaaagagtattgatggattcaatgttactattccacataaagaacgtattattccgtacctagatgatattaatgaacaagcgaaatctgttggggcggtaaatacagttttagttaaagatggtaagtggattggttataata

SEQ ID NO: 812 - protein, 102 aa, Artificial Sequence
  Description of Artificial Sequence: synthetic amino acid sequence
  MOD_RES (102): variable amino acid
VIKVKFAVIGNPISHSLSPLMHHANFQSLNLENTYEAINVPVNQFQDIKKIISEKSIDGFNVTIPHKERIIPYLDDINEQAKSVGAVNTVLVKDGKWIGYNX

SEQ ID NO: 813 - DNA, 741 bp, Artificial Sequence; identical to SEQ ID NO: 541
  Description of Artificial Sequence: synthetic nucleic acid sequence

SEQ ID NO: 814 - protein, 246 aa, Artificial Sequence; identical to SEQ ID NO: 542
  Description of Artificial Sequence: synthetic amino acid sequence

SEQ ID NO: 815 - DNA, 576 bp, Artificial Sequence
  Description of Artificial Sequence: synthetic nucleic acid sequence
atgaatgtagcagatatcaaagcacgcttattagatttagaaaatacttttaaagaaaaagaaagtgaactgactgatttagacagagctatcggtgatggagatcatggtgtaaatatggtcagaggtttcgaacacttaaaagaaaaaatagatgatcaaagtatgcaagcgctatttaaatcaacaggtatgacattaatgtctaacgtaggtggtgcttctggaccattatacgggtttggttttatcaaaatggcgagtgcagtgaatgatgaaattgatcatgataatcttaaagaggtacttaaagcgtttgctgatggcattcaacaacgtggtaaagtcgaattaaatgaaaaaacgatgtatgatgttatcgaacgtgcgagagaagctgttgaaaaaaatgaaacagtagatctagataaactacaatcatttgctaatgaaaccaaagatatggtagctactaaaggccgtgcatcatattttaacgaagcttcaaaaggttatattgatcctggtgcacaaagtagtgtttatattcttaatgcaattataggaggagagtaa

SEQ ID NO: 816 - protein, 191 aa, Artificial Sequence
  Description of Artificial Sequence: synthetic amino acid sequence
MNVADIKARLLDLENTFKEKESELTDLDRAIGDGDHGVNMVRGFEHLKEKIDDQSMQALFKSTGMTLMSNVGGASGPLYGFGFIKMASAVNDEIDHDNLKEVLKAFADGIQQRGKVELNEKTMYDVIERAREAVEKNETVDLDKLQSFANETKDMVATKGRASYFNEASKGYIDPGAQSSVYILNAIIGGE

SEQ ID NO: 817 - DNA, 330 bp, Artificial Sequence
  Description of Artificial Sequence: synthetic nucleic acid sequence
atgacatctatagtagtagtaagtcatagtcataaaatcgcagaaggtgttaaacaattaatcaatcaaatgactgacggtggtgttgaccttattgccgttggtggcttaagtgacgatgaaatcggtacatcatttgatcaaatcgtctctgtaattaatggacttgaaaatgatgcgctttgtttctatgacatcggttcagcaggtatgaatttagacacagctttagaaatgtacgaaggtgaccacaaaattgttaaaatggaagcgccaatcgttgaaggaagctttattgcaagtgtaggaattaaatcaaatatgagtata

SEQ ID NO: 818 - protein, 110 aa, Artificial Sequence
  Description of Artificial Sequence: synthetic amino acid sequence
MTSIVVVSHSHKIAEGVKQLINQMTDGGVDLIAVGGLSDDEIGTSFDQIVSVINGLENDALCFYDIGSAGMNLDTALEMYEGDHKIVKMEAPIVEGSFIASVGIKSNMSI

SEQ ID NO: 819 - DNA, 369 bp, Artificial Sequence
  Description of Artificial Sequence: synthetic nucleic acid sequence
gtgaacgtgttggaaccaattaaagaacaagaagtgctagatttattaacttcttactcaaatcagcctgtttacctacacgttgaaacaacaaatggtgcttatgcaaatcatttcgatcaacgcgtatttaacgctggaacatttttaagaaatattgtcgtgacttttgaacatgcacaacttaaaggcggcgacaaagatccatatcgtgtaggtcttaaattaaaagatggtggctgggtttacgtgcaaggacttacgcactatgaagttaatgagaataacgaatttttaattgcaggttttaattatgaaggacaattggctgctacaatagaaataagtaaacagccatttactatataa

SEQ ID NO: 820 - protein, 122 aa, Artificial Sequence
  Description of Artificial Sequence: synthetic amino acid sequence
VNVLEPIKEQEVLDLLTSYSNQPVYLHVETTNGAYANHFDQRVFNAGTFLRNIVVTFEHAQLKGGDKDPYRVGLKLKDGGWVYVQGLTHYEVNENNEFLIAGFNYEGQLAATIEISKQPFTI

SEQ ID NO: 821 - DNA, 666 bp, Artificial Sequence
  Description of Artificial Sequence: synthetic nucleic acid sequence
atgactgatgaaagacacgtacttgtgattttcccccatcctgatgatgaaactttttcgtctgctggaactatcgcaagttatattgaaaaaggtattcccgtcacatatgcatgtcttaccctaggacaaatgggacgtaatctaggtaaccctccttttgcaacaagagaatctttaccatttatacgtgaacgtgagttagaagaagcatgcaaagcaattgggattacagatttaaggaaaatggggttaagagataaaactgttgaatttgaaccttacgatcaaatggatcaaatgattcaatcacttattgacgaaacaaatccatcattaattatttcgttctatcctaaatttgcagttcaccctgatcacgaggcaactgcagaagctgtagtacgtacagttggacgcatgcatgaatcagatcgaccccgtcttacacttgtagcgtttagcaatgatgcatcagaaattcttggagaacctgatattcaaaatgacatatctcaatatagtgatataaaacttaaagcttttgaagcacatgcttcacaaacaggaccatttttaaaacaacttgctagtcccgaaatagatggtcaagcacaaagtttcttaaaaatagagccattttggacatatcactttgaatcttaa

SEQ ID NO: 822 - protein, 221 aa, Artificial Sequence
  Description of Artificial Sequence: synthetic amino acid sequence
MTDERHVLVIFPHPDDETFSSAGTIASYIEKGIPVTYACLTLGQMGRNLGNPPFATRESLPFIRERELEEACKAIGITDLRKMGLRDKTVEFEPYDQMDQMIQSLIDETNPSLIISFYPKFAVHPDHEATAEAVVRTVGRMHESDRPRLTLVAFSNDASEILGEPDIQNDISQYSDIKLKAFEAHASQTGPFLKQLASPEIDGQAQSFLKIEPFWTYHFES

SEQ ID NO: 823 - DNA, 447 bp, Artificial Sequence
  Description of Artificial Sequence: synthetic nucleic acid sequence
atggatgcagcagattacgaagtgagccaagcagtaaaatatggtgcagatattgttacaattttaggtgttgctgaagatgcttcaattaaagcagcagttgaagaagcgcataaacatggaaaagcattgcttgttgatatgatagcagtgcaaaacttagaacaacgtgctaaagaactagatgagatgggtgcagactatatcgcagttcatacaggttacgacttacaagctgaaggaaaatctccattagacagcttgcgtacagttaaatctgttatcaaaaactctaaggttgcagtagcaggtggtattaaaccagatactatcaaagatattgttgctgaagatccagatttagttattgttggtggcggtattgcgaatgctgacgatcctgtagaagcagcaaaacaatgtagagcagctattgaaggtaaataa

SEQ ID NO: 824 - protein, 148 aa, Artificial Sequence
  Description of Artificial Sequence: synthetic amino acid sequence
MDAADYEVSQAVKYGADIVTILGVAEDASIKAAVEEAHKHGKALLVDMIAVQNLEQRAKELDEMGADYIAVHTGYDLQAEGKSPLDSLRTVKSVIKNSKVAVAGGIKPDTIKDIVAEDPDLVIVGGGIANADDPVEAAKQCRAAIEGK

SEQ ID NO: 825 - DNA, 549 bp, Artificial Sequence
  Description of Artificial Sequence: synthetic nucleic acid sequence
atgagtgaatttaataattatcgtcttattcttgaagagttagattctactttatctcaagtagataatacagagtatgaacgttttgctaatgatgttataggtgcagatcgcatatttacagctggtaaaggtcgttcaggttttgttgctaatagttttgcaatgcgcttaaatcaattaggtaaaaatgcctacgttgtaggtgagtcaacaacaccttcaattaaagaacatgatttgtttattattatttcaggttcaggttctacagaacatttaagattattagctgaaaaagcacaatctgagggtgcaaaaattgtcttattaactacaaatgcggaatcgccaatcggtaatcttgcagagacggttgttgaattgcctgcaggtactaaacatgatgttgagggttcgaaacaaccacttggtagtttatttgaacaggcttcacttatattcttagatagtgttgtattacctttaatggatgcatttcacattagtgaaaaaacaatgcaagagaatcatgctaatttagaataa

SEQ ID NO: 826 - protein, 182 aa, Artificial Sequence
  Description of Artificial Sequence: synthetic amino acid sequence
MSEFNNYRLILEELDSTLSQVDNTEYERFANDVIGADRIFTAGKGRSGFVANSFAMRLNQLGKNAYVVGESTTPSIKEHDLFIIISGSGSTEHLRLLAEKAQSEGAKIVLLTTNAESPIGNLAETVVELPAGTKHDVEGSKQPLGSLFEQASLIFLDSVVLPLMDAFHISEKTMQENHANLE

SEQ ID NO: 827 - DNA, 648 bp, Artificial Sequence
  Description of Artificial Sequence: synthetic nucleic acid sequence
atgaattttgatagttatatttttgattttgatggaacgctaattgatacaacaacatgtcacgtcaaagctacgcaaagcgcttttaaaagattaaatttagatgaacctacagaacaagctattttacatacatatcatttaaatttatataacaattttaaagcgctagcttcacatgaactgtctttttatcaaatagaaaaattaatagatgaatacaatcattgttttagcaacgatgaaatacatcaatcaaaagaatataccggaataagtgaagcattaaaatttttacataaccaaaagaaaaaaatatttgtagtgtctaataaagaaatactaacaactcaaaagtatttagattatctcggattaagccgttttataactgattcattaggtgtctgtattaaaaatgaagacaaacttctttgtgaaacgattcaaaatttgatacagaaacatcatttaatgataggtaaaaccgtgtatataggggacacagcacagaatatcaagagtgcgaatcaagctcatgtgcaaacatgcgctgtcacatggggagcacaatctgcacacgaattgttgcatgaaaatcctcattatattgttaatgatccagaagaatttttaacaattttataa

SEQ ID NO: 828 - protein, 215 aa, Artificial Sequence
  Description of Artificial Sequence: synthetic amino acid sequence
MNFDSYIFDFDGTLIDTTTCHVKATQSAFKRLNLDEPTEQAILHTYHLNLYNNFKALASHELSFYQIEKLIDEYNHCFSNDEIHQSKEYTGISEALKFLHNQKKKIFVVSNKEILTTQKYLDYLGLSRFITDSLGVCIKNEDKLLCETIQNLIQKHHLMIGKTVYIGDTAQNIKSANQAHVQTCAVTWGAQSAHELLHENPHYIVNDPEEFLTIL

SEQ ID NO: 829 - DNA, 672 bp, Artificial Sequence
  Description of Artificial Sequence: synthetic nucleic acid sequence
atgcctgatttaacgtccttttggatttcttttcgtgttgctttaatcagtacaatgatagttactatttttggcattttgatttctaaatggctatacaataaaaaaagatattgggtaaatctattagaaagttttatcattttaccaattgtgttaccacctactgtccttggttttatactattaattatattttcaacaagaagtcctgtaggagaattctttactaatatcttacacttaccagttgtatttacattgacaggtgcagtgattgcatctgtcattgttagttttccccttatgtatcaacatacagtgaatggttttcgaagtatagattcaaagatgttaaatactgcaagaacgatgggagcaagtgaaacaaaaatatttcttaaattggtgttaccattatctaaacgttctattcttgcaggtattatgatgagctttgcaagagcaataggtgaatttggtgctactttgatggttgctggctatatcccagacaaaacaaatacattgcctttagaaatttattttttagtggagcaagggaaagaaaatgaagcatggttatgggtgcttgtattagttgcgtttgcggtaactgtcatagcgaccataaatctggttaatcgtgatacgtttagggaggttgattaa

SEQ ID NO: 830 - protein, 223 aa, Artificial Sequence
  Description of Artificial Sequence: synthetic amino acid sequence
MPDLTSFWISFRVALISTMIVTIFGILISKWLYNKKRYWVNLLESFIILPIVLPPTVLGFILLIIFSTRSPVGEFFTNILHLPVVFTLTGAVIASVIVSFPLMYQHTVNGFRSIDSKMLNTARTMGASETKIFLKLVLPLSKRSILAGIMMSFARAIGEFGATLMVAGYIPDKTNTLPLEIYFLVEQGKENEAWLWVLVLVAFAVTVIATINLVNRDTFREVD

SEQ ID NO: 831 - DNA, 621 bp, Artificial Sequence
  Description of Artificial Sequence: synthetic nucleic acid sequence
atgctcacaattaaagtgaatggtgttcttaatcagacgaaaattaatataaatataaaggatcaacaccctaagatatatgcgatacagggaccatctggaattggaaagacaacaattttaaatataattgccggtttgaaagctataaattattcatatataaaggttggtaaacgtgtattaactgattcacgacaccatttgaatgttaaggttcaacaacgtcgtataggatatctatttcaagattatcaacttttccccaatatgaatgtttataacaacataacgtttatgactaaaccttctgaacatatcaatgaacttattcatactctaaaaatagagcatttacttgaaaagtatcctgtgaccttatcaggaggtgaagctcagcgcgtcgctttagcaagggcgctaagtacgaaacccgatttgattttgcttgatgagcctttttcaagtttagatgataaaacaaaaaacgaaggtatcaaattaattttaaaaatattcgaagcatggcaaattcctattatatttgtaacgcattcaaattatgaagcgcaacaaatggcgcatgagattataacaattgaagattgtatacaaatatag

SEQ ID NO: 832 - protein, 206 aa, Artificial Sequence
  Description of Artificial Sequence: synthetic amino acid sequence
MLTIKVNGVLNQTKININIKDQHPKIYAIQGPSGIGKTTILNIIAGLKAINYSYIKVGKRVLTDSRHHLNVKVQQRRIGYLFQDYQLFPNMNVYNNITFMTKPSEHINELIHTLKIEHLLEKYPVTLSGGEAQRVALARALSTKPDLILLDEPFSSLDDKTKNEGIKLILKIFEAWQIPIIFVTHSNYEAQQMAHEIITIEDCIQI

SEQ ID NO: 833 - DNA, 1002 bp, Artificial Sequence
  Description of Artificial Sequence: synthetic nucleic acid sequence
atgcaagaaagatactcgagacaagtgttgtttaaggaaattggtttaaaaggtcaaagtctacttgagaaaaaacatgtgcttatagtaggtatgggtgcgttaggaacacacttagctgagggattagtgagagcgggaataaataagttaaccattgttgatagagattacattgaatttagcaatttacaacgacaaacgctctttatagagcgtgatgcagaagatgtactaccaaaagtaatcgctgcacagaaagttttaaaagagatacgtaaagatgtagagatagatgcttatattgagcatgttaattacaatttcttagagcaacatggcatgcatgtcgatatcatattagatgcaactgataattttgatacacgtcagttaattaatgactttgcttataaacatcagattccttggatttatggtggtgttgtacaaagtacatatgttcaggcaacgtttattcctggtgaaacaccgtgttttaattgcttaatgcctcaattaccatctattaatttaacatgtgatacggttggagttattcaaccagctgtaacaatgacaaccagtttacaactcgttgatgcattgaagttgctgactggtaataaggttaataaacacttcacttacggggatatttggacaggagatcattatacatttggttttagtcgtatgcaaaatgaagattgtaaaacttgtggtaatgctccaacatatccacaccttaatcaacatcaacaagattatgcgaccttatgtggaagagacactgttcaatataaaaatgctgatatttctcaggaaatattactatcatttctcgagcgaaatcatattcaatatcgcacgaatttatatatgacaatgtttaggtttagagaacatcgaattgttgcattttctggaggtagatttttgatacatggaacgacagaacctaaaaaagcaattcaattaatgcatcaactatttggttaa

SEQ ID NO: 834 - protein, 333 aa, Artificial Sequence
  Description of Artificial Sequence: synthetic amino acid sequence
MQERYSRQVLFKEIGLKGQSLLEKKHVLIVGMGALGTHLAEGLVRAGINKLTIVDRDYIEFSNLQRQTLFIERDAEDVLPKVIAAQKVLKEIRKDVEIDAYIEHVNYNFLEQHGMHVDIILDATDNFDTRQLINDFAYKHQIPWIYGGVVQSTYVQATFIPGETPCFNCLMPQLPSINLTCDTVGVIQPAVTMTTSLQLVDALKLLTGNKVNKHFTYGDIWTGDHYTFGFSRMQNEDCKTCGNAPTYPHLNQHQQDYATLCGRDTVQYKNADISQEILLSFLERNHIQYRTNLYMTMFRFREHRIVAFSGGRFLIHGTTEPKKAIQLMHQLFG

SEQ ID NO: 835 - DNA, 1206 bp, Artificial Sequence
  Description of Artificial Sequence: synthetic nucleic acid sequence
atgaaacaacatgttgaagtgaagaatatcaatattaatttagatgaaagtttaggacatattcttgctgaagatattgttgcgacctatgatataccaagatttaataaatcaccctacgatgggtttgcaattagaagtgaagattcacaaggtgcaagtggcgaaaaccgtattgaatttgaagtaatagatcatatcggtgcaggttcagtttcagaaaaaacaattgataaaaaccaagcaattcgaataatgactggtgctcaaattccttctggagctgatgccgtagtaatgtttgaacaaactattgaatctgaaacaacttttacaattagaaaatcctttaaacatttagaaaatatttcgctacaaggtgaagaaataaaagctggtgatattgtactacataaaggtatgcgtattaactcaggtgtgatagcagtcttagctacatacggttatactaaagtgcgagtggctcgaaaaccaactgttgcagtaattgctacaggtagtgaattgcttgaagtagaagatgagcttgaaccaggaaagatacgaaattcaaacggaccaatgattaaagcattagctaaacaatttggaatacaagttggaatgtataaagttcagcatgataatctcgaaaagagtattgaggttgtaaaaaaagctttatcagagcatgatttagtaattactaccggaggtgtgtcggtaggagattttgattacttaccagaaatatacaagtccatccaagcacagatactatttaacaaagtggctcaaagaccaggtagtgttactacggttgcatttgcagatggtaaatatttatttggcttatctggaaacccttcagcctgctatacaggatttgaattatatgtcaaacctgctgtaaataagctcatgggagctaaagcttgttatccgcaaataatcaaagctacacttatggaagattttaataaagctaacccatttacacgattgattcgtgctaaggcaacattaacaaaagctggaatgacagtaataccatctggatttaataaatcaggtgcagttgtagccattgcgcacgctaatgctatgattatgcttcctggtggcacacgtggatttaaagcgggcaacattgttgatgtgattttgaccgaatctaatagttttgaagaggaattgatactatga

SEQ ID NO: 836 - protein, 401 aa, Artificial Sequence
  Description of Artificial Sequence: synthetic amino acid sequence
MKQHVEVKNININLDESLGHILAEDIVATYDIPRFNKSPYDGFAIRSEDSQGASGENRIEFEVIDHIGAGSVSEKTIDKNQAIRIMTGAQIPSGADAVVMFEQTIESETTFTIRKSFKHLENISLQGEEIKAGDIVLHKGMRINSGVIAVLATYGYTKVRVARKPTVAVIATGSELLEVEDELEPGKIRNSNGPMIKALAKQFGIQVGMYKVQHDNLEKSIEVVKKALSEHDLVITTGGVSVGDFDYLPEIYKSIQAQILFNKVAQRPGSVTTVAFADGKYLFGLSGNPSACYTGFELYVKPAVNKLMGAKACYPQIIKATLMEDFNKANPFTRLIRAKATLTKAGMTVIPSGFNKSGAVVAIAHANAMIMLPGGTRGFKAGNIVDVILTESNSFEEELIL

SEQ ID NO: 837 - DNA, 456 bp, Artificial Sequence
  Description of Artificial Sequence: synthetic nucleic acid sequence
atgaaaaattcagggaaaaccacattgatgaaccatgctatatcatttttaaaagaacgaggctattcagtagtaacaattaaacatcacgggcatattggtgaagaaattgaattacagtcatctgatgttgaccacatgaaacatttcgctgcgggcgcagaccaaagtattgttcaggggcatcatttacagcaaacagtgacacgtaaaaagaaacaatcgcttagagaaataatagaaaattctgttacaattgattgtagtatcattttagttgagggctttaaagaagcaaattatgataaaattatcgtttataaaaataatgatgaattaagaagtctacaaggactttctcacgtcatagggaaaatagaaaccaatcatccacgtgcaagtaatcaacttgagcacttactcaataaattaattaaggataagggaatgaattaa

SEQ ID NO: 838 - protein, 151 aa, Artificial Sequence
  Description of Artificial Sequence: synthetic amino acid sequence
MKNSGKTTLMNHAISFLKERGYSVVTIKHHGHIGEEIELQSSDVDHMKHFAAGADQSIVQGHHLQQTVTRKKKQSLREIIENSVTIDCSIILVEGFKEANYDKIIVYKNNDELRSLQGLSHVIGKIETNHPRASNQLEHLLNKLIKDKGMN

SEQ ID NO: 839 - DNA, 453 bp, Artificial Sequence
  Description of Artificial Sequence: synthetic nucleic acid sequence
atgaagcaatttgaaatcgtgactcaacctattgaaacagaacaatatagggattttacgattaacgaacgtcaaggtgccgtagtcgtatttactggtcacgtaagagagtggactaaaggtattcgtacacaacatttagagtatgaagcttatataccaatggctgagaaaaaattagctcaaattggtaaagaaattgaagaaaagtggcctggaacaataacaacaattgtacatcgaattggtccattacaaatatcagatattgcagttttaattgcagtatcttcaccgcatagaaaagcagcatatgcagcgaatgaatacgccatcgagcgcataaaggaaattgttccaatttggaaaaaggaaatttgggaagatggtgctgaatggcaaggtcatcaaaagggaacatataatgaagcaaaaaaggggaaagcaagatga

SEQ ID NO: 840 - protein, 150 aa, Artificial Sequence
  Description of Artificial Sequence: synthetic amino acid sequence
MKQFEIVTQPIETEQYRDFTINERQGAVVVFTGHVREWTKGIRTQHLEYEAYIPMAEKKLAQIGKEIEEKWPGTITTIVHRIGPLQISDIAVLIAVSSPHRKAAYAANEYAIERIKEIVPIWKKEIWEDGAEWQGHQKGTYNEAKKGKAR

SEQ ID NO: 841 - DNA, 486 bp, Artificial Sequence
  Description of Artificial Sequence: synthetic nucleic acid sequence
atgtttaatcgcattatcattagcactaattcccaattagcttctcagtttgaatatgaatatgtgattattgatgacgaacatcatcaaaataaagggccgctaacaggaatttactcagtgatgaaacaatacatggatgaagaattgtttttcattgtatctgttgatacaccaatgattacaagtaaagcagtgaatgggttatatcatttcatggtatcaaacttaattgaatcacgtttagatattgtcgcatttaaagaaggagaaatatgtataccgacgattggtttttatacactttcgacgtttccttttattgaaaaagctttaaattcaaatcatttaagtctgaagcatgtctttaaacaattatcgacagattggttagatgttactgaaattgactcgccttattattggtataagaatattaattttcagcatgatttggactctttaaaaatgcagataaatgaataa

SEQ ID NO: 842 - protein, 161 aa, Artificial Sequence
  Description of Artificial Sequence: synthetic amino acid sequence
MFNRIIISTNSQLASQFEYEYVIIDDEHHQNKGPLTGIYSVMKQYMDEELFFIVSVDTPMITSKAVNGLYHFMVSNLIESRLDIVAFKEGEICIPTIGFYTLSTFPFIEKALNSNHLSLKHVFKQLSTDWLDVTEIDSPYYWYKNINFQHDLDSLKMQINE

SEQ ID NO: 843 - DNA, 495 bp, Artificial Sequence
  Description of Artificial Sequence: synthetic nucleic acid sequence
atgaaagaggtaatacaagataaattaggccgtccaatacgggatttaagaatatcggtcactgatcgatgtaatttcagatgtgattattgtatgccaaaggaaatctttggagatgattacactttcttacctaagaatgaattgcttacttttgaagaattaacacgaatttcaaagatttatgctcaattaggagttaaaaagataagaattacaggaggagagcctctcttacgacgcaatctttataaacttgtagagcaattaaatctcatagatggtatagaggatattggattgactactaatggcttgttattaaaaaaacatggaaaaaatttatatcaagctggtttacgacgtattaatgtaagtttagatgcgattgaggataacgtttttcaagaaattaacaatagaaatattaaagcgtctacaatcttagaacaaattgattatgcagtatcaataggttttgaagttaaagtaaac

SEQ ID NO: 844 - protein, 165 aa, Artificial Sequence
  Description of Artificial Sequence: synthetic amino acid sequence
MKEVIQDKLGRPIRDLRISVTDRCNFRCDYCMPKEIFGDDYTFLPKNELLTFEELTRISKIYAQLGVKKIRITGGEPLLRRNLYKLVEQLNLIDGIEDIGLTTNGLLLKKHGKNLYQAGLRRINVSLDAIEDNVFQEINNRNIKASTILEQIDYAVSIGFEVKVN

SEQ ID NO: 845 - DNA, 306 bp, Artificial Sequence
  Description of Artificial Sequence: synthetic nucleic acid sequence
atgttcccttttgatgaccttgccattcagcaccatcttcccaaatttcctttttccaaattggaacaatttcctttatgcgctcgatggcgtattcattcgctgcatatgctgcttttctatgcggtgaagatactgcaattaaaactgcaatatctgatatttgtaatggaccaattcgatgtacaattgttgttattgttccaggccacttttcttcaatttctttaccaatttgagctaattttttctcagccattggtatataagcttcatactctaaatgttgtgtacgaatacctttag

SEQ ID NO: 846 - protein, 101 aa, Artificial Sequence
  Description of Artificial Sequence: synthetic amino acid sequence
MFPFDDLAIQHHLPKFPFSKLEQFPLCARWRIHSLHMLLFYAVKILQLKLQYLIFVMDQFDVQLLLLFQATFLQFLYQFELIFSQPLVYKLHTLNVVYEYL

SEQ ID NO: 847 - DNA, 303 bp, Artificial Sequence
  Description of Artificial Sequence: synthetic nucleic acid sequence
atgtttgcatgttctattcctattttacctcttttacttttggccttttctctatctacatatgcgtgtttaacaccagaaacatgttcccgtatagtatttctaattttatcacctgggaaatctggatctgtcagtacaatcacacctctagtttgctgcgcgtgttgtatcacttctaaagtatatgtatcaattgcactaccgtttgtttcaatagtatcacaatctacagcactttttactcgttcagtatcatctttaccttcaacaacaataaattcgtttattttcataaattaa

SEQ ID NO: 848 - protein, 100 aa, Artificial Sequence
  Description of Artificial Sequence: synthetic amino acid sequence
MFACSIPILPLLLLAFSLSTYACLTPETCSRIVFLILSPGKSGSVSTITPLVCCACCITSKVYVSIALPFVSIVSQSTALFTRSVSSLPSTTINSFIFIN

SEQ ID NO: 849 - DNA, 444 bp, Artificial Sequence
  Description of Artificial Sequence: synthetic nucleic acid sequence
atgtcaatagcaagaccggtagcagaaatgctaagtacctatacaactcaaatagaagcagcatcgtcgttaaatgaggaatttgatttagttactttaagaaaatcaatcatcagatggtgtcaattaatattatctaataaagctatggctcttataggtgtcattgagttattaaaacaagctaagaatcgtaaattacaattacttactttatcagccgtcaatggctttttcgaagatataatgcatgcaaagatagaaatggataattattatacatttagtgatttaactgaagaaattgaaaattatgcaaatcaattaacttttaatcaattaatcctcatgtatgatcagattactgaagcgcataaaaagttaaatcaaaatgttaatccaacacttgtttttgaacaaatagtaataaaaggtgtgatttaa

SEQ ID NO: 850 - protein, 147 aa, Artificial Sequence
  Description of Artificial Sequence: synthetic amino acid sequence
MSIARPVAEMLSTYTTQIEAASSLNEEFDLVTLRKSIIRWCQLILSNKAMALIGVIELLKQAKNRKLQLLTLSAVNGFFEDIMHAKIEMDNYYTFSDLTEEIENYANQLTFNQLILMYDQITEAHKKLNQNVNPTLVFEQIVIKGVI

SEQ ID NO: 851 - DNA, 804 bp, Artificial Sequence
  Description of Artificial Sequence: synthetic nucleic acid sequence
atgcccaatgttgtaggtgttcagtttcaaaaagcagggaaattagaatactacgcgccgaatcaattagatgtagaggttggtgactgggttgttgtccaatctaaaagaggtatagaaattggccacgtaaagtttccattacgtgaagttgatgtagaagatgtcacattaccgctaaaaaatatcattcgtaaaatgaatgaagatgatcaagaaacatattatcgtaatgaacgcgatgccaatgatgcgttagaattatgtaaaaaagtagttaaagatcagcaattagatatgcgattagttaattgtgaatatacattagataaatctaaagtgatttttaattttaccgcagatgatcgcattgattttcgcaaacttgttaaagttttagctcaaaatctaaagactagaatagaattacgtcaaattggggtaagagatgaagcgaaattattgggtggtatcggtccttgtggacgttctttatgttgttctacatttttaggagatttcgaacctgtatccattaaaatggcgaaagatcagaacctatcattaaatccaactaagatttcaggagcttgtggtagattgatgtgttgtcttaaatatgaaaatgactactatgaagaggctcgaactcaattacctgatgttggagatatgattcaaacaccagatggtcacggaaaagtgataggattaaatattttagatatttctatgcaagttaaaatagagggtctagaacaacctttagaatataaaatggaagagatagaagtattgaattaa

SEQ ID NO: 852 - protein, 267 aa, Artificial Sequence
  Description of Artificial Sequence: synthetic amino acid sequence
MPNVVGVQFQKAGKLEYYAPNQLDVEVGDWVVVQSKRGIEIGHVKFPLREVDVEDVTLPLKNIIRKMNEDDQETYYRNERDANDALELCKKVVKDQQLDMRLVNCEYTLDKSKVIFNFTADDRIDFRKLVKVLAQNLKTRIELRQIGVRDEAKLLGGIGPCGRSLCCSTFLGDFEPVSIKMAKDQNLSLNPTKISGACGRLMCCLKYENDYYEEARTQLPDVGDMIQTPDGHGKVIGLNILDISMQVKIEGLEQPLEYKMEEIEVLN

SEQ ID NO: 853 - DNA, 318 bp, Artificial Sequence
  Description of Artificial Sequence: synthetic nucleic acid sequence
atgaaattagaacatcacgttgaacaacttacaaccgacatgtcagaacttaaagatttaacagtcgaacttgttgaggagaatgttgctttgcaagttgaaaatgaaaatttaaaacgattgatgaacaaaactgaagaatcggttgaaactcacttagataaagataattataagcatgtaaaaacaccatctccaagtaaagataatttagcaatgttatatcgtgaaggttttcatatttgtaagggtgaattattcgggaaacatcgtcatggtgaagattgcttattatgccttaatgtgttgagtgattaa

SEQ ID NO: 854 - protein, 105 aa, Artificial Sequence
  Description of Artificial Sequence: synthetic amino acid sequence
MKLEHHVEQLTTDMSELKDLTVELVEENVALQVENENLKRLMNKTEESVETHLDKDNYKHVKTPSPSKDNLAMLYREGFHICKGELFGKHRHGEDCLLCLNVLSD

SEQ ID NO: 855 - DNA, 726 bp, Artificial Sequence
  Description of Artificial Sequence: synthetic nucleic acid sequence
atgttagaagataatgaacgcgttgaccatttaataaaagaaggatatgagattatacaaaatgatgaagtattctctttttctactgatgccctattgttagggtatttaaccgaagttcgcaaaaatgataaagttatggatttatgctccggcaatggtgttattccattattattagctgctaaatcaactcaacctattgaaggaatagaaatacaagagcaactagtgagtatggcacgtcgcagttttaaattgaatgatttgaacgatagactaactatgcaccatatggatttaaaagatgtatatcaaacatttcaacctgctcaatatacattagtgacttgtaatcctccttattttaaaatgaatcaaaatcatcaacatcaaaaagaagcacataaaatagcacgtcacgaaataatgtgtaatcttaaagattgtattgaagctgcaagacatttacttaaagagggtggtcgttttattatggttcatcgagcggaaaggctaatggatgtcttaaccgaattaagacatggtaaaattgagcctaaagcactgacgttagtgtatagtaaacatgataagcctgcacaaacaattgttgtggaaggaagaaaaggtggtaaccaaggtttagatatacgtaatccattatacatatataatgaggatggatcatatagcgatgagatgaaaggtgtttattatggataa

SEQ ID NO: 856 - protein, 241 aa, Artificial Sequence
  Description of Artificial Sequence: synthetic amino acid sequence
MLEDNERVDHLIKEGYEIIQNDEVFSFSTDALLLGYLTEVRKNDKVMDLCSGNGVIPLLLAAKSTQPIEGIEIQEQLVSMARRSFKLNDLNDRLTMHHMDLKDVYQTFQPAQYTLVTCNPPYFKMNQNHQHQKEAHKIARHEIMCNLKDCIEAARHLLKEGGRFIMVHRAERLMDVLTELRHGKIEPKALTLVYSKHDKPAQTIVVEGRKGGNQGLDIRNPLYIYNEDGSYSDEMKGVYYG

SEQ ID NO: 857 - DNA, 840 bp, Artificial Sequence
  Description of Artificial Sequence: synthetic nucleic acid sequence
atgacaactttatatttagtaggaacaccaattggaaatcttggtgatattacatttcgagctatagaaacattaaaaaaagttgatgtgattgcatgtgaagatacacgtgtaacacggaaattgtgtaatcattatgaaatacaaacacctctaaagtcgtatcatgaacataataaagaacaacaaactgactatttaatcaagcagttacaaactggcttaaatatagcgttagtatcagatgctgggttgccattaattagtgatccaggatatgaattggttgtcgaagcacgtaaaaataatataaatatagaaacagtaccaggtcctaatgctgggttgactgcacttatgtcaagtggattaccatctttcacatacacatttttaggttttttgccaagaaaagaaaaagaaaaaattgaagtgcttgaggatagaatgtttcaaaatagtactttaatactttatgaatcgccttatagggttactgatactttgaaagcaatagctaaaatagattcacaaagatggattactgttggtagagagctaacgaagaaatttgaacaagttcttacacttacagttgatgatatgttgaaattgattaatcatgacaaattacctcttaaaggtgagtttgtgatactgattgaaggtgcattacctaagagtggtgaatcatggtttgaaagctatacggttaaagaacatgttgattattatattgaaaccaaacatgttaaacctaaaaaagcaattaaatttgtcgctacagatcgacatatgaagacgggtgacatatataatatttatcataatattgattaa

SEQ ID NO: 858 - protein, 279 aa, Artificial Sequence
  Description of Artificial Sequence: synthetic amino acid sequence
MTTLYLVGTPIGNLGDITFRAIETLKKVDVIACEDTRVTRKLCNHYEIQTPLKSYHEHNKEQQTDYLIKQLQTGLNIALVSDAGLPLISDPGYELVVEARKNNINIETVPGPNAGLTALMSSGLPSFTYTFLGFLPRKEKEKIEVLEDRMFQNSTLILYESPYRVTDTLKAIAKIDSQRWITVGRELTKKFEQVLTLTVDDMLKLINHDKLPLKGEFVILIEGALPKSGESWFESYTVKEHVDYYIETKHVKPKKAIKFVATDRHMKTGDIYNIYHNID

SEQ ID NO: 859 - DNA, 1857 bp, Artificial Sequence
  Description of Artificial Sequence: synthetic nucleic acid sequence
atgcaaggctatgatgttcgttatttaactggcactgatgagcacggtcaaaaaatccaagaaaaagctcaaaaagctggcaaaacagaactagaatacttagatgaaatgatttcaggtattaaaaacttatggagtaaacttgagatttctaatgatgattttattcgaactacagaagagcgtcataagcaagtcgttgagaaagtgtttgagcgattattaaaacaaggtgacatttatttaggtgaatacgaaggttggtattctgttcctgatgaaacatattatacagagtcacaacttgttgaccctgtttatgaaaacggcaaaattgtaggtggtaaaagtcctgattctggtcacgaagtcgaacttgtaaaagaagaaagctatttcttcaacattaataaatatacagaccgcttattagaattttacgatgaaaatccagactttatacaaccaccatctagaaaaaatgaaatgattaataactttatcaaaccaggtttagaagatttagcagtatcacgtacatcattcgattggggtgtacgtgtaccatctaatcctaaacatgttgtatacgtgtggattgatgcacttgttaattatatttcttcattaggttatctatctgatgatgaaacattatttaataaatattggccagcagacatacacttgatggctaaagaaattgtacgtttccactctattatatggccaatattgttaatggcgttggatttaccacttcctaaaaaagtttttgcacacggttggattttaatgaaagatggtaaaatgagtaaatctaaaggtaatgtcgtagatcctaatgtattaattgatcgttatggtcttgatgcgacacgttattacttaatgcgtgaattaccgtttggttctgatggcgtatttacaccggaagcctttgttgaaagaacaaattacgatcttgcgaatgatttaggtaatctagtgaatcgtactatctctatgataaacaaatatttccacggcgaattacctgcataccaaggtccaaaacatgaattggatgaaaaaatggaagcgatggcgcttgaaactgttaaatcattcaatgataatatggaaagtttacaattttctgttgctttatcaacagtatggaaatttattagtcgtacaaacaaatatattgatgaaactcaaccttgggttcttgcaaaagatgaaaatcaacgtgagatgcttggtaatgtaatggcacatcttgtcgagaacattcgtttcgctacaatcttattacaaccattcttgacgcatgcacctagagagatatttaagcaacttaatattaacaatccggatttacatcaattagatagtctgcaacaatatggtatgttgtcagaggcaattactgtaactgaaaagccaacaccaattttcccaagattagacactgaagcagaaattgcttatatcaaagaatcaatgcaaccacctaaatcaataaaacagtctgatgaacccggtaaagagcaaattgatatcaaagattttgataaagttgaaatcaaagcagcaaccattattgatgcggaaaatgtaaaaaaatcggagaaactattaaaaataaaagttgaattagataatgaacaacgtcaaatagtatctggtatagctaagttttatcgtccggaagacattattggtaaaaaagttgcagttgttactaatttaaaaccagctaaattgatgggacaaaaatccgaaggtatgattttgtcagctgaaaaagatggcgtacttaccttgataagcttgcctagcgcaattccaaatggtgcagtaattaaatag

SEQ ID NO: 860 - protein, 618 aa, Artificial Sequence
  Description of Artificial Sequence: synthetic amino acid sequence
MQGYDVRYLTGTDEHGQKIQEKAQKAGKTELEYLDEMISGIKNLWSKLEISNDDFIRTTEERHKQVVEKVFERLLKQGDIYLGEYEGWYSVPDETYYTESQLVDPVYENGKIVGGKSPDSGHEVELVKEESYFFNINKYTDRLLEFYDENPDFIQPPSRKNEMINNFIKPGLEDLAVSRTSFDWGVRVPSNPKHVVYVWIDALVNYISSLGYLSDDETLFNKYWPADIHLMAKEIVRFHSIIWPILLMALDLPLPKKVFAHGWILMKDGKMSKSKGNVVDPNVLIDRYGLDATRYYLMRELPFGSDGVFTPEAFVERTNYDLANDLGNLVNRTISMINKYFHGELPAYQGPKHELDEKMEAMALETVKSFNDNMESLQFSVALSTVWKFISRTNKYIDETQPWVLAKDENQREMLGNVMAHLVENIRFATILLQPFLTHAPREIFKQLNINNPDLHQLDSLQQYGMLSEAITVTEKPTPIFPRLDTEAEIAYIKESMQPPKSIKQSDEPGKEQIDIKDFDKVEIKAATIIDAENVKKSEKLLKIKVELDNEQRQIVSGIAKFYRPEDIIGKKVAVVTNLKPAKLMGQKSEGMILSAEKDGVLTLISLPSAIPNGAVIK

SEQ ID NO: 861 - DNA, 774 bp, Artificial Sequence
  Description of Artificial Sequence: synthetic nucleic acid sequence
atgatgttaatcgatacgcatgtacatttaaatgatgaacaatatgatgaggatttaaatgaagtgatatctcgtgcgagagaagcaggcgtagatagaatgtttgtagtaggttttgatacacctactattgaacgtactatggagctaatagataagtatgactttatctatggtattatcggttggcatcctgttgatgcaatagattgtactgatgaaagattggaatggatagaaagtctttctaaacatcctaaaattattggtattggtgagatggggttagattatcattgggataaatcaccttctgatgtacaaaaagaggtatttaaaaagcaaattgcattagctaaacgtgttcaattacctattattattcataatcgtgaagcgactcaagattgcatagatattttgattgaagaacatgcagaagaagtgggcggaataatgcatagttttagtgcttcacctgaaattgctgatgtcgtgattaataaattgaacttctatgtttcgcttggaggacccgtcactttcaaaaatgcaaaacaaccaaaagaagttgctaaacacgtaccaatggatcgtttgttatgcgagacagatgccccgtatctatccccgcacccttatagaggtaaacgtaatgaaccagaacgtgttactttagtagcacaacaaattgcagatttgcgtggtatgacttatgaagaggtctgtcgccaaacaaccgaaaatgctgaacgtttattcaatttgaattaa

SEQ ID NO: 862 - protein, 257 aa, Artificial Sequence
  Description of Artificial Sequence: synthetic amino acid sequence
MMLIDTHVHLNDEQYDEDLNEVISRAREAGVDRMFVVGFDTPTIERTMELIDKYDFIYGIIGWHPVDAIDCTDERLEWIESLSKHPKIIGIGEMGLDYHWDKSPSDVQKEVFKKQIALAKRVQLPIIIHNREATQDCIDILIEEHAEEVGGIMHSFSASPEIADVVINKLNFYVSLGGPVTFKNAKQPKEVAKHVPMDRLLCETDAPYLSPHPYRGKRNEPERVTLVAQQIADLRGMTYEEVCRQTTENAERLFNLN

SEQ ID NO: 863 - DNA, 546 bp, Artificial Sequence
  Description of Artificial Sequence: synthetic nucleic acid sequence
atgaaaataaacgaatttattgttgttgaaggtaaagatgatactgaacgagtaaaaagtgctgtagattgtgatactattgaaacaaacggtagtgcaattgatacatatactttagaagtgatacaacacgcgcagcaaactagaggtgtgattgtactgacagatccagatttcccaggtgataaaattagaaatactatacgggaacatgtttctggtgttaaacacgcatatgtagatagagaaaaggccaaaagtaaaagaggtaaaataggaatagaacatgcaaacattaaagatattcaagaagcattaatgcatgtaagttcaccacttgaagaagctaaagaaactattgataaaagtgtactcattgatttgggattaattatcggtaaagatgcaagataccgtagaaatatcttaggtcgaaaattacacatcggtcactctaatggaaagcaattattaaagaaacttaatgcttttggctatactgaagacgatgtcagaaaagcgctatttgaagaagaggagaattaa

SEQ ID NO: 864 - protein, 181 aa, Artificial Sequence
  Description of Artificial Sequence: synthetic amino acid sequence
MKINEFIVVEGKDDTERVKSAVDCDTIETNGSAIDTYTLEVIQHAQQTRGVIVLTDPDFPGDKIRNTIREHVSGVKHAYVDREKAKSKRGKIGIEHANIKDIQEALMHVSSPLEEAKETIDKSVLIDLGLIIGKDARYRRNILGRKLHIGHSNGKQLLKKLNAFGYTEDDVRKALFEEEEN

SEQ ID NO: 865 - DNA, 891 bp, Artificial Sequence
  Description of Artificial Sequence: synthetic nucleic acid sequence
atggaatataaagatatagcaacaccatctcgaacacgtgctttgcttgatcaatatgggtttaattttaagaaaagtttaggacaaaattttctaatagatgtaaatatcattaataaaattatcgaagcgagtcatatagattgtacaacgggtgtaattgaagttggaccaggtatgggatcattgactgaacaacttgcaaagaatgctaagaaggtgatggcttttgaaattgatcaaagattaatacctgtgcttaaagatacactttcaccatacgataatgtaacaattatcaatgaagatatacttaaagctgatattgctaaagctgtagatacacatctacaagattgtgacaagattatggttgttgctaatttaccgtattatattaccacacctattttacttaatttgatgcaacaggatgtacctattgatggttttgtcgtaatgatgcaaaaagaggtaggagaacgtttgaacgctcaagtaggtaccaaagcatacggttcgttatcgattgttgctcaatactatacggagacaagtaaagttttaacagttcctaaaactgtatttatgcctcctccaaacgttgattctatcgttgtaaaattgatgcaacgccaagaaccacttgtacaggttgatgatgaggaaggcttttttaagttagcaaaggccgcttttgcacaacgacgtaaaacaattaataataactaccaaaacttctttaaagatggtaagaagaataaagaaactatacgacagtggctagaaagcgctggtattgatcctaaaagacgtggagaaacactcacgattcaagatttcgccacattatatgaacaaaagaaaaaattctccgaattaacaaattaa

SEQ ID NO: 866 - protein, 296 aa, Artificial Sequence
  Description of Artificial Sequence: synthetic amino acid sequence
MEYKDIATPSRTRALLDQYGFNFKKSLGQNFLIDVNIINKIIEASHIDCTTGVIEVGPGMGSLTEQLAKNAKKVMAFEIDQRLIPVLKDTLSPYDNVTIINEDILKADIAKAVDTHLQDCDKIMVVANLPYYITTPILLNLMQQDVPIDGFVVMMQKEVGERLNAQVGTKAYGSLSIVAQYYTETSKVLTVPKTVFMPPPNVDSIVVKLMQRQEPLVQVDDEEGFFKLAKAAFAQRRKTINNNYQNFFKDGKKNKETIRQWLESAGIDPKRRGETLTIQDFATLYEQKKKFSELTN

SEQ ID NO: 867 - DNA, 1407 bp, Artificial Sequence
  Description of Artificial Sequence: synthetic nucleic acid sequence
atggcaattctaacaccattatcaactacggattggcatgcatataaagttaatctaagtcaatatttgactcaagaaaatggtcgttatttaggacatttatttgaatgggttgccgtacataataacataataagagctttaatatatgcgataacttcgtttttagttatctatttagttgcttatatggttcaattacatacgaatcgtatttattttattttgagttttgtgttaatggttactgtacctaatacaatttatagcgaaacttacgggtggtttactggattttttagttatatacctgctacagtcctatcactttttattctttttacggtagttaaaaagattgagtcgcacgatacagtttctgaaatgcaattatgggtatttttattagtaagtttgtttggacaattcttcttggagaatctttccatcgctaatagcttaattattttaataggaatggtagtctatttctttgttaaaaaaagactcagttatttcttaattgtaggatttatgcttagttgtataggtaacattataatgtttttaaacttcaattattttttaattaaggatggattaaatacgcattattcaatttccgatagtcatggaatgatacataaagcaggtgtgacgttatttaagcttgtaccagaatatatgtttattaatcaaatgattattcttaccgtgatatcaatagtaagtatagttttacttaagcaaaataaaagcctgaagcatatgagagtttatattaaaataccactactcttaggtttaattactttacctatttataagatcttcgtttacaatcaatttcattttgaattatataaagcttcattttctatagccgttttgaatacaacgatttgcttcatttacatgataagtgtgatatacgttgtgtttaaaatgatacagcaaagatacataagaatgattgtgatggggagttttatagctatggcttcatctgttttgccacttttatttgtgacgcctataagttatagaaatttttattttatttatactttatggatcgtgatattactttgtttaattcagcaatgtgatgtgctatttaaacaacttgaacatataattaaaatatttgcgattatcatcagcatcattatgatgattggatttacttttatacatattagtagtgtgcacagaatagacttcattaaagaacaaataacacaacatcatcgctatcagaaaataacattggaaagattaccatttgagcgatatactcatatgactacaccaaagtcgaaggaacaacttcaagatttcaaacactattatgatttgcccaaagacatcacatttaaagtagtcccatatggtacaaaacaataa

SEQ ID NO: 868 - protein, 468 aa, Artificial Sequence
  Description of Artificial Sequence: synthetic amino acid sequence
MAILTPLSTTDWHAYKVNLSQYLTQENGRYLGHLFEWVAVHNNIIRALIYAITSFLVIYLVAYMVQLHTNRIYFILSFVLMVTVPNTIYSETYGWFTGFFSYIPATVLSLFILFTVVKKIESHDTVSEMQLWVFLLVSLFGQFFLENLSIANSLIILIGMVVYFFVKKRLSYFLIVGFMLSCIGNIIMFLNFNYFLIKDGLNTHYSISDSHGMIHKAGVTLFKLVPEYMFINQMIILTVISIVSIVLLKQNKSLKHMRVYIKIPLLLGLITLPIYKIFVYNQFHFELYKASFSIAVLNTTICFIYMISVIYVVFKMIQQRYIRMIVMGSFIAMASSVLPLLFVTPISYRNFYFIYTLWIVILLCLIQQCDVLFKQLEHIIKIFAIIISIIMMIGFTFIHISSVHRIDFIKEQITQHHRYQKITLERLPFERYTHMTTPKSKEQLQDFKHYYDLPKDITFKVVPYGTKQ

SEQ ID NO: 869 - DNA, 837 bp, Artificial Sequence
  Description of Artificial Sequence: synthetic nucleic acid sequence
atgactcatatacaatattgttattctgaaaattctgaaacaaggaggcgctctatgcgaaatattttatttgtagggttaggccttattggcggtagcttggcgagtaatttaaaatatcattacagtaatttcaatattcttgcatacgattcggactacacacaacttgatgaagccctttctataggtattattgatcaaaaagttaatgattatgctactgctgttgagatagcggatataatcatctttgcaactcctgttgagcaaacaattaaatatctatctgaacttacaaattacaatacaaaaactcatttgattgtaacagacacaggtagtaccaaacttactatacaatcattcgaaaaagaattattaaaacatgatattcatttaattagtggtcatcctatggcaggaagtcataaatctggtgttttaaacgcgaaaaaacatttatttgaaaatgcttattacattcttgtatttaatgaaatcgaaaataatgaagccgcgacatatttaaagaaattacttaaacctacgttagcaaaatttatcgttactcatgcaaatgaacatgatttcgtaaccggtatagtgagtcatgttccacatatcatcgcttcaattttagttcatctaagtgctaatcatgtcaaagaccattctttaatcgaaaaattagcagccggtggctttagagatataactcgtatagcaagtagtaatgctcagatgtggaaggatatcactttaaataatcaaaatcatattttatctttacttaacgagattaaagaacaaattactggtattgaaaatttgata

SEQ ID NO: 870 - protein, 279 aa, Artificial Sequence
  Description of Artificial Sequence: synthetic amino acid sequence
MTHIQYCYSENSETRRRSMRNILFVGLGLIGGSLASNLKYHYSNFNILAYDSDYTQLDEALSIGIIDQKVNDYATAVEIADIIIFATPVEQTIKYLSELTNYNTKTHLIVTDTGSTKLTIQSFEKELLKHDIHLISGHPMAGSHKSGVLNAKKHLFENAYYILVFNEIENNEAATYLKKLLKPTLAKFIVTHANEHDFVTGIVSHVPHIIASILVHLSANHVKDHSLIEKLAAGGFRDITRIASSNAQMWKDITLNNQNHILSLLNEIKEQITGIENLI

SEQ ID NO: 871 - DNA, 1473 bp, Artificial Sequence
  Description of Artificial Sequence: synthetic nucleic acid sequence
gtggtaccgcgcgtcagcgtccttataacgaaggaggctgatttttttcggaaaaggaggaaatcaatggatattgtatacaaaaaggtgaatgctcaaattacgccagaagctttagcaaaattaaaacaaaaaaagatcatttttgaaagtacaaatcaacagaaacttaaaggtaggtactcgatagtagtattcgatcattatggcaaaattacattagataattctcaacttttaattaagttagacaatcattgtgaaatagttaagaatcaaccgtatcaacgacttaaggaatttgtagataaatattattttgaaatcaaagataaatatttaaaagatttaccttttatttcgggctttatagggacatgtagctttgatttagtacgacatgaatttaaaaaattacaagatattaaattagaagatcatcaaactcatgatgtccaattttatctagtggaagatgtatttgtttttgatcattataaagatgaattatatattatcgcaagtaacttattttcttatagaacaaaagagagattaaaggaatctattgaacgtaaaattgaagatttaaaaaacatacatttttcggttgaggatataaattataaatccatccctcgacatataaccaccaatatatcagagcaacaatttgttcaaactattagaattttaaaaaagaaaattactgaaggagatatgtttcaagtagttccttcaagaatttatagttataaacaccattttcaacacaatttacatcaattaacttttcagttatatcaaaatttaaagcgacaaaatcctagtccatatatgtattatattaataaagatgtaccgattgtaataggaagttctcctgaaagttttgtaaaggtaaaagatggaaaagtttatacgaatcctatagctggaacaattaaaagaggtcaaaataaaaaagaagatgaaaataatgaaaagacattaatgaaagatgaaaaggaattgagtgaacatcgtatgctcgtagatttaggaagaaatgatattcatcgaataagtaaaacaggcacttcacaaattaccaaactaatgacaatagaacgttatgaacatgtcatgcatatcgttagtgaagttattggagaattaaaaccccatctatctcctatgagcgtcatcgcaagtttgctaccaacgggtactgtctcaggtgcacctaaacttagagctatacagagaatatacgaatcttatccttataaaagaggtatctatagcggtggtgttgggtatatcaactgtaatcatcatttagattttgcattggctatacgtaccatgattatcgatgaggaaaaagtcagtgtcgaggcaggatgtggagtagtatatgattctattccagagaaagaacttgaagaaacaaaacttaaagctaaaagtttattggaggtaactccatga

SEQ ID NO: 872 - protein, 490 aa, Artificial Sequence
  Description of Artificial Sequence: synthetic amino acid sequence
VVPRVSVLITKEADFFRKRRKSMDIVYKKVNAQITPEALAKLKQKKIIFESTNQQKLKGRYSIVVFDHYGKITLDNSQLLIKLDNHCEIVKNQPYQRLKEFVDKYYFEIKDKYLKDLPFISGFIGTCSFDLVRHEFKKLQDIKLEDHQTHDVQFYLVEDVFVFDHYKDELYIIASNLFSYRTKERLKESIERKIEDLKNIHFSVEDINYKSIPRHITTNISEQQFVQTIRILKKKITEGDMFQVVPSRIYSYKHHFQHNLHQLTFQLYQNLKRQNPSPYMYYINKDVPIVIGSSPESFVKVKDGKVYTNPIAGTIKRGQNKKEDENNEKTLMKDEKELSEHRMLVDLGRNDIHRISKTGTSQITKLMTIERYEHVMHIVSEVIGELKPHLSPMSVIASLLPTGTVSGAPKLRAIQRIYESYPYKRGIYSGGVGYINCNHHLDFALAIRTMIIDEEKVSVEAGCGVVYDSIPEKELEETKLKAKSLLEVTP

SEQ ID NO: 873 - DNA, 996 bp, Artificial Sequence
  Description of Artificial Sequence: synthetic nucleic acid sequence
atgacccttcttgagaaaattaaacaaaataaatctttatctaaaaaagatatgcaatcatttattgttacactgtttgattcaaatatagaaaccaatgtaaaggttgaattattgaaagcttatacaaataaagacatgggtcaatatgagctaacgtatttagttgaatattttatccagacaaactatccaaaccaaccattttataataaagctatgtgtgtttgtggcacaggtggagatcaatcaaatagctttaatatttctacaactgtagcttttgttgtagcaagtgcaggagtgccagtcattaaacacggtaataaaagtattacttcacattcaggaagtacagatgtattacatgaaatgaatataaaaacaaacaaaatgaacgaagtagagcaacaattaaatttgaaaggattagcattcataagtgcaactgattcttatccaatgatgaaaaagcttcaatcaattagaaaatcgattgcaacacctacaatttttaacttgattggaccattaattaatcctttcaaattaacttatcaagtgatgggggtatatgaagcttcacaacttgaaaatatagcacaaacattaaaggatttaggtagaaaacgagcaattttaattcatggtgcaaatgggatggatgaggccacgctttctggtgaaaatatcatttatgaagttagcagcgaaagagcattaaaaaaatatagtttaaaagcagaagaagtcggtttagcttatgcaaataatgacacgttgataggtggttcacctcaaacaaataaacaaattgcattgaatatcctaagtggcacggatcactcaagtaaacgagatgtagttttgttaaatgctggaattgctttatatgttgctgagcaagtggaaagtatcaaacatggcgtagagagagcgaaatatctcattgatacaggtatggcaatgaaacaatatttaaaaatgggaggttaa

SEQ ID NO: 874 - protein, 331 aa, Artificial Sequence
  Description of Artificial Sequence: synthetic amino acid sequence
MTLLEKIKQNKSLSKKDMQSFIVTLFDSNIETNVKVELLKAYTNKDMGQYELTYLVEYFIQTNYPNQPFYNKAMCVCGTGGDQSNSFNISTTVAFVVASAGVPVIKHGNKSITSHSGSTDVLHEMNIKTNKMNEVEQQLNLKGLAFISATDSYPMMKKLQSIRKSIATPTIFNLIGPLINPFKLTYQVMGVYEASQLENIAQTLKDLGRKRAILIHGANGMDEATLSGENIIYEVSSERALKKYSLKAEEVGLAYANNDTLIGGSPQTNKQIALNILSGTDHSSKRDVVLLNAGIALYVAEQVESIKHGVERAKYLIDTGMAMKQYLKMGG

SEQ ID NO: 875 - DNA, 789 bp, Artificial Sequence
  Description of Artificial Sequence: synthetic nucleic acid sequence
atgactattttaaatgaaattattgagtataaaaaaactttgcttgagcgtaaatactatgataaaaaacttgaaattttacaagataacggaaatgttaagaggagaaagctgattgattcacttaactatgatagaacattatcagttattgctgaaataaaatcgaaaagcccatctgtacctcaattaccgcaacgtgatcttgttcaacaagttaaagattatcaaaaatatggtgctaatgctatttcaatattaactgatgaaaaatactttggcggtagttttgaacgattaaatcagttatcaaagataacatcgttaccagttttatgtaaagattttattattgataaaattcaaatagatgttgcaaaacgagctggtgcatctattattttattaatagtaaatattttaagtgatgaccaattaaaagaattgtattcatatgcaacaaaccataatttagaagctctagtagaagttcatacaattagagaacttgaacgtgcacaccaaattaaccctaaaattattggtgttaataatcgtgatttaaaacgatttgaaaccgatgttctacatacaaataaattacttaagtttaaaaagtctaattgctgctacatttcagagagtggcattcatacaaaagaagatgttgagaaaatagtagattcaagtattgacggtttacttgtaggggaggcattaatgaaaacaaatgacttaagtcagtttttgcctagtttaaagttaaagaagaatctctatgatagttaa

SEQ ID NO: 876 - protein, 262 aa, Artificial Sequence
  Description of Artificial Sequence: synthetic amino acid sequence
MTILNEIIEYKKTLLERKYYDKKLEILQDNGNVKRRKLIDSLNYDRTLSVIAEIKSKSPSVPQLPQRDLVQQVKDYQKYGANAISILTDEKYFGGSFERLNQLSKITSLPVLCKDFIIDKIQIDVAKRAGASIILLIVNILSDDQLKELYSYATNHNLEALVEVHTIRELERAHQINPKIIGVNNRDLKRFETDVLHTNKLLKFKKSNCCYISESGIHTKEDVEKIVDSSIDGLLVGEALMKTNDLSQFLPSLKLKKNLYDS

SEQ ID NO: 877 - DNA, 480 bp, Artificial Sequence
  Description of Artificial Sequence: synthetic nucleic acid sequence
gtgccagatcatatagagaaagtagtggtcgtagtaaatcctcaaatgtccaccataaagagaataattaatcaaactgatattaacacaatccaattacatggaaatgaaagcattcaattaattagaaatattaagaaacttaattcaaaaataagaatcataaaagcaattccagcaacaagaaatttaaataataacattcaaaagtataaagatgagatagacatgtttattatagatacaccatcaatcacatacggagggacaggtcaaagttttgactggaaattattaaaaaaaataaagggcgttgattttctcattgcgggtggtttggattttgaaaagataaaacgattagaaatatattcatttggacaatgtggttatgacatctcaactggcattgagtcacataatgaaaaagattttaataagatgactcgaatattaaaatttttgaaaggagacgaatga

SEQ ID NO: 878 - protein, 159 aa, Artificial Sequence
  Description of Artificial Sequence: synthetic amino acid sequence
VPDHIEKVVVVVNPQMSTIKRIINQTDINTIQLHGNESIQLIRNIKKLNSKIRIIKAIPATRNLNNNIQKYKDEIDMFIIDTPSITYGGTGQSFDWKLLKKIKGVDFLIAGGLDFEKIKRLEIYSFGQCGYDISTGIESHNEKDFNKMTRILKFLKGDE

SEQ ID NO: 879 - DNA, 810 bp, Artificial Sequence
  Description of Artificial Sequence: synthetic nucleic acid sequence
atgaaaagaagcgataaatatacggatgattatattgaacaacgttatgagtctcaacgaccttattacaatacatattatcaaccaatagggaaaccaccgaaaaagaaaaaaagtaaaagaattttcttaaaagcaattatcactatattaattttattgattatattttttggtgtcatgtactttatttcttcaagagcaaatgtagatgatttaaaatcaattgaaaataaaagcgattttgttgctaccgaaaatatgcctaactatgtaaaaggcgcatttatttcaatggaggatgagcgtttctataaacatcatggctttgatataaaaggaacgacaagggcattgttttcaactattagcgatagagatgtgcaaggtggaagtacaattacgcaacaagttgtaaagaattattattacgataatgaacgatcctttacaagaaaaatcaaagaattgtttgtagcgcgtaaagttgaaaagcaatacagtaaaaatcagattttaagtttctatatgaataatatttattatggtgataatcaatatactgtagaaggtgctgcaaatcattattttggtgtaacggtcgataaaaacaattcaaatatgagtcagattagtgtgttacaaagtgctatattagcaagcaaagtaaatgcaccaagtgtgtatgatgtaaatgatatgtcgaataattacatcaatagagttaaaaccaatttagagaaaatgaaacaacaaaattttattagtgaatcacaatatcaagaagctatgtctcaacttggaaattaa

SEQ ID NO: 880 - protein, 269 aa, Artificial Sequence
  Description of Artificial Sequence: synthetic amino acid sequence
MKRSDKYTDDYIEQRYESQRPYYNTYYQPIGKPPKKKKSKRIFLKAIITILILLIIFFGVMYFISSRANVDDLKSIENKSDFVATENMPNYVKGAFISMEDERFYKHHGFDIKGTTRALFSTISDRDVQGGSTITQQVVKNYYYDNERSFTRKIKELFVARKVEKQYSKNQILSFYMNNIYYGDNQYTVEGAANHYFGVTVDKNNSNMSQISVLQSAILASKVNAPSVYDVNDMSNNYINRVKTNLEKMKQQNFISESQYQEAMSQLGN

SEQ ID NO: 881 - DNA, 804 bp, Artificial Sequence
  Description of Artificial Sequence: synthetic nucleic acid sequence
atgccaaaggtaactaaaatagaagtacaaaaaaagaataaagaacgctttaatctctttttagatggagaatttgaaatggggatagatattgatacattagttaaatttaacttaaaaaaagatcaaatacttgaaccgtcagatatgcagaatattcaagaatatgatcactaccgtcgaggtgttaatcttgcaattcaatacttgtcttataagaaacgtactgaaagagaagttatacagtatttagaaaaaaacgatattcaaagtaatgctattcaagatgtcattgactattgctataaggaaaaatttattgatcatgaagactacgcagaaagtttaaaaaacaccatgatacacactacagataaaggaccagaaatatatagacaaaaactctatcaattaggtattgaagttacgattattgaaaaatatgtcgaagcatatgaacaacaacaaccattagatgacgtcatcaaagttgctgaaaaagtgatgaagtctaaaaagggtcctgaagcaaaggtaaagcaaaaagtaacacagtcacttctccaaaaaggatataagtttgaaacaattcaactagttatgaatgaaatagatttttctcaagacgaagaaacattagaccatttattgcaacgtgatttagagaaagtctataataaaaattgtagaaaatatgacagtgataaaagtgttattaaaaccatagaggcactcatgagaaaaggctataattatgataaaattaaatctaaattagaagaaagcggtatatctaatgaataa

SEQ ID NO: 882 - protein, 267 aa, Artificial Sequence
  Description of Artificial Sequence: synthetic amino acid sequence
MPKVTKIEVQKKNKERFNLFLDGEFEMGIDIDTLVKFNLKKDQILEPSDMQNIQEYDHYRRGVNLAIQYLSYKKRTEREVIQYLEKNDIQSNAIQDVIDYCYKEKFIDHEDYAESLKNTMIHTTDKGPEIYRQKLYQLGIEVTIIEKYVEAYEQQQPLDDVIKVAEKVMKSKKGPEAKVKQKVTQSLLQKGYKFETIQLVMNEIDFSQDEETLDHLLQRDLEKVYNKNCRKYDSDKSVIKTIEALMRKGYNYDKIKSKLEESGISNE

SEQ ID NO: 883 - DNA, 300 bp, Artificial Sequence
  Description of Artificial Sequence: synthetic nucleic acid sequence
atgagtgaaatgtccgagcaagaactaagacatgaaatacaattatttaaagaaaaaatgcgtaaagcagagatgaatggcattatgaatgaatatgatgtttatcaaagcaaagtgattatagcagaaagctatcttgtggatcgcaataaaattgaacctggaaaaatctataaactcaatgatggtagtaaacagtactttaaagtagaacgactcaagggtgtatttgcatggggatttagaataaacagtagtgaacctgaggaaggtctaccattagcattattaaaattttag

SEQ ID NO: 884 - protein, 99 aa, Artificial Sequence
  Description of Artificial Sequence: synthetic amino acid sequence
MSEMSEQELRHEIQLFKEKMRKAEMNGIMNEYDVYQSKVIIAESYLVDRNKIEPGKIYKLNDGSKQYFKVERLKGVFAWGFRINSSEPEEGLPLALLKF

SEQ ID NO: 885 - DNA, 1224 bp, Artificial Sequence
  Description of Artificial Sequence: synthetic nucleic acid sequence
gtgagccaatatgtgagcgaactcgtacaactttttccttatgaagtaactgagcataaagttgaacaaattattcaatgggcacatttaggtgattacatagaagaaaaggtttctaatttaagcgaaaaatcatacgcacaacttttacttagtattgcacgttcttcaaaaaacgatattatcattttaaatcatgttttatcacatttagatgaaacatttatagaaagagctacagttttatcaaaagattatattgaagctaataaaacactagtcttaattgataatgatgtagaaaagataagcaaaacaagtaactacataacatgggtatcacacggccagatacgcaaggaaggttctctaaatcaggtattaccaacttttagagaacatgaaaaagatcgtactagtttaaaatcagaaatggaaattgagaactttgattatgattggaagcagaatcgctctcgtattcctgaaatgacttataattttaaaagaatagaacgttataatcatgctaagccaccaagatttctagtgagattttggaccttatttgtcagctttttgattgggcttgttttaatgagcgtacttttctttaacaacttaggtatggtcaaactagggaacattaatacccaagcatccatacagaatcagaataaagatacttacgaagaaaaacttgcatatggattagcattagatggatcagttactttaaacgggtctaaagatttaaaagtacctaagtatagtttaattacaattactggagaaaataacaaaagatatcgggtcgaaatgaatcaaaggagatatagtgttagtaaaaatcaagtgttttatttcaatccagctgggttatacgaatctcatacttttaagaaattgtcaccttatataaaatcaaattatagtacttacgtagagtactttaacagtcacttacatcaaaaacatgataaagtaacagaaacgcttagacctgataaagataaaaagtatgttgtaccgatcacgcaacaacctataaaaatgatatttggtgataatgataaactgtctggatttgttattccaatgacaaataaaacggaattgaaaaaaacatttaatatcacgaaagatgtatggattacaaaaagtggaagcggttattttatcgctgatatgaaagaagaaaaatggatttatattgaattgtag

SEQ ID NO: 886 - protein, 407 aa, Artificial Sequence
  Description of Artificial Sequence: synthetic amino acid sequence
VSQYVSELVQLFPYEVTEHKVEQIIQWAHLGDYIEEKVSNLSEKSYAQLLLSIARSSKNDIIILNHVLSHLDETFIERATVLSKDYIEANKTLVLIDNDVEKISKTSNYITWVSHGQIRKEGSLNQVLPTFREHEKDRTSLKSEMEIENFDYDWKQNRSRIPEMTYNFKRIERYNHAKPPRFLVRFWTLFVSFLIGLVLMSVLFFNNLGMVKLGNINTQASIQNQNKDTYEEKLAYGLALDGSVTLNGSKDLKVPKYSLITITGENNKRYRVEMNQRRYSVSKNQVFYFNPAGLYESHTFKKLSPYIKSNYSTYVEYFNSHLHQKHDKVTETLRPDKDKKYVVPITQQPIKMIFGDNDKLSGFVIPMTNKTELKKTFNITKDVWITKSGSGYFIADMKEEKWIYIEL

SEQ ID NO: 887 - DNA, 1620 bp, Artificial Sequence
  Description of Artificial Sequence: synthetic nucleic acid sequence
atgggtacagattataaagtagatattgaaggtaaatcatatacaccacaagaactttcagcaatgattttacaaaatttaaaaagcactgcagaaaactatttaggggatacagtagacaaagctgttatcactgtccctgcttatttcaatgatggtgaacgtcaagcaactaaagatgctggtaaaattgcaggcttagaagttgaacgtattatcaacgaacctacagctgctgcacttgcttatggtttagataaaactgaaacagatcaaaaggttctcgtatttgacttaggtgggggaacatttgacgtatctattctagagttaggcgacggcgtatttgaagtattatcaactgccggagataataaacttggtggcgatgacttcgaccaagtgattattgattatcttgtttcagaattcaagaaagagaatggtgtagatttatcacaagataaaatggcattacaaagattaaaagatgctgccgaaaaagctaaaaaagatttatcaggtgtttctcaaactcaaatttcattaccattcatttctgctggagaaaatggcccattacacttagaaattagtttaactcgttctaaatttgaggaattagctgattcattaatcaaaaaaactatggaaccgactcgtcaagcattaaaagatgctggtttatctacttcagaaatagatgaagttattttagttggtggttcaacacgtattccggccgttcaagaagctgttaaaaaagaaattgggaaagaaccacataaaggtgttaacccagatgaagttgtagcaatgggtgctgctattcaagctggtgtaatcacaggtgatgttaaagatgtagtattacttgatgttacgccattatctttaggtatcgaaattatgggtggacgtatgaacacattaattgaacgtaatactactattccaacttccaaatcacaagtttattctacagcagctgacaatcaaccagcagtagatattcatgtattacaaggtgaacgtccaatggcatctgacaacaaaactttaggaagattccaattaactgacattccacctgcaccacgtggtgtacctcaaatcgaagtaacatttgatatcgataaaaacggtattgttaacgttacagctaaagatttaggtactaataaagaacaaaacattacaatacaatcaagctcatctctatctgatgaagaaatcgatcgcatggtgaaagatgctgaagaaaatgctgaagcagataaaaaacgtcgtgaagaagtagacttgcgaaacgaagcagatagtctagtattccaagttgaaaaaacagttaaagacttaggcgaaaatattagcgatgaagataagaaaaatgctgaagagaaaaaagatgcacttaaaacagcattagaaggtgaagacatcgacgatattaaagctaaaaaagaagaacttgaaaaagtaattcaggaattatctgcaaaagtttatgaacaagctcaacaagcacaacaacaaggccaagaagaacaaggttctcaagatagcactgttgaagatgcagactttaaagaagttaaagatgacgaagataaaaaataa

SEQ ID NO: 888 - protein, 539 aa, Artificial Sequence
  Description of Artificial Sequence: synthetic amino acid sequence
MGTDYKVDIEGKSYTPQELSAMILQNLKSTAENYLGDTVDKAVITVPAYFNDGERQATKDAGKIAGLEVERIINEPTAAALAYGLDKTETDQKVLVFDLGGGTFDVSILELGDGVFEVLSTAGDNKLGGDDFDQVIIDYLVSEFKKENGVDLSQDKMALQRLKDAAEKAKKDLSGVSQTQISLPFISAGENGPLHLEISLTRSKFEELADSLIKKTMEPTRQALKDAGLSTSEIDEVILVGGSTRIPAVQEAVKKEIGKEPHKGVNPDEVVAMGAAIQAGVITGDVKDVVLLDVTPLSLGIEIMGGRMNTLIERNTTIPTSKSQVYSTAADNQPAVDIHVLQGERPMASDNKTLGRFQLTDIPPAPRGVPQIEVTFDIDKNGIVNVTAKDLGTNKEQNITIQSSSSLSDEEIDRMVKDAEENAEADKKRREEVDLRNEADSLVFQVEKTVKDLGENISDEDKKNAEEKKDALKTALEGEDIDDIKAKKEELEKVIQELSAKVYEQAQQAQQQGQEEQGSQDSTVEDADFKEVKDDEDKK

SEQ ID NO: 889 - DNA, 1122 bp, Artificial Sequence
  Description of Artificial Sequence: synthetic nucleic acid sequence
atggccaaaagagactattatgaagtcttaggcgtaaacaaaagcgcttctaaagacgaaattaaaaaagcttatcgtaaattatcaaaaaaataccatccagatataaataaagaagaaggcgcagacgaaaaattcaaagaaatctccgaagcatatgaagttttaagtgatgaaaacaaacgtgcaaattatgatcaatttggtcatgacggaccacaaggcggatttggaagtcaaggctttggtggcagtgactttggtggatttgaagatattttcagctcattctttggtggcggttcacgtcaaagagatcctaatgcacctcgcaaaggtgatgaccttcaatacacaatgacaataacatttgaagaggctgtattcgggacaaaaaaagaaatatcaataaaaaaagatgtaacatgtcatacatgtaacggtgatggggctaaacctggtacaagtaaaaaaaattgtagctattgtaatggcgctggtcgtgtttctgttgaacaaaatactattttgggtagagtgagaactgaacaagtttgtcctaaatgtgaaggtagtggacaagaatttgaagaaccatgtccaacatgtaaaggaaaaggtactgaaaataaaacagttaaactagaagtaactgttcctgaaggtgtagataacgaacaacaagttcgtttagctggagaaggttcacctggtgttaacggaggaccacatggtgacctatatgtggtgttcagagttaaaccatccaatacatttgaacgtgatggagacgatatctactataatctagatattagcttttcacaggctgcactaggtgatgaaattaagatacctacattaaaaagtaatgttgttttaaccattccggcaggtacacaaacgggtaaacaattccgacttaaagataaaggtgtaaagaatgttcatggttatggctacggggacttatttgtcaacataaaagtggttacaccaacaaaattaaatgaccgtcaaaaagaattattaaaagaatttgctgaaattaatggtgaaaatataaatgaacagtcatctaatttcaaagatagagcgaaaagattctttaaaggagaatag

SEQ ID NO: 890 - protein, 373 aa, Artificial Sequence
  Description of Artificial Sequence: synthetic amino acid sequence
MAKRDYYEVLGVNKSASKDEIKKAYRKLSKKYHPDINKEEGADEKFKEISEAYEVLSDENKRANYDQFGHDGPQGGFGSQGFGGSDFGGFEDIFSSFFGGGSRQRDPNAPRKGDDLQYTMTITFEEAVFGTKKEISIKKDVTCHTCNGDGAKPGTSKKNCSYCNGAGRVSVEQNTILGRVRTEQVCPKCEGSGQEFEEPCPTCKGKGTENKTVKLEVTVPEGVDNEQQVRLAGEGSPGVNGGPHGDLYVVFRVKPSNTFERDGDDIYYNLDISFSQAALGDEIKIPTLKSNVVLTIPAGTQTGKQFRLKDKGVKNVHGYGYGDLFVNIKVVTPTKLNDRQKELLKEFAEINGENINEQSSNFKDRAKRFFKGE

SEQ ID NO: 891 - DNA, 609 bp, Artificial Sequence
  Description of Artificial Sequence: synthetic nucleic acid sequence
atgaattggatggaactctcaattgtagttaatcacgaagtagaatacgatgttacagaaattcttgaaagttatggctctaatggagttgtaattgaagattcaaatattttagaagaacaacctattgataagtttggagaaatttatgacttaaaccctgaagactatcctgaaaaaggagttcgattaaaagcttactttaatgagttcacttataatgaaaacttaaaatccaacatcaattatgaaatattaagtcttcagcaaattgataaaacaatttatgattaccaggaaaaacttattgccgaagtagattgggaaaatgaatggaagaattattttcatccatttagagcttcaaaacaatttacgatagtaccaagttgggaatcatatgttaaagaaaatgataacgaattgtgcattgaattagatccaggtatggcttttggaacaggtgatcatccaacgacaagtatgtgtttaaaagcaattgaaacttttgtaaaaccaactgattcagttatcgacgttggaacagggtcaggcattttaagtattgctagtcatttacttggagttcaaagaataagggggatttga

SEQ ID NO: 892 - protein, 202 aa, Artificial Sequence
  Description of Artificial Sequence: synthetic amino acid sequence
MNWMELSIVVNHEVEYDVTEILESYGSNGVVIEDSNILEEQPIDKFGEIYDLNPEDYPEKGVRLKAYFNEFTYNENLKSNINYEILSLQQIDKTIYDYQEKLIAEVDWENEWKNYFHPFRASKQFTIVPSWESYVKENDNELCIELDPGMAFGTGDHPTTSMCLKAIETFVKPTDSVIDVGTGSGILSIASHLLGVQRIRGI

SEQ ID NO: 893 - DNA, 333 bp, Artificial Sequence
  Description of Artificial Sequence: synthetic nucleic acid sequence
atgtcttcaccttctaatgctgttttaagtgcatcttttttctcttcagcatttttcttatcttcatcgctaatattttcgcctaagtctttaactgttttttcaacttggaatactagactatctgcttcgtttcgcaagtctacttcttcacgacgttttttatctgcttcagcattttcttcagcatctttcaccatgcgatcgatttcttcatcagatagagatgagcttgattgtattgtaatgttttgttctttattagtacctaaatctttagctgtaacgttaacaataccgtttttatcgatatcaaatgttacttcgatttga

SEQ ID NO: 894 - protein, 110 aa, Artificial Sequence
  Description of Artificial Sequence: synthetic amino acid sequence
MSSPSNAVLSASFFSSAFFLSSSLIFSPKSLTVFSTWNTRLSASFRKSTSSRRFLSASAFSSASFTMRSISSSDRDELDCIVMFCSLLVPKSLAVTLTIPFLSISNVTSI

SEQ ID NO: 895 - DNA, 945 bp, Artificial Sequence
  Description of Artificial Sequence: synthetic nucleic acid sequence
atgacgaaaagtgggaaacaacgcccatggagagaaaagaagatagataatgtaagttatgcagatatactggaaattttaaaaataaaaaaggcttttaatgtaaaacaatgtggtaacgtcttagagttcaagccgactgatgaaggttatttgaagttacataagacatggttttgtaagtcgaaactctgcccagtttgtaattggaggcgtgctatgaaaaatagttatcaagctcaaaaagtgattgaagaagttgttaaagaaaaaccaaaagcgcgttggttatttttaacactttcaacgaaaaatgcgatagatggggatactttagaacaaagtttgaaacatttaacgaaagcatttgataggttaagtagatataaaaaagtgaagcaaaatcttgttgggtttttgcgttcaacggaagtaacagttaataaaaatgatggtagttataatcaacatatgcatgttttattatgtgttgaaaatagttattttaagaataaagctaattatataactcaagaagaatgggttaatttatggcaaaaagcattacaagtaaattatcgacccgtagcaaatattaaagcgatcaaaccaaatcaaaaaggcgataaagatattcaagcagctatcaaagaaacctctaaatattcggttaagtcatctgattttttaactgatgatgatgaaagaaatcaagaaatcgtgaatgatttagaaaaaggtttatatcgaaaacgtatgttgagttatggtggtttgcttaaacaaaaacataagattttaaatttagatgatgccgaagatggcaatttgattaatacaagtgacgaagataaaacaacagacgaagaagaaaaagcacattcaattacggcaatttggaattttgaaaaacaaaattattatttaaaagatttgaaacgttag

SEQ ID NO: 896 - protein, 314 aa, Artificial Sequence
  Description of Artificial Sequence: synthetic amino acid sequence
MTKSGKQRPWREKKIDNVSYADILEILKIKKAFNVKQCGNVLEFKPTDEGYLKLHKTWFCKSKLCPVCNWRRAMKNSYQAQKVIEEVVKEKPKARWLFLTLSTKNAIDGDTLEQSLKHLTKAFDRLSRYKKVKQNLVGFLRSTEVTVNKNDGSYNQHMHVLLCVENSYFKNKANYITQEEWVNLWQKALQVNYRPVANIKAIKPNQKGDKDIQAAIKETSKYSVKSSDFLTDDDERNQEIVNDLEKGLYRKRMLSYGGLLKQKHKILNLDDAEDGNLINTSDEDKTTDEEEKAHSITAIWNFEKQNYYLKDLKR

SEQ ID NO: 897 - DNA, 675 bp, Artificial Sequence
  Description of Artificial Sequence: synthetic nucleic acid sequence
atgaactatttcagatataaacaatttaacaaggatgttatcactgtagccgttggctactatctaagatatgcattgagttatcgtgatatatctgaaatattaaggggacgtggtgtaaacgttcatcattcaacggtctaccgttgggttcaagaatatgccccaattttatatcaaatttggaagaaaaagcataaaaaagcttattacaaatggcgtattgatgagacgtacatcaaaataaaaggaaaatggagctatttatatcgtgccattgatgcagagggacatacattagatatttggttgcgtaagcaacgagataatcattcagcatatgcgtttattaaacgtctcattaaacaatttggtaaacctcaaaaggtaattacagatcaggcaccttcaacgaaggtagcaatggctaaagtaattaaagcttttaaacttaaacctgactgccattgtacatcgaaatatctgaataacctcattgagcaagatcaccgtcatattaaagtaagaaagacaaggtatcaaagtatcaatacagcaaagaatactttaaaaggtattgaatgtatttacgctctatataaaaagaaccgcaggtctcttcagatctacggattttcgccatgccacgaaattagcatcatgctagcaagttaa

SEQ ID NO: 898 - protein, 224 aa, Artificial Sequence
  Description of Artificial Sequence: synthetic amino acid sequence
MNYFRYKQFNKDVITVAVGYYLRYALSYRDISEILRGRGVNVHHSTVYRWVQEYAPILYQIWKKKHKKAYYKWRIDETYIKIKGKWSYLYRAIDAEGHTLDIWLRKQRDNHSAYAFIKRLIKQFGKPQKVITDQAPSTKVAMAKVIKAFKLKPDCHCTSKYLNNLIEQDHRHIKVRKTRYQSINTAKNTLKGIECIYALYKKNRRSLQIYGFSPCHEISIMLAS

SEQ ID NO: 899 - DNA, 741 bp, Artificial Sequence
  Description of Artificial Sequence: synthetic nucleic acid sequence
gtgccggtaacgattaataataactcttcaattttattagatcattttgtcacatggataagtagcgcattacctcttttaactaagatattcataatgattatcattatactaggtgctatttatccatttattaaagggacatggaatcggaataccgttgaaacaatttttagtttatttaaagttttgggagtcattataggcgttttgttaatttttaacattgggccaagttggttacttaatgaacaaacgggaatgtatgtttttaactatttggtaattccggtaggattaacagtacctgcaggaggcgcggtattagctttattagtaggatatggcttattagaatttgtaggtgtttatgcgcaaaaaattatgtacccgatatggaaaacgcctggacgttcagcagttaatgctttagcatcttttgttgctagttttgctgtgggtttacttataacgaataaagagtataaagaaggtaaattcacggaaaaacaagctgttatcatagcaaccggcttttctacagttactgtagcttttatgatagttattgctaaaaccttacacttaatggatatatggaatttatatttttggtctaccttgtttgttactgctgcagtaacagcttgtacagttaggatttggcctatcagtaaaattagcaacacatattatgatcagccatttatagaagaagatacaagcgaattaaaaggttaa

SEQ ID NO: 900 - protein, 246 aa, Artificial Sequence
  Description of Artificial Sequence: synthetic amino acid sequence
VPVTINNNSSILLDHFVTWISSALPLLTKIFIMIIIILGAIYPFIKGTWNRNTVETIFSLFKVLGVIIGVLLIFNIGPSWLLNEQTGMYVFNYLVIPVGLTVPAGGAVLALLVGYGLLEFVGVYAQKIMYPIWKTPGRSAVNALASFVASFAVGLLITNKEYKEGKFTEKQAVIIATGFSTVTVAFMIVIAKTLHLMDIWNLYFWSTLFVTAAVTACTVRIWPISKISNTYYDQPFIEEDTSELKG

SEQ ID NO: 901 - DNA, 765 bp, Artificial Sequence
  Description of Artificial Sequence: synthetic nucleic acid sequence
gtgggtatagtgtcagattatgtttatgagttgatgaaacaacatcattcagttagaaaatttaagaatcaaccacttggttctgaaacggtagaaaaattagtagaggcgggacagagtgcttctacatccagttatcttcaaacttattctattattggtgttgaagatccaagcattaaagcgcgtttaaaggaagtgtcaggtcagccttatgttttagataatggttatttatttgtatttgttttagattattatcgtcatcatttagtagatgaagttgcggcgtcaaatatggagacatcatatggttctgcagaaggactattagtaggtacaatagatgttgcattagttgcgcaaaacatggcagttgctgccgaagatatggggtatggaattgtttatttagggtcattgcgtaatgatgttgcgcgagtgcgtgaaattttaaatttacctgattatacgtttccgttatttggtatggcagtaggtgaaccttctgatgaagaaaatgggtcacctaaaccgcgcttgccatttaaacatatttttcataaagaccagtatgatgcgaatcagcatcaacaacgtaaagaattggaagcatacgaccaagtagtgagtgaatattataaagaacgtactcacggtgtgcgtacagaaaattggtcacaacaaatagaaacatttctaggacgtaaaacacgtttagatatgttagatgaattgaaaaaagcaggatttattcaaagataa

SEQ ID NO: 902 - protein, 254 aa, Artificial Sequence
  Description of Artificial Sequence: synthetic amino acid sequence
VGIVSDYVYELMKQHHSVRKFKNQPLGSETVEKLVEAGQSASTSSYLQTYSIIGVEDPSIKARLKEVSGQPYVLDNGYLFVFVLDYYRHHLVDEVAASNMETSYGSAEGLLVGTIDVALVAQNMAVAAEDMGYGIVYLGSLRNDVARVREILNLPDYTFPLFGMAVGEPSDEENGSPKPRLPFKHIFHKDQYDANQHQQRKELEAYDQVVSEYYKERTHGVRTENWSQQIETFLGRKTRLDMLDELKKAGFIQR

SEQ ID NO: 903 - DNA, 390 bp, Artificial Sequence
  Description of Artificial Sequence: synthetic nucleic acid sequence
atgaggtgtaatacaatgccaaatacgatacctattgctaaagcggtaaagacacgtttagggaatgagacgtgttttcttgccataatatttaacattattaggaaaacaagtaacacgatgacattaattactgtaaaaagtatttccatatcgatatatagctcctttttaatttttagtattccgacatatgtaataagaataaagggggttaagaagaaattcaagttgttgatttatagttttcagattcatttaaagttgaatagagtgaaggtgattactagaacaatgaaaaatgagaagtttatgtttatcagaaaagtgagcaaagaggacgtaaagaggtttatattaataaaaaagacgcgtgcaatcatgctataa

SEQ ID NO: 904 - protein, 129 aa, Artificial Sequence
  Description of Artificial Sequence: synthetic amino acid sequence
MRCNTMPNTIPIAKAVKTRLGNETCFLAIIFNIIRKTSNTMTLITVKSISISIYSSFLIFSIPTYVIRIKGVKKKFKLLIYSFQIHLKLNRVKVITRTMKNEKFMFIRKVSKEDVKRFILIKKTRAIML

SEQ ID NO: 905 - DNA, 1389 bp, Artificial Sequence
  Description of Artificial Sequence: synthetic nucleic acid sequence
atggaaatactttttacagtaattaatgtcatcgtgttacttgttttcctaataatgttaaatattatggcaagaaaacacgtctcattccctaaacgtgtctttaccgctttagcaataggtatcgtatttggcattgtattacacctcatatatggtgcagagtctaaaactctcgaacaatcaacagactggtttagtattgttggagatggttatgttgcactattacaaatgattgtcatgccactaatattcatttcaattgttgccgcttttagcaaaatacaaattggtgaaaaattcgctaagatcggttcttatatttttatgtttttaattggtactgtagccattgcagctatcgttggaattttttacgctttgatctttggtttagatgcatcgtctattgatttaggtagtgcagaacattcacgtggtacagaaatttcaaaacaagccaaagatttaactgcaaacactttaccacaacaaattctcgaagtattcccaagcaatccatttttagatttcacaggacaacgtacaacttcgacaattgcagttgttatttttgcaacgtttgtgggctttgcttatcttagagttgcaagaaaacagccggaacatggaagcttacttaaacgtggtatagaagcaatctattctatcgttatggctatcgtaacttttgttttacgattaacgccttatggcattttagctattatggcttctactcttgcgacaagtgatttttctgcaatttggacgttaggtaaattcttaattgcttcatacgcagctctaatcacaatgtatattatccatttaattatactgagtgtcttaggtatcaatcccgttaaatacgtgaaaaagacaatagaagtactaatctttgcatttacttcacgttcaagtgcaggtgcattaccgttaaatgttcaaacgcaaacaaaacgtttaggtgtacctgagggaattgcaaacttctctgcaacttttggtttatccatagggcaaaatggctgtgcaggaatctatcctgctatgctagcagttatggtggcaccagtagcaaatgtagaaattgacttccaatttgttgttacacttattgctgttgttattataagttcatttggcgttgcaggtgtaggtggcggggcaacattcgcatcaatactcgtattatctacacttaatctaccagttgctctcgcaggggtactgatatctatcgaacctctcatcgatatgggtcgtacagcacttaacgttaatgactcaatgctagctggaacaggtaccgcacgcttaacgaatcattgggacaaaaaaacatttgactcaaatgattacggcgatttatctgcaaattaa

SEQ ID NO: 906 - protein, 462 aa, Artificial Sequence
  Description of Artificial Sequence: synthetic amino acid sequence
MEILFTVINVIVLLVFLIMLNIMARKHVSFPKRVFTALAIGIVFGIVLHLIYGAESKTLEQSTDWFSIVGDGYVALLQMIVMPLIFISIVAAFSKIQIGEKFAKIGSYIFMFLIGTVAIAAIVGIFYALIFGLDASSIDLGSAEHSRGTEISKQAKDLTANTLPQQILEVFPSNPFLDFTGQRTTSTIAVVIFATFVGFAYLRVARKQPEHGSLLKRGIEAIYSIVMAIVTFVLRLTPYGILAIMASTLATSDFSAIWTLGKFLIASYAALITMYIIHLIILSVLGINPVKYVKKTIEVLIFAFTSRSSAGALPLNVQTQTKRLGVPEGIANFSATFGLSIGQNGCAGIYPAMLAVMVAPVANVEIDFQFVVTLIAVVIISSFGVAGVGGGATFASILVLSTLNLPVALAGVLISIEPLIDMGRTALNVNDSMLAGTGTARLTNHWDKKTFDSNDYGDLSAN

SEQ ID NO: 907 - DNA, 351 bp, Artificial Sequence
  Description of Artificial Sequence: synthetic nucleic acid sequence
gtgacccattttcttcatcagaaggttcacctactgccataccaaataacggaaacgtataatcaggtaaatttaaaatttcacgcactcgcgcaacatcattacgcaatgaccctaaataaacaattccataccccatatcttcggcagcaactgccatgttttgcgcaactaatgcaacatctattgtacctactaatagtccttctgcagaaccatatgatgtctccatatttgacgccgcaacttcatctactaaatgatgacgataataatctaaaacaaatacaaataaataaccattatctaaaacataaggctgacctgacacttcctttaaacgcgctttaa

SEQ ID NO: 908 - protein, 116 aa, Artificial Sequence
  Description of Artificial Sequence: synthetic amino acid sequence
VTHFLHQKVHLLPYQITETYNQVNLKFHALAQHHYAMTLNKQFHTPYLRQQLPCFAQLMQHLLYLLIVLLQNHMMSPYLTPQLHLLNDDDNNLKQIQINNHYLKHKADLTLPLNAL

SEQ ID NO: 909 - DNA, 556 bp, Artificial Sequence
  Description of Artificial Sequence: synthetic nucleic acid sequence
atgacactaacaaataaagaagttgctaaagttttatttaaagcttatagatataaaaaacccatcgatttcattagtgagaactatcaattaaacgaagaagaagcatatcatgtacaagaagaactaattgaccaattaactttcaaagaccgttcgactgttacagggtataaagttagtatgactagcaaggcaacgcaagcaattgctaacactaacgaacctgcatatggaacactcttatctaaccaaattgttaatgatggtgcctcagtctctctttcagaattattttcaccattactagaaccagaaattatctttatagtgcaggaagacttaccttatgatgctgatttagaaacaattagatatcatacccgtatcgcgccaggcattgaaattccagatgcaagatataaaaattggtttccaaattttactttatcagatttaatatcagataataccgcaacaggacttgtcgtagtaggtgaccctgtagacggacttgataacgatgcatttgctaatgtacatttaaatttatatt

SEQ ID NO: 910 - protein, 186 aa, Artificial Sequence
  Description of Artificial Sequence: synthetic amino acid sequence
  MOD_RES (186): variable amino acid
MTLTNKEVAKVLFKAYRYKKPIDFISENYQLNEEEAYHVQEELIDQLTFKDRSTVTGYKVSMTSKATQAIANTNEPAYGTLLSNQIVNDGASVSLSELFSPLLEPEIIFIVQEDLPYDADLETIRYHTRIAPGIEIPDARYKNWFPNFTLSDLISDNTATGLVVVGDPVDGLDNDAFANVHLNLYX

SEQ ID NO: 911 - DNA, 411 bp, Artificial Sequence
  Description of Artificial Sequence: synthetic nucleic acid sequence
atggaccctaaagtagctatgttaagcttttctacaaaaggttctgctaaatcggatgatgttactaaagtgcaagaagcattgaagttagctcaagaaaaagctgaagcagatcaattagatcatgtagttattgatggagaattccaatttgacgctgctattgttcctagcgtagcagagaagaaagcacctggtgcaaaaattcaaggtgatgcaaatgtatttgttttccctagtctagaagcaggtaatattggttataagattgctcaacgtttaggtggatacgatgcagtaggaccagtcctacaaggattaaactctccagtcaatgatttatctcgtggttgctcaactgaagacgtttataacttatctattattacagctgctcaagctttacaataa

SEQ ID NO: 912 - protein, 136 aa, Artificial Sequence
  Description of Artificial Sequence: synthetic amino acid sequence
MDPKVAMLSFSTKGSAKSDDVTKVQEALKLAQEKAEADQLDHVVIDGEFQFDAAIVPSVAEKKAPGAKIQGDANVFVFPSLEAGNIGYKIAQRLGGYDAVGPVLQGLNSPVNDLSRGCSTEDVYNLSIITAAQALQ

SEQ ID NO: 913 - DNA, 768 bp, Artificial Sequence
  Description of Artificial Sequence: synthetic nucleic acid sequence
atgcaatcttttgcgtttgatgacactttttccgaaagcgttggtaaagatttatcttgtaatgtagtacgaacgtggatacatcaacacaccgtgattttgggcattcatgattcgcgtttaccatttttaagtgatggtattcgttttcttacagatgaacaaggatataatgcaattgttaggaattctggtggcttgggtgtcgtattagatcaaggaattttaaacatatctttgatttttaaaggacaaaccgaaacgactattgatgaagcctttacagtgatgtatttattgattaataaaatgtttgaggatgaagatgttagtatcgatactaaagaaattgagcaatcgtattgcccaggaaaatttgatttaagtattaatgataagaaatttgccgggatttcgcagcgacgagtacgtggtggtatcgcagtgcaaatatacttatgtattgaaggttctggctcagaacgggcattaatgatgcaacagttttatcaacgtgcgcttaaaggggagactactaaatttcactatccagacatagatccctcatgtatggcatctttagaaacccttttaaatagagaaattaaagtgcaagatgttatgtttttattattatatgcactaaaagatttaggggcaaacttaaatatggatcctattacagaagacgagtggacacgttacgaagggtattatgataagatgttagaacgcaatgcgaaaatgaatgaaaaattagatttttag

SEQ ID NO: 914 - protein, 255 aa, Artificial Sequence
  Description of Artificial Sequence: synthetic amino acid sequence
MQSFAFDDTFSESVGKDLSCNVVRTWIHQHTVILGIHDSRLPFLSDGIRFLTDEQGYNAIVRNSGGLGVVLDQGILNISLIFKGQTETTIDEAFTVMYLLINKMFEDEDVSIDTKEIEQSYCPGKFDLSINDKKFAGISQRRVRGGIAVQIYLCIEGSGSERALMMQQFYQRALKGETTKFHYPDIDPSCMASLETLLNREIKVQDVMFLLLYALKDLGANLNMDPITEDEWTRYEGYYDKMLERNAKMNEKLDF

SEQ ID NO: 915 - DNA, 876 bp, Artificial Sequence
  Description of Artificial Sequence: synthetic nucleic acid sequence
atgggtgaacacgcagttacatttggtcaaccggcaatcgcaattccatttaatgctggaaaaattaaagtcctcattgaaagtttagatgaaggtaattattcttctatcacaagtgacgtatatgacggaatgttatacgatgcccccgaacatctaaagtctatcattaatcgctttgttgaaaaaagtggagtgaaagaaccactatcagtaaaaattcaaactaatttgcctccatcaagaggtttaggttcaagtgctgcagtagcagtagcgtttgtacgcgccagttatgattttatggatcaacctttagatgacaaaacattgattaaagaagcaaattgggcggagcaaatcgcacatggtaagccaagcggtattgatacgcagacgattgtgtcaaataaacccgtctggtttaaacaagggcaggccgaaaaattaaaatcactaaaattaaatggttatatggttgtcattgatactggagtaaagggttctaccaaacaagcagtagaagatgttcatgtattatgtgaatctgatgaatatatgaaatatatagagcacattggtacacttgttcacagtgctagcgaatcgattgaacagcatgatttccatcatttggctgacatatttaacgcatgtcaagaagacttgagacatttaacagtaagtcacgataaaatagaaaaattacttcaaattgggaaagaacatggtgccattgctggtaaactaactggtggaggaagaggtggcagcatgcttcttcttgcggaaaatttaaaaactgcaaagactattgttgctgctgttgaaaaagctggcgcagcacatacatggattgaacatttaggaggttaa

SEQ ID NO: 916 - protein, 291 aa, Artificial Sequence
  Description of Artificial Sequence: synthetic amino acid sequence
MGEHAVTFGQPAIAIPFNAGKIKVLIESLDEGNYSSITSDVYDGMLYDAPEHLKSIINRFVEKSGVKEPLSVKIQTNLPPSRGLGSSAAVAVAFVRASYDFMDQPLDDKTLIKEANWAEQIAHGKPSGIDTQTIVSNKPVWFKQGQAEKLKSLKLNGYMVVIDTGVKGSTKQAVEDVHVLCESDEYMKYIEHIGTLVHSASESIEQHDFHHLADIFNACQEDLRHLTVSHDKIEKLLQIGKEHGAIAGKLTGGGRGGSMLLLAENLKTAKTIVAAVEKAGAAHTWIEHLGG

SEQ ID NO: 917 - DNA, 1077 bp, Artificial Sequence
  Description of Artificial Sequence: synthetic nucleic acid sequence
atgattcaggtaaaagcccccggaaaactttatattgcaggcgagtatgcagtaaccgaaccaggatataaatctattcttattgcagtaaatcgctttgtaacggcgacaattgaggcgtcaaataaagttgaaggtagtattcattccaaaacattacattatgaaccagttaaatttgaccgtaatgaagatagaattgaaatctcagatgttcaagctgctaagcaactgaaatatgttgtgacagctatagaagtgtttgaacagtatgtgcgcagttgcaatatgaatttaaagcactttcatttaaccattgatagtaacttagcagataactctggtcagaagtacggattaggttcaagcgccgctgttttagtatctgttgttaaagctttgaatgaattctatggtttggaattatcaaacctttatatttataaattagctgtaattgcaaatatgaaattacaaagtttaagttcatgtggcgatattgcggttagtgtctacagtggttggcttgcatatagtacgtttgaccatgactgggtgaaacagcaaatggaagaaacatcggtgaatgatgttttggaaaaaaattggccaggcttacatatcgaacctttacaagctcccgaaaatatggaagtccttattggatggactgggtctccagcttcttctccacacttagtgagtgaggtcaaacgtttaaaatcagatccaagtttttatggtgattttttagatcaatctcatgcttgtgtagaaagtttaatccaagcttttaaaactaataatatcaaaggtgttcaaaagatgatacgtataaacagacgtattattcaatctatggataacgaagcatcagttgaaattgaaacagataagctaaaaaaattatgtgatgtcggtgaaaagcacggtggcgcttctaaaacttcaggtgctggtggtggcgattgtggcattactattatcaacaaggtaattgataaaaatattatttataacgaatggcaaatgaatgatatcaaaccattgaaatttaaaatttatcacgggcaataa

SEQ ID NO: 918 - protein, 358 aa, Artificial Sequence
  Description of Artificial Sequence: synthetic amino acid sequence
MIQVKAPGKLYIAGEYAVTEPGYKSILIAVNRFVTATIEASNKVEGSIHSKTLHYEPVKFDRNEDRIEISDVQAAKQLKYVVTAIEVFEQYVRSCNMNLKHFHLTIDSNLADNSGQKYGLGSSAAVLVSVVKALNEFYGLELSNLYIYKLAVIANMKLQSLSSCGDIAVSVYSGWLAYSTFDHDWVKQQMEETSVNDVLEKNWPGLHIEPLQAPENMEVLIGWTGSPASSPHLVSEVKRLKSDPSFYGDFLDQSHACVESLIQAFKTNNIKGVQKMIRINRRIIQSMDNEASVEIETDKLKKLCDVGEKHGGASKTSGAGGGDCGITIINKVIDKNIIYNEWQMNDIKPLKFKIYHGQ

SEQ ID NO: 919 - DNA, 1605 bp, Artificial Sequence
  Description of Artificial Sequence: synthetic nucleic acid sequence
atggactggacgaccttcataggcgtagtcattgtgttactttttgctgttatacctatgatggtttttccgaaagcaagtgaaataatcattaccgatatcaatagtgccatttctaattcaattggatcggtatatctctttatgggactggctatattttgttttgttttatacatagcatttggtaagtatgggaatgtcacgttaggaaaagcgactgacaaacctgaatttaataatttcacatgggcagccatgttattctgtgccggtattggttcagatattttatattggggtgttattgagtgggcattttattatcaagtacctcctaacggtgcaaaatcaatgtccgatcaagcacttcaatatgcaactcaatatggtatgtttcactggggacctatagcctgggcaatatatgtgctaccagctttgccaatcggttatttagttttcgttaagaagaaacccgtctataaaattagtcaagcttgtcgaccaattttaaaaggacatacggataaattattaggaaaaatcgtagatattttatttattttcggtttgctcggtggtgctgcaacatcactcgctctaggcgtgccgatgatctcagctggtattgaacgattgactggtttagatggatctaatatgattttacgttcaatcatcttactaactattacagttattttcgcaatcagttcttacacaggtttgaaaaaaggtattcaaaaattaagtgatgttaacgtttggttatcatttttattattagcatttgtattcatcgtaggtccaactgtgtttattatggaaactacagttacagggttcggtaatatgataaaagatttcttccatatggcgacatggatggaaccatttggtggcataaaaggtcgtaaagaaacgaatttccctcaagattggacaatattctactggtcatggtggctcgtttatgcaccgtttattggattgtttatcgcgcgtatctcaaaaggacgtacacttaaagaagttgtattaggaacaatatgctatggaacattaggttgtgtgttatttttcggtatttttggtaactatgctgtatatctacaaattactgagcaatttaatgtaataagctatttaaacaattatggtacagaggcaacaatcatagaaataatgcatcaactaccattctcgacaattactattatcttattcttaatatcagctttcttattcttagcaacaacattcgattctggttcatatattttagcagcagcgtcacagaaaaaagtgataggagaaccgttacgtgctaatcgtttgttctgggcgtttgcgttatgtttactaccgttctctttaatgctagttggaggagaacgtgcattagaagtattgaaaacagcatcattacttgctagtgtacctttaattgttatatttacgctaatgatgatttcgttcttaattatactcggacgagatcgtatcaagttagaaagacgtgcagataagcataaagaaattgaaagacgttctctaagaatagttcaggtcaaagacaaacctgaagacgataacttataa

SEQ ID NO: 920 - protein, 534 aa, Artificial Sequence
  Description of Artificial Sequence: synthetic amino acid sequence
MDWTTFIGVVIVLLFAVIPMMVFPKASEIIITDINSAISNSIGSVYLFMGLAIFCFVLYIAFGKYGNVTLGKATDKPEFNNFTWAAMLFCAGIGSDILYWGVIEWAFYYQVPPNGAKSMSDQALQYATQYGMFHWGPIAWAIYVLPALPIGYLVFVKKKPVYKISQACRPILKGHTDKLLGKIVDILFIFGLLGGAATSLALGVPMISAGIERLTGLDGSNMILRSIILLTITVIFAISSYTGLKKGIQKLSDVNVWLSFLLLAFVFIVGPTVFIMETTVTGFGNMIKDFFHMATWMEPFGGIKGRKETNFPQDWTIFYWSWWLVYAPFIGLFIARISKGRTLKEVVLGTICYGTLGCVLFFGIFGNYAVYLQITEQFNVISYLNNYGTEATIIEIMHQLPFSTITIILFLISAFLFLATTFDSGSYILAAASQKKVIGEPLRANRLFWAFALCLLPFSLMLVGGERALEVLKTASLLASVPLIVIFTLMMISFLIILGRDRIKLERRADKHKEIERRSLRIVQVKDKPEDDNL

SEQ ID NO: 921 - DNA, 318 bp, Artificial Sequence
  Description of Artificial Sequence: synthetic nucleic acid sequence
gtgtcaatttcacgttcccattttttagtaaaaaagttgcggaagaaagtgaagaaatctttctctgcaataaaatgttgctttcggctaccacgcgtgaattgttgtttgacgatatcgtattcttgtagtttttttacacctgtactcatactaggtttactcatttgcagttgttgtcgcatttcatcaagtgtcatacttccttcaaaaaccataatgccatacaagttacctacactacggttgataccatacaaatccatggtttcaccgattgagttgataactaaatctttagcttcttcgatatattga

SEQ ID NO: 922 - protein, 105 aa, Artificial Sequence
  Description of Artificial Sequence: synthetic amino acid sequence
VSISRSHFLVKKLRKKVKKSFSAIKCCFRLPRVNCCLTISYSCSFFTPVLILGLLICSCCRISSSVILPSKTIMPYKLPTLRLIPYKSMVSPIELITKSLASSIY

SEQ ID NO: 923 - DNA, 375 bp, Artificial Sequence
  Description of Artificial Sequence: synthetic nucleic acid sequence
atgagtacaggtgtaaaaaaactacaagaatacgatatcgtcaaacaacaattcacgcgtggtagccgaaagcaacattttattgcagagaaagatttcttcactttcttccgcaacttttttactaaaaaatgggaacgtgaaattgacactaatatggaagcaattgaagatgcagaaaatatcattcacccacttcttgaaaagaatgatatagatgaggaagttaaaaaacaagcaataaatgtaaaagcgcagttagaccactctaaaatatattacaagtggctcgctcaattaagtgaagctctagagtcaggagaaatttttaactatttcccaattccagatgaacaacatcatcatgatcaataa

SEQ ID NO: 924 - protein, 124 aa, Artificial Sequence
  Description of Artificial Sequence: synthetic amino acid sequence
MSTGVKKLQEYDIVKQQFTRGSRKQHFIAEKDFFTFFRNFFTKKWEREIDTNMEAIEDAENIIHPLLEKNDIDEEVKKQAINVKAQLDHSKIYYKWLAQLSEALESGEIFNYFPIPDEQHHHDQ

SEQ ID NO: 925 - DNA, 306 bp, Artificial Sequence
  Description of Artificial Sequence: synthetic nucleic acid sequence
atggctgcccatgtgaaattattaaattcaggtttgtcagtcgcttttcctaacgtgacattcccatacttaccaaatgctatgtataaaacaaaacaaaatatagccagtcccataaagagatataccgatccaattgaattagaaatggcactattgatatcggtaatgattatttcacttgctttcggaaaaaccatcataggtataacagcaaaaagtaacacaatgactacgcctatgaaggtcgtccagtccataactttttcctttttcaaatgtgatccccctaatattaatttatga

SEQ ID NO: 926 - protein, 101 aa, Artificial Sequence
  Description of Artificial Sequence: synthetic amino acid sequence
MAAHVKLLNSGLSVAFPNVTFPYLPNAMYKTKQNIASPIKRYTDPIELEMALLISVMIISLAFGKTIIGITAKSNTMTTPMKVVQSITFSFFKCDPPNINL

SEQ ID NO: 927 - DNA, 762 bp, Artificial Sequence
  Description of Artificial Sequence: synthetic nucleic acid sequence
atgattttagatgaacgtgtaaactctaatttcgatcaattaaatgataatgatatacaaattgcacattatgttaatacacatatagatgtttgcaaaaatatgaaaatacaagatttagcctcacagacacatgcttcaaatgctacgattcatcgcttcactcgtaaactaggttttgatggttatagtgactttaaatcctttttaaaatttgaagatagtaagaatcatcaacttccttctgattctatggagcaatttaaacaagaaattgaaaatacattcaactatttagaacgtattgattatcgtttattaactcacaaaatgcatcatgctacaacaatatacttatatggtactggacgtgcacagatgaatgtcgctgaagaagcacaacgtatactgttgactatgcataaaaatattatattgttacatgatgttcatgaactaaagatggtgttaaacaagacaattccagaagatttgtttttcatcatttcactttctggcgaaacacatcaacttaaagaagtcacacaattgcttcaactgagacaaaaatattttatttccgtaacaacaatgaaagacaatacattggcacaacaagctgattacaatgtctatgtttcaagcaataccttctatttaaacgatggtactgattattccagttttattagctatcacattttctttgaaacactactaagaaaatataacgaatataaagagaatcatgaattaacatag

SEQ ID NO: 928 - protein, 253 aa, Artificial Sequence
  Description of Artificial Sequence: synthetic amino acid sequence
MILDERVNSNFDQLNDNDIQIAHYVNTHIDVCKNMKIQDLASQTHASNATIHRFTRKLGFDGYSDFKSFLKFEDSKNHQLPSDSMEQFKQEIENTFNYLERIDYRLLTHKMHHATTIYLYGTGRAQMNVAEEAQRILLTMHKNIILLHDVHELKMVLNKTIPEDLFFIISLSGETHQLKEVTQLLQLRQKYFISVTTMKDNTLAQQADYNVYVSSNTFYLNDGTDYSSFISYHIFFETLLRKYNEYKENHELT

SEQ ID NO: 929 - DNA, 333 bp, Artificial Sequence
  Description of Artificial Sequence: synthetic nucleic acid sequence
gtgattaggaatagccctccgataacaaatgaaatagacagagggaaattcatagtgacatgtaaagcgattgctcctaaaatccatgcaattcccgctcctattgtaataattcttataacagctttagaaatgccttttaattctctaaaatctagattactactaccttcaaataatataattgctacagcaagagatacaattgaactaaatgcctcaggtccaagtgcctcttttggatttgctaatccaaaaataggtcctacaagtaaacctacgatggccatgacaacaatcgatggccattttattctactcgctaaccattga

SEQ ID NO: 930 - protein, 110 aa, Artificial Sequence
  Description of Artificial Sequence: synthetic amino acid sequence
VIRNSPPITNEIDRGKFIVTCKAIAPKIHAIPAPIVIILITALEMPFNSLKSRLLLPSNNIIATARDTIELNASGPSASFGFANPKIGPTSKPTMAMTTIDGHFILLANH

SEQ ID NO: 931 - DNA, 1050 bp, Artificial Sequence
  Description of Artificial Sequence: synthetic nucleic acid sequence
atgagcaatgttaaagaatccatcattgttgccttcgcctttgtaggcgttgtagttggagcaggatttgcgacaggtcaggaaatttttcaattcttcactagtcatggtatttacagtattggcggtatttttattactggacttatcataactcttggaggaatattcgtattaaatactggctttcgtcttagatctcaaaaccactctgaatctattcgttattatttacatccaacaatagctaaattatttgatattatacttacagtatttttattttctctagcaattattatgacagccggcggagcatcgactataaatgaaagttttggcttacctttttggttaagttctctcattttagtgatacttattttgttaacattatttctaaagttcgatcgacttatcgctgttttaggaggggtaacaccatttcttgtggcagtcgtagtaatgattgcagtgtattactttattaccggtgatttaaactttagtgacgtcagtcaatattcaaatcaaaataagtcgatttcacctggttggtggtttgacgcaattaattatgctagcttacaaattgctgctgcatttagctttttaactgtaatgggcggtaagctacgatatcaatcgtccacaatttatggtggacttatcggtggtattattgtgactttactattacttttgattaattttggtcttgttacagaatttaatcaaattaaagaggtagcattaccatcattgctacttgctaagcagatttctccatccattggtattatcatgtctgtcattatggttttagtcatatacaatacagtagtaggtttaatgtacgcctttgcatcacgctttagtcgaccgtttacgaaacgctattatattcttatagttatgatggcaataataacatttgcttgtacttttgtgggattcatttctctcattggtaaagtgttccctattatgggactttttggttttatcttattgattcctgtgatatacaaaggaattttacgaaaataa

SEQ ID NO: 932 - protein, 349 aa, Artificial Sequence
  Description of Artificial Sequence: synthetic amino acid sequence
MSNVKESIIVAFAFVGVVVGAGFATGQEIFQFFTSHGIYSIGGIFITGLIITLGGIFVLNTGFRLRSQNHSESIRYYLHPTIAKLFDIILTVFLFSLAIIMTAGGASTINESFGLPFWLSSLILVILILLTLFLKFDRLIAVLGGVTPFLVAVVVMIAVYYFITGDLNFSDVSQYSNQNKSISPGWWFDAINYASLQIAAAFSFLTVMGGKLRYQSSTIYGGLIGGIIVTLLLLLINFGLVTEFNQIKEVALPSLLLAKQISPSIGIIMSVIMVLVIYNTVVGLMYAFASRFSRPFTKRYYILIVMMAIITFACTFVGFISLIGKVFPIMGLFGFILLIPVIYKGILRK

SEQ ID NO: 933 - DNA, 798 bp, Artificial Sequence
  Description of Artificial Sequence: synthetic nucleic acid sequence
atgacaaattttcattctatagatgctacacaagtaacaaacgtcactttaaatgttaaagatttaaataaattaactgatttctattctaatgtattaggtttttctattcaaaaacaaacgaatcaacaaaccgtattcaacatcggaaatcttggttatactttaactttaaatgaacttaacaacggtcgacaaccggaatttagagaagcagggttattccatgttgcttatcttttaccgactcgtagcgatttagcagacttcctttatcatgctaacaatctcaacatcgcaatgggtggtggagatcaccttgtcagtgaagcgctatatttcactgatcctgaaggcaatggtattgaagtctatcatgatcgcccttcagaagactggttgtggcgagacggttttgtcaaaatggatacattggaagttgatgtcaatgatttaatgactcaacggtcaaatgaaggttggcaaagttggccggaagaaggaaaaatcgggcatttacatctcaaaacacacaatttagaatctgcttatgaattttatgttgaaaagttagggttcgaacatatatctaatttcccacaagcactatttatgtccactcaaaagtatcatcatcatatagctacaaatacttggcagtcaaataagattagaactcaaaatgaacaaacttatggtttatgtcactttgacatatatcaacctaatgcaaatactactcatgttacctcacctgaaggctttgacattacaattcatggtaacgaaacaaaataa

SEQ ID NO: 934 - protein, 265 aa, Artificial Sequence
  Description of Artificial Sequence: synthetic amino acid sequence
MTNFHSIDATQVTNVTLNVKDLNKLTDFYSNVLGFSIQKQTNQQTVFNIGNLGYTLTLNELNNGRQPEFREAGLFHVAYLLPTRSDLADFLYHANNLNIAMGGGDHLVSEALYFTDPEGNGIEVYHDRPSEDWLWRDGFVKMDTLEVDVNDLMTQRSNEGWQSWPEEGKIGHLHLKTHNLESAYEFYVEKLGFEHISNFPQALFMSTQKYHHHIATNTWQSNKIRTQNEQTYGLCHFDIYQPNANTTHVTSPEGFDITIHGNETK

SEQ ID NO: 935 - DNA, 930 bp, Artificial Sequence
  Description of Artificial Sequence: synthetic nucleic acid sequence
gtgtcaatcatcattttaatgttaagcggatgcagtagctttgatcatcgtaaacgcgaaagtattaatgacaagaataaaatgaaagtatacacgactgtatatgcatttcaaagtttgacacaacagattggtggaaaatatgttgacgcgcaatcaatctatcctgctggtgctgatttacactcatatgaaccaacacaaaaagatatgattgatattgccaaaagtgatctgtttgtctattcaagtcatcaattagatcctgtcgctgcaaagattacgaattcgatgaccaataatagcatgaaattagcgcttgccgaaggactcaaacaaagtgattttattcactctaaagaccatgatgaaaatcatgagcatcattcacatcatgaagaatcgaatcaagatcctcatgtttggttagatcctgttctaaatcaaaaattcgctttcatgattaaagagaaattaatagagaaagaccctaaacatcaagcttattacaataaaaattataaaatagtaaataaagatattgtgcatattgatcaacaactacaatcaataacgaagcattctaaaagagataaagttgtgatatcacacgattcgcttggatatttagcgcatcgttatggttttaaacaacaaggtgttaaaggtatgaatgatgaagaacctagtcaaaaagagattttgaatatcgttaaagatatacagcattcacatgcgccttatgttttatatgaacaaaatattacctccaaaattacagatgttattaagaaagaaacagatacgaaaccattaagttttcataatctagctgtattgactaaaaaggagcaaaatgatgattcaatttcataccaatcattaatgaaaaagaacatttacgtattaaatcgcgcactcaataattaa

SEQ ID NO: 936 - protein, 309 aa, Artificial Sequence
  Description of Artificial Sequence: synthetic amino acid sequence
VSIIILMLSGCSSFDHRKRESINDKNKMKVYTTVYAFQSLTQQIGGKYVDAQSIYPAGADLHSYEPTQKDMIDIAKSDLFVYSSHQLDPVAAKITNSMTNNSMKLALAEGLKQSDFIHSKDHDENHEHHSHHEESNQDPHVWLDPVLNQKFAFMIKEKLIEKDPKHQAYYNKNYKIVNKDIVHIDQQLQSITKHSKRDKVVISHDSLGYLAHRYGFKQQGVKGMNDEEPSQKEILNIVKDIQHSHAPYVLYEQNITSKITDVIKKETDTKPLSFHNLAVLTKKEQNDDSISYQSLMKKNIYVLNRALNN

SEQ ID NO: 937 - DNA, 318 bp, Artificial Sequence
  Description of Artificial Sequence: synthetic nucleic acid sequence
atggctacagttgacaatggtgatatgattataaaactaaacaccatagagattaacatactcataaacactggttgtaattcagtaaagctattaaccatgtcaccaattcccgttgtaattaaccttacatatggtaaagtaaatacgccgattgtagctgctaaaccaccaacaactgtcggaaaaacaattaaagccatactaccaacacgttcttctattaataaaataagtaacacggcgatggatgcagttaacatcgtattaattaaatccccaattcccgcaattacccatgtaccttgtttaaattga

SEQ ID NO: 938 - protein, 105 aa, Artificial Sequence
  Description of Artificial Sequence: synthetic amino acid sequence
MATVDNGDMIIKLNTIEINILINTGCNSVKLLTMSPIPVVINLTYGKVNTPIVAAKPPTTVGKTIKAILPTRSSINKISNTAMDAVNIVLIKSPIPAITHVPCLN

SEQ ID NO: 939 - DNA, 478 bp, Artificial Sequence
  Description of Artificial Sequence: synthetic nucleic acid sequence
atgtacaaattagttaagcctttattattcaaattagatcctgaacgagcacatggtttgaccatcaatgcgttgaagtgtgttcaaaaatgttcacccattttacctatcgttaataagttatttacttataacaatccaatattaacgcaacacattcacggtatttcttttgataatcctatcgggttagctgcaggttttgataaatcttgtgaagttccaaaagcacttgaaaacattggcttcggtgcaattgaactcggcggtataacacctaagcctcaaccaggtaatccaaaaccacgcatgtatcgtttactagaagatgatgcactcatcaatcgtatgggattcaataataagggtatgaataaagcactaagtaatttacgtaatcattcatgctcaataccagtaggattaaatgttggtgtgaataaaacaacttcctatgaaaatcgctatcaagattaca

SEQ ID NO: 940 - protein, 160 aa, Artificial Sequence
  Description of Artificial Sequence: synthetic amino acid sequence
  MOD_RES (160): variable amino acid
MYKLVKPLLFKLDPERAHGLTINALKCVQKCSPILPIVNKLFTYNNPILTQHIHGISFDNPIGLAAGFDKSCEVPKALENIGFGAIELGGITPKPQPGNPKPRMYRLLEDDALINRMGFNNKGMNKALSNLRNHSCSIPVGLNVGVNKTTSYENRYQDYX

SEQ ID NO: 941 - DNA, 540 bp, Artificial Sequence
  Description of Artificial Sequence: synthetic nucleic acid sequence
atgcatagccaataccaacaagataataaatttggattccgtttaccacatgaaggtgcagatatttcctttgataattcatggactgagacatggaaagagatttttataaatcgtagaatggatcacttacaagatgagttattacgtgtaggattgtggaaacaagaagataaaaaaatgtatgaacgtgtaagaaaagttattgttgatgaactttcaaatcatactagtaagccctctctgttacatggtgatttatggggaggtaactacatgttcttaacaaatggccaacctgctttatttgatcctgcaccactatatggagatagagaatttgacataggaatcactacagtatttggtggatttacacaagagttctatgatgaatataatcaacagttaccactagccaagggatcacaaaagcgtatagaattttatagattatatttacttatgatacatttacttaaatttggtggtatgtatgctgatagtgtacaacgctctatgaaaatcattttagaataa

SEQ ID NO: 942 - protein, 179 aa, Artificial Sequence
  Description of Artificial Sequence: synthetic amino acid sequence
MHSQYQQDNKFGFRLPHEGADISFDNSWTETWKEIFINRRMDHLQDELLRVGLWKQEDKKMYERVRKVIVDELSNHTSKPSLLHGDLWGGNYMFLTNGQPALFDPAPLYGDREFDIGITTVFGGFTQEFYDEYNQQLPLAKGSQKRIEFYRLYLLMIHLLKFGGMYADSVQRSMKIILE

SEQ ID NO: 943 - DNA, 1059 bp, Artificial Sequence
  Description of Artificial Sequence: synthetic nucleic acid sequence
atgtcgacgataaaaaatatcgatggaccaaaggattttgtttttagagtgttatcaggggtagcaattggaatagtagccggactcgttccaaatgcaattttgggagaaatttttaaatactttatgcaatatcatcctattttcaaaactttattaggggtcgttcaagccatccaatttacagtgccagcgcttattggagcattgatagctatgaagttcaatatgacacctttagcaatagctgtagtagcaagtgcctcatatgttggtagtggtgcagctcaatttaaacaaggtacatgggtaattgcgggaattggggatttaattaatacgatgttaactgcatccatcgccgtgttacttattttattaatagaagaacgtgttggtagtatggctttaattgtttttccgacagttgttggtggtttagcagctacaatcggcgtatttactttaccatatgtaaggttaattacaacgggaattggtgacatggttaatagctttactgaattacaaccagtgtttatgagtatgttaatctctatggtgtttagttttataatcatatcaccattgtcaactgtagccatagctattgctattggattatcaggtattgctgcgggatctgcttcaataggtatagcagcgacagaagctgtattattgattggtaccagcaaagttaatcatgtaggtattcctttatcaatatttttcggtggggtgaaaatgatgatgccaaatatggttaaataccctgtcattatgattccgattttcttgacagcggcaatatctggtattgcttcagggattattggtatttcaggaacaaaagaatcagcaggatttggttttatcggaatggttgggcctattaatgcctttaaatttatgcatgttgattctgcatggttaagtttattacttattgtcatcgccttttttgttgtgccgtttctagttgcatggattttagatttaatacttagaagattaattcatttgtatgagaatgatatttttaaatttatgggataa

SEQ ID NO: 944 - protein, 352 aa, Artificial Sequence
  Description of Artificial Sequence: synthetic amino acid sequence
MSTIKNIDGPKDFVFRVLSGVAIGIVAGLVPNAILGEIFKYFMQYHPIFKTLLGVVQAIQFTVPALIGALIAMKFNMTPLAIAVVASASYVGSGAAQFKQGTWVIAGIGDLINTMLTASIAVLLILLIEERVGSMALIVFPTVVGGLAATIGVFTLPYVRLITTGIGDMVNSFTELQPVFMSMLISMVFSFIIISPLSTVAIAIAIGLSGIAAGSASIGIAATEAVLLIGTSKVNHVGIPLSIFFGGVKMMMPNMVKYPVIMIPIFLTAAISGIASGIIGISGTKESAGFGFIGMVGPINAFKFMHVDSAWLSLLLIVIAFFVVPFLVAWILDLILRRLIHLYENDIFKFMG

SEQ ID NO: 945 - DNA, 1425 bp, Artificial Sequence
  Description of Artificial Sequence: synthetic nucleic acid sequence
atgtcagggaaactagaagaattacaattaaaagtagctcgattaagtcgacgtactcatgaattaggtattccaattatggtattatttgaggggattcctgcttcggggaagacacgtttatcaaatgaattactattgcacctagatgccaaatattcgcgatttatagctactaaatcgccagagtcaaacgatttacgttaccaatttttacaaaaatattggaatactttaccacaaaagggcaatataaatatttattttagaagttggtattcacactttttagattataaagaaaataaaattaagcatgatcaatataaaaattatgatgttttagtcaatcaaatttatcattttgaatcgatgttaaagaatgataactatgaaattataaaatttttcatagaaataaatgaagaaaaacgcaatgaacatattcaacagacaaaagataatccattaactagatggaaagttcaagaatatgaaaatgttatacctcaagaaagttatctaaatcaaatgcatcaattcatcaacaaagataaagattggaaagtgatcgattacacagagcgcgagcatgcttttgaaaaaatgtacttacatttaatagatagacttgagcaagctataaaaaaagttgaacaacaaacaactaaagtcaacggtaagttcacatcaagctttacgacttctttatttaataataatcttgagaaagtagacaaaaaaacgtataaaaatctcattgttgaattgcaacagagaatgagagaaatccaatttgctttatatgaaagaaagattccccttgttttggttttcgaaggtatggatgctgctggtaaaggtggcaatattaaacgtattagagaaaaattagatccaacaggatatgaagtgaatggtattagtgcacctacggatgtcgaacttaagcatcattatttgtggagatttgctaaaaagatgccaaaatcaggtcatatagaaatatttgatcggagttggtatggtcgtgtactagttgaacgtgtagaaggttttgcaagccagaatgaatggcaacgagcatctgatgaaatcaatcaatttgaaaagatgtggacagatgaaggtacaatcatattaaaattcttcttatgtttagataaagatgagcagcttaagcgttttaaagaccgtgaaaataatcctgataaacaatggaagattactgaagaagattggcgtaatagagaaaaatgggatgaatatttagaagcaagtcatgatatgattgaatctacaaacacttcatatgccccttggtatattgttccggcagatcataaaaaaacgagtcggattgaagtacttaaaacaattattagaaaatgtgaagaagtactatggggagttaagacgtattaa

SEQ ID NO: 946 - protein, 474 aa, Artificial Sequence
  Description of Artificial Sequence: synthetic amino acid sequence
MSGKLEELQLKVARLSRRTHELGIPIMVLFEGIPASGKTRLSNELLLHLDAKYSRFIATKSPESNDLRYQFLQKYWNTLPQKGNINIYFRSWYSHFLDYKENKIKHDQYKNYDVLVNQIYHFESMLKNDNYEIIKFFIEINEEKRNEHIQQTKDNPLTRWKVQEYENVIPQESYLNQMHQFINKDKDWKVIDYTEREHAFEKMYLHLIDRLEQAIKKVEQQTTKVNGKFTSSFTTSLFNNNLEKVDKKTYKNLIVELQQRMREIQFALYERKIPLVLVFEGMDAAGKGGNIKRIREKLDPTGYEVNGISAPTDVELKHHYLWRFAKKMPKSGHIEIFDRSWYGRVLVERVEGFASQNEWQRASDEINQFEKMWTDEGTIILKFFLCLDKDEQLKRFKDRENNPDKQWKITEEDWRNREKWDEYLEASHDMIESTNTSYAPWYIVPADHKKTSRIEVLKTIIRKCEEVLWGVKTY

SEQ ID NO: 947 - DNA, 708 bp, Artificial Sequence
  Description of Artificial Sequence: synthetic nucleic acid sequence
atgaaaaaaacagttatcgcttctacattagcagtatctttaggaattgcaggttacggtttatcaggacatgaagcacacgcttcagaaactacaaacgttgataaagcacacttagtagatttagcacaacataatcctgaagaattaaatgctaaaccagttcaagctggtgcttacgatattcatttcgtagacaatggataccaatacaacttcacttcaaatggttctgaatggtcatggagctacgctgtagctggttcagatgctgattacacagaatcatcatcaaaccaagaagtaagtgcaaatacacaatctagtaacacaaatgtacaagctgtttcagctccaacttcttcagaaagtcgtagctacagcacatcaactacttcatactcagcaccaagccataactacagctctcacagtagttcagtaagattatcaaatggtaatactgctggttctgtaggttcatatgctgctgctcaaatggctgcacgtactggtgtatctgcttcaacatgggaacacatcattgctagagaatcaaatggtcaattacatgcacgtaatgcttcaggtgctgctggattattccaaactatgccaggttggggttcaactggttcagtaaatgatcaaatcaatgccgcttataaagcatataaagcacaaggtttatctgcttggggtatgtaa

SEQ ID NO: 948 - protein, 235 aa, Artificial Sequence
  Description of Artificial Sequence: synthetic amino acid sequence
MKKTVIASTLAVSLGIAGYGLSGHEAHASETTNVDKAHLVDLAQHNPEELNAKPVQAGAYDIHFVDNGYQYNFTSNGSEWSWSYAVAGSDADYTESSSNQEVSANTQSSNTNVQAVSAPTSSESRSYSTSTTSYSAPSHNYSSHSSSVRLSNGNTAGSVGSYAAAQMAARTGVSASTWEHIIARESNGQLHARNASGAAGLFQTMPGWGSTGSVNDQINAAYKAYKAQGLSAWGM

SEQ ID NO: 949 - DNA, 1250 bp, Artificial Sequence
  Description of Artificial Sequence: synthetic nucleic acid sequence
atgatgtttgttgtcacggttgttttaatatatacattactatttaaacccgaattaattattagtataaaacatgatgctatagcagcacttttctatgtttctaactggtggtatatcatacaagacgtagactattttaatcaatttgctgtagcgccattaaagcatttgtggtcattagctattgaagaacaattctatctattctttccatttatacttttaggcttattaaagtttttcaaaaagagaactacaatgattattctattaatcatctctttattatcattaactgcaatgataacgatacatatgtatacaggtaacaattctagagtttatttcgggactgacacacgtttacaaacgttattattaggatgcttactagcatttatttggccaccgttctctttcagaaaggatatatctaaaggtgctaaagcaagtataagtgcaataggcatagtcggaatggcagtgctcatttatttgtttgtagtggttagtgatcaagataaatggatatatagtggaggattttatgccatctcgttcttaacactgtttgtcattgcaagcgttgtgcatccatcaagtgttttaaagaaaatactaagtttcaagttatttatttatataggtaagagatcgtatagtttatatttatggcactatcctatcattatttttatgaatagttatttcgtacaaggtcagattccttggtttgtatatatttgtgaagtgatacttatgtttgtcatggctgaagtatcttataaatttatcgaaacacctattagaaaaaatggatttaaagcattcacggtgataccgaaaaatttaacaagattttcaagaacgattattgtgttaatcttgcttgttccttctgcattcatagtatttggtgcctatgatagtttgggtaaagagcatgataaacaacaagctgcgaaacaaaaatcttttaaaacgaaccagaaagcaaaacctaaaaagccagatgaaaataatcaagataagtcttcacaacaacattttaatcctaaagaagcgtctccattattgctgggagattcagtaatggtagatatcggtcaagtctttagtgaaaaagtaccaaatgctaatattgatggaaaagttggccgacagttaattgagggtaaagatttaatcaatcaaaagtaccaagattatactaaaaaaggtcagagtgttgtgatagaacttggtac

SEQ ID NO: 950 - protein, 417 aa, Artificial Sequence
  Description of Artificial Sequence: synthetic amino acid sequence
MMFVVTVVLIYTLLFKPELIISIKHDAIAALFYVSNWWYIIQDVDYFNQFAVAPLKHLWSLAIEEQFYLFFPFILLGLLKFFKKRTTMIILLIISLLSLTAMITIHMYTGNNSRVYFGTDTRLQTLLLGCLLAFIWPPFSFRKDISKGAKASISAIGIVGMAVLIYLFVVVSDQDKWIYSGGFYAISFLTLFVIASVVHPSSVLKKILSFKLFIYIGKRSYSLYLWHYPIIIFMNSYFVQGQIPWFVYICEVILMFVMAEVSYKFIETPIRKNGFKAFTVIPKNLTRFSRTIIVLILLVPSAFIVFGAYDSLGKEHDKQQAAKQKSFKTNQKAKPKKPDENNQDKSSQQHFNPKEASPLLLGDSVMVDIGQVFSEKVPNANIDGKVGRQLIEGKDLINQKYQDYTKKGQSVVIELGT

SEQ ID NO: 951 - DNA, 432 bp, Artificial Sequence
  Description of Artificial Sequence: synthetic nucleic acid sequence
atgaagaatatggtaatcttgaataagcaaaaaaggatgatcagaatgaaaaaagcaatatttagtattattatttctcttattttagttctaactgctactggatgtagtaatagttctaaagaaaaaccaattaaaaaaagtgcattagaaattaatcctacaagtaaagctgttaatattacagtaaataaaaaagaaaataacaaacctgaaaaaattgggaaagtgtatcgatataaaaataacaatgcaaaagaaattactaacgacggtattaaaaaagatactaaagatacattgatttggaaaggtgtagcaaacaaatacgataatgtaaaagatttattaggagaaagtattctttatgaagttaaatataaaaatggggatataaaaaaattcgagagaaaaattaaatatactgaataa

SEQ ID NO: 952 - protein, 143 aa, Artificial Sequence
  Description of Artificial Sequence: synthetic amino acid sequence
MKNMVILNKQKRMIRMKKAIFSIIISLILVLTATGCSNSSKEKPIKKSALEINPTSKAVNITVNKKENNKPEKIGKVYRYKNNNAKEITNDGIKKDTKDTLIWKGVANKYDNVKDLLGESILYEVKYKNGDIKKFERKIKYTE

SEQ ID NO: 953 - DNA, 750 bp, Artificial Sequence
  Description of Artificial Sequence: synthetic nucleic acid sequence
atgaaaaagttaatgatgagcttattatgttgcacaatatgtggaacagttttaactacaggaagtgtaaatgcacaaggtgatagctcaactaactctgagtcgttaaaggaacttcaaaatgaaggtattgtgtctaaatcaattactgaacaacaatggcaacaaatgaaagctcaagagcgtaaagatgaagcagaatttgagaaaacagctgaagtacaatggcagaaacaacaaaaacaagatcgaatagatcgagaaaatcgttcaagaaaaaagaaatttcatttgaaaaaaggtgattttttcatcacaaataacgtaagttcaaaagggtttacaggtcatgctgcaatatatactggaaaaggaaaagttaaagaagcgcctggatatggacaacctgtgagggtaaaaagttttagtgattggaaaaagagtactttgaaaaaaagaaaaggaagtcccaaacatcgttatatcaaggtttatcgagcaccaaaaaaatatagaggtaaagctggaaactatgcgaaatctcattttaacggtgtaccttacagtataacgacgaatccatattctaaaagcgttacatactgttcgaaacttgtttggcaatcgtattattatggtgccggacgattatcagttcttccggttgttacatctcaatttattattgagccatatagtctcaataaatatattccatcaaaagcagttaggtcttataaaagaagctaa

SEQ ID NO: 954 - protein, 249 aa, Artificial Sequence
  Description of Artificial Sequence: synthetic amino acid sequence
MKKLMMSLLCCTICGTVLTTGSVNAQGDSSTNSESLKELQNEGIVSKSITEQQWQQMKAQERKDEAEFEKTAEVQWQKQQKQDRIDRENRSRKKKFHLKKGDFFITNNVSSKGFTGHAAIYTGKGKVKEAPGYGQPVRVKSFSDWKKSTLKKRKGSPKHRYIKVYRAPKKYRGKAGNYAKSHFNGVPYSITTNPYSKSVTYCSKLVWQSYYYGAGRLSVLPVVTSQFIIEPYSLNKYIPSKAVRSYKRS

SEQ ID NO: 955 - DNA, 678 bp, Artificial Sequence
  Description of Artificial Sequence: synthetic nucleic acid sequence
gtgggcattttagtatcggggtcagggatagcgagtgtacaaacaaatataactcacgcaaaagaaagtcacgattcaactcctcaaaatattaaattagtgggaacgtatgatacttctcaagttgattccaaaacgatgaaacaatttaaagaaatagaaaaagaagataataatttccacataactaaacatggaaataaagtcgttgtagaagacaaattacctaatccagagaataaaacttcaagttattcagctgatggtagtgctgaaaataatacaaaagtaattaatttctctgattttgttggtaatatggatgggaaagatgatggaaaaatatcggatgggataaccttttatagtggtaaatcatataacggacaacacgatggtcaaaaagtaaaaaaagggactcatgtacattgtaatagatttaacggaacaaaatctgatcatagatactggtcaaaaaaacatcctagagcttatgtagatttttataaaagtgattgctggtatcacgccaaagcttataaatgttcttccttgggaaaaatgactaaatgcgatggtttgaatagtatttatagaaaaggtgtcaaagattgctcatcatggaaaggtaaacccaaacataaaaactggcctaaaacagcatggtatagaaattaa

SEQ ID NO: 956 - protein, 225 aa, Artificial Sequence
  Description of Artificial Sequence: synthetic amino acid sequence
VGILVSGSGIASVQTNITHAKESHDSTPQNIKLVGTYDTSQVDSKTMKQFKEIEKEDNNFHITKHGNKVVVEDKLPNPENKTSSYSADGSAENNTKVINFSDFVGNMDGKDDGKISDGITFYSGKSYNGQHDGQKVKKGTHVHCNRFNGTKSDHRYWSKKHPRAYVDFYKSDCWYHAKAYKCSSLGKMTKCDGLNSIYRKGVKDCSSWKGKPKHKNWPKTAWYRN

SEQ ID NO: 957 - DNA, 363 bp, Artificial Sequence
  Description of Artificial Sequence: synthetic nucleic acid sequence
atgaataaaatcttaaaaatattaataacttctattattgttatcattattaccttaacagtttggacttttagtgtgattacttatcagaaacacaagagtgagaaaatcatcaatcacgttatagaacgtaagggttgggataaaaaaataaaaaatgaaaaaatgagttttaatattataatgggatatgctgaaaaagatattgtttttaaagatcaaccatatagtgagtatgagtataacgtgacaccagcaccatggacagatgataaagaatataaggtgtggggggaaacagatttacaaaagaaagactcctattataaatatcttttagaatcagaaccttacagaaaataa

SEQ ID NO: 958 - protein, 120 aa, Artificial Sequence
  Description of Artificial Sequence: synthetic amino acid sequence
MNKILKILITSIIVIIITLTVWTFSVITYQKHKSEKIINHVIERKGWDKKIKNEKMSFNIIMGYAEKDIVFKDQPYSEYEYNVTPAPWTDDKEYKVWGETDLQKKDSYYKYLLESEPYRK

SEQ ID NO: 959 - DNA, 1388 bp, Artificial Sequence
  Description of Artificial Sequence: synthetic nucleic acid sequence
atgtataacataataaaaaatagagatcattcatggacttctagtaagattcaaggtagaaatacagatggtggattagaatggtcaccagatcataaatcacttatttataaatatgatgcaacattaggtagacaaataaatactaatgacgtgttaactttacttcaagcaacagctaaaaactcaaatttacgttcaaatatcaatagtaatgaaaaacagttagcagaacgagggtctaatgggtattctaaatctataattagagatgatggcgagaaatcttatttacttaactcaaatcctattcaagtattagacttagtagaaccagataatggttacggtggacgtcaagtcagtcattctaacgttatatataatgaaaaaaattcttctatcgtaaatggtcaagttccagaagctaatggggcatccgcttttaatattgataaagttgttaaagctaatgcggcaaataatggtattatgggtgttatctataaggcacaattatacttagcaccatacagtccaaaaggttacattgaaaaattaggccaaaatttaagcaataccaataacgtgattaatgtttattttgtgccttctgataaagtaaatcctagtataactgtaggtaattacgaccatcatacggtatattctggtgaaacatttaaaaatactatcaatgtaaatgataattatggattaaatacagtagcttctacaagtgatagtgcaattactatgaccagaaacaacaacgagttagtaggtcaggctcctaatgttactaatagcacaaataaaattgtaaaagttaaagccacagataaaagtggaaatgaaagtattgtttctttcacagtaaatataaaaccattaaacgagaaatatagaataacaacttcatcaagtaatcaaacaccagtgagaattagtaatattcaaaacaatgctaacctttcaattgaagatcaaaatagagtaaaatcttcactcagcatgactaaaattttaggtacaagaaattatgtcaatgagtcaaataatgacgttcgtagtcaggttgtaagtaaagtaaatagaagtgggaacaatgctacagttaatgttacaactacattttctgatggtacaactaatacaataaccgttccagttaaacatgtgttattagaagttgtacctactactagaacaacagtaagaggacaacaatttccaaccggcaaaggaacttccccaaatgatttctttagtttaagaacgggaggtccagttgatgcgagaatagtttgggttaataatcagggacccgatataaatagtaatcaaattggtagagatttaacattacacgctgaaatattctttga

SEQ ID NO: 960 - protein, 463 aa, Artificial Sequence
  Description of Artificial Sequence: synthetic amino acid sequence
  MOD_RES (463): variable amino acid
MYNIIKNRDHSWTSSKIQGRNTDGGLEWSPDHKSLIYKYDATLGRQINTNDVLTLLQATAKNSNLRSNINSNEKQLAERGSNGYSKSIIRDDGEKSYLLNSNPIQVLDLVEPDNGYGGRQVSHSNVIYNEKNSSIVNGQVPEANGASAFNIDKVVKANAANNGIMGVIYKAQLYLAPYSPKGYIEKLGQNLSNTNNVINVYFVPSDKVNPSITVGNYDHHTVYSGETFKNTINVNDNYGLNTVASTSDSAITMTRNNNELVGQAPNVTNSTNKIVKVKATDKSGNESIVSFTVNIKPLNEKYRITTSSSNQTPVRISNIQNNANLSIEDQNRVKSSLSMTKILGTRNYVNESNNDVRSQVVSKVNRSGNNATVNVTTTFSDGTTNTITVPVKHVLLEVVPTTRTTVRGQQFPTGKGTSPNDFFSLRTGGPVDARIVWVNNQGPDINSNQIGRDLTLHAEIFFX

SEQ ID NO: 961 - DNA, 396 bp, Artificial Sequence
  Description of Artificial Sequence: synthetic nucleic acid sequence
atgcaaagaaaatacaaaattataggtattatttttatcgttcttcttattgttttaacattaatttttagtatagtgcatcattatgctaatgttcaaaaacatgaagaagctaaactaagacaaaaagttcaccatattttcaaacaaaaaggttgggaagataaagttaaagaagaaaaaaatatatttacgttcaatactggggataatgatttacaagtcacttttaaagatgagccttataatacgtatacatactctattgatgaaaacaataaagtatatggacatgctgttttgaaagatgaatatgataaagattttgatagtaaaaaaaagtacaaagaatatttaagaaaaatgcattttgaagaaaaatatgatctgaaataa

SEQ ID NO: 962 - protein, 131 aa, Artificial Sequence
  Description of Artificial Sequence: synthetic amino acid sequence
MQRKYKIIGIIFIVLLIVLTLIFSIVHHYANVQKHEEAKLRQKVHHIFKQKGWEDKVKEEKNIFTFNTGDNDLQVTFKDEPYNTYTYSIDENNKVYGHAVLKDEYDKDFDSKKKYKEYLRKMHFEEKYDLK

SEQ ID NO: 963 - DNA, 357 bp, Artificial Sequence
  Description of Artificial Sequence: synthetic nucleic acid sequence
atgataaagttactttcagtttttattgcaagtttattagttttaaccggattatctttttcttcaattaatcaaggtaatactgcgagtgctaaaacaaaatataaaacaactataacttacaaaggtcaaaaatatgtatatgttggtcattataaacaccatttttctaaaaaagtagttaaattttctaaaggagttcattcaggaaacaaattagtatctgctgctagtaaacttagtaaaaatggttatgttaaagcatcctcggctatttataaagcctttgattttggattgaaaaatgaattaaaaggtagctatttttacacagcagctaaaaaggtacaggcgtaa

SEQ ID NO: 964 - protein, 118 aa, Artificial Sequence
  Description of Artificial Sequence: synthetic amino acid sequence
MIKLLSVFIASLLVLTGLSFSSINQGNTASAKTKYKTTITYKGQKYVYVGHYKHHFSKKVVKFSKGVHSGNKLVSAASKLSKNGYVKASSAIYKAFDFGLKNELKGSYFYTAAKKVQA

SEQ ID NO: 965 - DNA, 660 bp, Artificial Sequence
  Description of Artificial Sequence: synthetic nucleic acid sequence
atgtcacaatcgacacaccaatcaactgatcataaaagacaatctcaagataagaaccaaacacatgcctatgcaaaagtttggttatattttatgtattattggatgatttttgggattggttgttattttggacaatatcttcctatgtcatggagaaaaccattgtctctaggattgttaattctgatattagcaacgttgtttattaaacgtgcgcgaaaatatggattagtgatctctcatatatacgctattattgtaggtttgctttcgtatgctctttttacgacttacttacaaaatttaggagcagaagtattctataaaaatattattcttgctattggtgcatttatagcttttggtattataggttactttttaataaaagacgcttcgagtatgggaaaatatttgtttgtgacattaattgcgctaattatagctgggattatagggatatttattaataatccaatttttcatactgtcattacaatagtgagcttattattgtttctcctttatactttatacgattttaatagaatgaaaagaggtcaattctcaccaagagaaatgggatttaatttgtttatcaacttattaaatatcatcgaagatatacttagtttagcaaatcgctttaaaaactaa

SEQ ID NO: 966 - protein, 219 aa, Artificial Sequence
  Description of Artificial Sequence: synthetic amino acid sequence
MSQSTHQSTDHKRQSQDKNQTHAYAKVWLYFMYYWMIFGIGCYFGQYLPMSWRKPLSLGLLILILATLFIKRARKYGLVISHIYAIIVGLLSYALFTTYLQNLGAEVFYKNIILAIGAFIAFGIIGYFLIKDASSMGKYLFVTLIALIIAGIIGIFINNPIFHTVITIVSLLLFLLYTLYDFNRMKRGQFSPREMGFNLFINLLNIIEDILSLANRFKN

SEQ ID NO: 967 - DNA, 2175 bp, Artificial Sequence
  Description of Artificial Sequence: synthetic nucleic acid sequence
atggcaaattcttgtttgcatatactttcaaaaaaagaatatacggcaacacgatgtcaagacggcattttattattttggcctatcgaagggagtatgcactttcaacaatttatgaaagaaaggatactctcagatgagttatatattgtgaataatatggatgtgtttagtatcagtgacaatggcatcacactagaagtatatatttctagtgattggtttacagagttaggctattctttttttaattaccattatatttcggatttaatacaatctaagaaagaaattaaagaactagttgctcaacttacgttgaattttttagataatgatgtggataaagagcaagatattatcaataaaattgttcatattcttgctaatgaggctattattgacaaaaaaattgctgaagaccaatatatgtatgattattatggtgagttaaaggatgaattgaattatatatataatcacatcgaagaaagacttactctaaaagatatttccaataaattatatgtttctaagtccaacctttctacgcagtttcatttgttattaggtatgggatttaaaaaatatatagatacacttaaaattagtaaatctatagagatgctacttacgacaactaaaacgataagccaaattagtgaaacgttaggatttagtaatgtatctacatattctagacaattcaaaaattatttaagtgtaacgcccaatgcatatcgtgcaatgaaaaaatatgataagtacaatggatgttctgatgatgatgtttcagaacacttaaaatcatgtgtacaatcattaatatgttctaaaatgccaacgaatgagttagataattatgatgaaattgttattgaccaatatccaatttctaatgtttcaacgttttattctgtcgttcaaattaattcaattgatgaaattaaaatgttgtttttgcaaggtattcataaaaaaatagggtatgaaggttcaaatattattttttgtattatgcctaacttatgccaatataagaatttgttctctcaagaagagatgaatgatatcattaaaattattattgaatatcgcttgcacgtcgcatttagcatcgataaaatcgagcaaatatatgaacttaatcaactttttacatatcaatatgaaaacttaaaaattatgaataaatgttctgtttcagattacaatgtgcaatttatatttaatttgaacgaaaaaagtattcgagaaatttatcgtaatatcttgaagatacaaaacatcgaattggaatataaaataggtttagatattagttgcatgtttaatgacactgcacaatttaaatcattagcttcgcaaataaagcgtttaaaatttgactatctttatattgataatgctagattaaagtcaccctatttacttgataatgaggaaggtttattactcaaaaatattctacaatttaagcatttaatagatgatttaaagcagtttgattttagtagtgaaaatttaatttttctaaatttatataatcatcaattactgaataataatgaaattgatttaagtaatagcgctccattactatttaaaacgatttcaaaactaaaaaaacattttaaaggctacggattaaatgtattttcaaatcctaaagtctttaacgctgtacatttatttgatgagaatgggtttaaaacaacgtttggactgatttttaatcatttgagttggatgactaatcaaaaccaaattgaacaacgattctataatattattgaaaatgctgatcaatattatctctacttatatgattggcgtgtgattgaaagtgaatctaatgagagcgactttaaagacgttgatatatggattaactttgaagatgaagcgttaatagatgaatatatttgtgtgattgctaaagttgatgatgaaggtggcaatattaatcatatgatttctcaaaacttacgtcacaaatatgtttggtctacaccgttcttgatgagagttgaggagaactttagaccatacatgcacattatggaacatgactttaaaaagggcccattgaaaatcagaatgaaatataatgcagtatatgtagttgaaatatataaaaaagataaaataaataaaaggcgtagcacaacttaa

SEQ ID NO: 968 - protein, 724 aa, Artificial Sequence
  Description of Artificial Sequence: synthetic amino acid sequence
MANSCLHILSKKEYTATRCQDGILLFWPIEGSMHFQQFMKERILSDELYIVNNMDVFSISDNGITLEVYISSDWFTELGYSFFNYHYISDLIQSKKEIKELVAQLTLNFLDNDVDKEQDIINKIVHILANEAIIDKKIAEDQYMYDYYGELKDELNYIYNHIEERLTLKDISNKLYVSKSNLSTQFHLLLGMGFKKYIDTLKISKSIEMLLTTTKTISQISETLGFSNVSTYSRQFKNYLSVTPNAYRAMKKYDKYNGCSDDDVSEHLKSCVQSLICSKMPTNELDNYDEIVIDQYPISNVSTFYSVVQINSIDEIKMLFLQGIHKKIGYEGSNIIFCIMPNLCQYKNLFSQEEMNDIIKIIIEYRLHVAFSIDKIEQIYELNQLFTYQYENLKIMNKCSVSDYNVQFIFNLNEKSIREIYRNILKIQNIELEYKIGLDISCMFNDTAQFKSLASQIKRLKFDYLYIDNARLKSPYLLDNEEGLLLKNILQFKHLIDDLKQFDFSSENLIFLNLYNHQLLNNNEIDLSNSAPLLFKTISKLKKHFKGYGLNVFSNPKVFNAVHLFDENGFKTTFGLIFNHLSWMTNQNQIEQRFYNIIENADQYYLYLYDWRVIESESNESDFKDVDIWINFEDEALIDEYICVIAKVDDEGGNINHMISQNLRHKYVWSTPFLMRVEENFRPYMHIMEHDFKKGPLKIRMKYNAVYVVEIYKKDKINKRRSTT

SEQ ID NO: 969 - DNA, 687 bp, Artificial Sequence
  Description of Artificial Sequence: synthetic nucleic acid sequence
atggatctaattcaattaaaaacaagacctgttgttataagacgagaattgtttgatcattattcagagttaggtttggatgaacaagatttagttattttgataaaacttttatatgcatctgaaacttctaataagcaaccttctattgaatttcttcaaaaaggatcaactatggaacctcgtcaaattacttccgtaatacaaaacttaattcaaagagaattattagaactcaatgttagtaaagacgaagaaggtaaattcactgaatacatgaatttggatcccttctatcacaaattaaatcaattattaaaacatcaatacttaaaacatgaggaacaagataaaaaagagcagtttaagcaattgtttcagatagttgagcaatcgttcggcagaccactatcgccgtatgaaattgaaacattaaatcagtggattgatgtcgatcaccatgacttatcagttatacaagccgctcttgatgaggcacttagccaaaataaacttagttttaaatatattgatcgtattttattaaattggaaaaagaataatgtgaaaacagttgacgattcaaagaaaataagagaacagtttaacaaaccaaaaatgaaacatgttgttaaaaaggtgcctaaatttgactggttgaatggagagaatcctaatgataagtaa

SEQ ID NO: 970 - protein, 228 aa, Artificial Sequence
  Description of Artificial Sequence: synthetic amino acid sequence
MDLIQLKTRPVVIRRELFDHYSELGLDEQDLVILIKLLYASETSNKQPSIEFLQKGSTMEPRQITSVIQNLIQRELLELNVSKDEEGKFTEYMNLDPFYHKLNQLLKHQYLKHEEQDKKEQFKQLFQIVEQSFGRPLSPYEIETLNQWIDVDHHDLSVIQAALDEALSQNKLSFKYIDRILLNWKKNNVKTVDDSKKIREQFNKPKMKHVVKKVPKFDWLNGENPNDK

SEQ ID NO: 971 - DNA, 633 bp, Artificial Sequence
  Description of Artificial Sequence: synthetic nucleic acid sequence
atgattgacgttatagcagatatgtttcctaatgcagaatgcgaattaaaccatagaaatgcattcgatcttacaatagctgtattattatcagcacagtgtactgataatctagtcaatcgtgtcactcaatcattatttagaaaatatcgaacacctgaagattatttaaatgtgagtgatgaagaattacaaaatgatatacgctctattggattatatcgcaataaagccaaaaatataaaaaaattatgccactctttaattgaacaatttaatggtcaaatcccacaaacacataaagaattagagagtctagctggagtggggcgtaaaacagcaaatgttgtaatgagtgtcgcatttggagaaccttctttagctgtcgatactcatgttgagagagtttctaaacgtttgggaattaatcgttggaaagatagtgtaagacaagtagaagatcgattatgtgatattatcccaagagatagatggaataaaagccatcatcaattaatattttttgggagatatcattgtcttgctagaaaacctaaatgtgagatatgtccgctgttaaatgattgtagagaaggacaaaaacgacataaagcaaagataaaggaggcgtga

SEQ ID NO: 972 - protein, 210 aa, Artificial Sequence
  Description of Artificial Sequence: synthetic amino acid sequence
MIDVIADMFPNAECELNHRNAFDLTIAVLLSAQCTDNLVNRVTQSLFRKYRTPEDYLNVSDEELQNDIRSIGLYRNKAKNIKKLCHSLIEQFNGQIPQTHKELESLAGVGRKTANVVMSVAFGEPSLAVDTHVERVSKRLGINRWKDSVRQVEDRLCDIIPRDRWNKSHHQLIFFGRYHCLARKPKCEICPLLNDCREGQKRHKAKIKEA

SEQ ID NO: 973 - DNA, 333 bp, Artificial Sequence
  Description of Artificial Sequence: synthetic nucleic acid sequence
atgattgaaaaacaggatttcaatcatatagaggaccaacttgatcaactagcaagtaataaacaactcaaaacaccagaagctagggaacttttagatagttatttcgatttaattattaattattttaaacaaataaataacatagatgaaattcattttaatcaactcgatacatatccagtagttccaatgaattttgatgaacgctatcattatatggttgcacgtaaacaccattttatgggctatcgtcaaatgaaaacattgaaatcagaattaataaaaatgaatgcatcttatctaattagaaagcaacgtcaacaaaaataa

SEQ ID NO: 974 - protein, 110 aa, Artificial Sequence
  Description of Artificial Sequence: synthetic amino acid sequence
MIEKQDFNHIEDQLDQLASNKQLKTPEARELLDSYFDLIINYFKQINNIDEIHFNQLDTYPVVPMNFDERYHYMVARKHHFMGYRQMKTLKSELIKMNASYLIRKQRQQK

SEQ ID NO: 975 - DNA, 957 bp, Artificial Sequence
  Description of Artificial Sequence: synthetic nucleic acid sequence
atgctcaaacgtacaattaaattcatactttatttaatcgtaagttcgtttattatcttcattttagttgagaagacatctggtaatccagcgattctgtatctacaacgtcatggttatacgtcgattacgcaagacaatattgaagcggcacaacatcaacttggcttaggacaacatgtgttactaagatatatcgattgggttggacatgcactcacgggcaacttaggatacggctttagtacgaacgaagcagttaccgctatgataatggaagccatcgtgccgacgcttgtgctaatcattgtctctagttgtatcatgttgccatttggctatattgttggttacttcgttgggacgcgtccgcatacacgttacgctaatggaattcgtggattcgcccaagtgatgacctcaatgccagaatactggttagctattttattcatttattatttaggcgtacgttggcaattgttaccatttgtaggtagtgattcatggcaacactttgtgctgccaatcttcacaattgttgttatagaagggtgtcatatcttattgatgacagcacatctgattacacaaacgttagatcaagatgcgtatcaactggcgcagttaagacatttttcgttaaaagcgcgtatcatcgtacaaattaaagagatatttgcaccactaatgacgatttcaattaacagtatcattcatttaattggaaaagccgtaatactagaagtcatcttcagcatgtctggtataggtaaattgttgattaatgctattaaccaacgagattatccactgattcagggcattgtcatctttatcattgtctttattatgctaatgaattatttaggcgatgtgattattttgaagaatgaacctagacttcgacgacgtcatacccagcagtcaggcaatgagaaaagaggtacgatgtga

SEQ ID NO: 976 - protein, 318 aa, Artificial Sequence
  Description of Artificial Sequence: synthetic amino acid sequence
MLKRTIKFILYLIVSSFIIFILVEKTSGNPAILYLQRHGYTSITQDNIEAAQHQLGLGQHVLLRYIDWVGHALTGNLGYGFSTNEAVTAMIMEAIVPTLVLIIVSSCIMLPFGYIVGYFVGTRPHTRYANGIRGFAQVMTSMPEYWLAILFIYYLGVRWQLLPFVGSDSWQHFVLPIFTIVVIEGCHILLMTAHLITQTLDQDAYQLAQLRHFSLKARIIVQIKEIFAPLMTISINSIIHLIGKAVILEVIFSMSGIGKLLINAINQRDYPLIQGIVIFIIVFIMLMNYLGDVIILKNEPRLRRRHTQQSGNEKRGTM

SEQ ID NO: 977 - DNA, 720 bp, Artificial Sequence
  Description of Artificial Sequence: synthetic nucleic acid sequence
atggttgtattaattacgtatggtttaatgcaagacacgcaacatttgaacccacttgagtcacctaatggacaacattggttgggtaccgatcaattaggcagagacttcttagtaagactgattgtcggtagtcttgtcacattgagtttaacaggcatagtgattctattaagcgtttgtatgggacttatctttggcttaattgcaggcatagaaagacgatggttagatcaaatcatcatgtttgttgccgatatgttgctggctattccgtcatttattatcgcattagtcatcttaagtttagtaagtaactccatgataggtttgatacttgctttaacgattggatggataggacgttatttacgttacttcagaaatttaacgcgagatattcaaaaacgtccatttgttcaatatgcacgattgagtgggaactcaacattcaaaacgacagtaacacatgtgattccacatttattaagtagtatattcgctttggtaacggctgactttggcaaaatgatgctcagcatatctggacttgcttttctaggactaggtattaaaccgccgacgcctgagttaggaacaattctttttgatgggaaaagttatttcaacggcgcaccgtggctcttcttcttccctggtgtattgttaggaggtttcgccttattatgtcaaattatcaacaaaaaaataacgcagtaa

SEQ ID NO: 978 - protein, 239 aa, Artificial Sequence
  Description of Artificial Sequence: synthetic amino acid sequence
MVVLITYGLMQDTQHLNPLESPNGQHWLGTDQLGRDFLVRLIVGSLVTLSLTGIVILLSVCMGLIFGLIAGIERRWLDQIIMFVADMLLAIPSFIIALVILSLVSNSMIGLILALTIGWIGRYLRYFRNLTRDIQKRPFVQYARLSGNSTFKTTVTHVIPHLLSSIFALVTADFGKMMLSISGLAFLGLGIKPPTPELGTILFDGKSYFNGAPWLFFFPGVLLGGFALLCQIINKKITQ

SEQ ID NO: 979 - DNA, 582 bp, Artificial Sequence
  Description of Artificial Sequence: synthetic nucleic acid sequence
atgaaacaatcacaattatgttatcaaggagatattgacatcgatttaactcaaacagatgcagtgtttcaagatgttcaaagtaatatgtttcaaaatataacattagctaagcatttccaatacatttatgaagccaatcgcacacatctcactaaacagcgtattaaggaagatgtcttacagatgatgcaattacttggtttaagacaaggggaacaattgcttgagcgttatcccttcgaacttagtggaggtatggcacaacgtgtcgcctttataatgtcattaattagacgtccgaactacttatttttagatgaaccaacgagtgcacttgatcaagaaaatattaaaaagtttatgcattaccttcttagggcacaggagcgctaccaaatgaccattgtttttatcacacatgatattaacttagtgaaagattgtgccacacatattagtattatgcagcaaggtaaattgatagaaaatggtgaggccgcgtcgatcttaactaagccgacacataattacacgaaaaaattaattacgattgcacatcggagacaaccttatgcttaa

SEQ ID NO: 980 - protein, 193 aa, Artificial Sequence
  Description of Artificial Sequence: synthetic amino acid sequence
MKQSQLCYQGDIDIDLTQTDAVFQDVQSNMFQNITLAKHFQYIYEANRTHLTKQRIKEDVLQMMQLLGLRQGEQLLERYPFELSGGMAQRVAFIMSLIRRPNYLFLDEPTSALDQENIKKFMHYLLRAQERYQMTIVFITHDINLVKDCATHISIMQQGKLIENGEAASILTKPTHNYTKKLITIAHRRQPYA

SEQ ID NO: 981 - DNA, 786 bp, Artificial Sequence; identical to SEQ ID NO: 583
  Description of Artificial Sequence: synthetic nucleic acid sequence

SEQ ID NO: 982 - protein, 261 aa, Artificial Sequence; identical to SEQ ID NO: 584
  Description of Artificial Sequence: synthetic amino acid sequence

SEQ ID NO: 983 - DNA, 969 bp, Artificial Sequence; identical to SEQ ID NO: 585
  Description of Artificial Sequence: synthetic nucleic acid sequence

SEQ ID NO: 984 - protein, 322 aa, Artificial Sequence; identical to SEQ ID NO: 586
  Description of Artificial Sequence: synthetic amino acid sequence

SEQ ID NO: 985 - DNA, 504 bp, Artificial Sequence; identical to SEQ ID NO: 807
  Description of Artificial Sequence: synthetic nucleic acid sequence

SEQ ID NO: 986 - protein, 167 aa, Artificial Sequence; identical to SEQ ID NO: 808
  Description of Artificial Sequence: synthetic amino acid sequence

SEQ ID NO: 987 - DNA, 321 bp, Artificial Sequence
  Description of Artificial Sequence: synthetic nucleic acid sequence
atgacaggaagaacgaataatacgaataaccacgcccaagttgaactggcagtacgtcgatcacgttcaaggaaaatgatgacaaatgccaatactacgttagttataaacccaactactaacaatatagttaaaatagtacccaaaaatccaaaattcattactaaatactcctattcagtctttcaccaagaaaatttagccgccgatttactgaactatgcttccgttaccaatgttaaaatagcattaaagtcctcgtcattatgcggaaatgcacgttcttcgatttgtttaatagtaatgtttaataatttgtaa

SEQ ID NO: 988 - protein, 106 aa, Artificial Sequence
  Description of Artificial Sequence: synthetic amino acid sequence
MTGRTNNTNNHAQVELAVRRSRSRKMMTNANTTLVINPTTNNIVKIVPKNPKFITKYSYSVFHQENLAADLLNYASVTNVKIALKSSSLCGNARSSICLIVMFNNL

SEQ ID NO: 989 - DNA, 597 bp, Artificial Sequence
  Description of Artificial Sequence: synthetic nucleic acid sequence
atgtggaggtatgcgcattggaagaattggttaaaattgactgtttcatcagtctatattattagtttagttttaacacttttatttcaagttagtctattaaatgagaataaaacaaatcaaatagaacatgcatcaactatgaaagaaaagtctaatataaataatgtaaaaacaactaaaaataaaaatatggaaaaatcaacgcagacagacaaacaaaactctgtgaacttaaagcaaaacacaaaagatcaaaataataacgcaaatgatgaagcagcttctccaactagcgaacaaaatgcagctatagcacaagcaaagtcatatgcaaatacattacctatctctaagaaaagtttatacaaacaattaacttcggaatacggagagaaatatccggcagacatagcacagtatgctgttgaccatatcagtgtagattataaaatgaatgcactgagattagcaaaaagttacgtaaaaaatataaacatttctaatcaagcgttatatgatcaactcgtttcagaaaatggagaaggatttactcctgaagaagcacaatatgcaatgaatcatttagataggtaa

SEQ ID NO: 990 - protein, 198 aa, Artificial Sequence
  Description of Artificial Sequence: synthetic amino acid sequence
MWRYAHWKNWLKLTVSSVYIISLVLTLLFQVSLLNENKTNQIEHASTMKEKSNINNVKTTKNKNMEKSTQTDKQNSVNLKQNTKDQNNNANDEAASPTSEQNAAIAQAKSYANTLPISKKSLYKQLTSEYGEKYPADIAQYAVDHISVDYKMNALRLAKSYVKNINISNQALYDQLVSENGEGFTPEEAQYAMNHLDR

SEQ ID NO: 991 - DNA, 690 bp, Artificial Sequence
  Description of Artificial Sequence: synthetic nucleic acid sequence
atgattaaccttaaccaaagattatcaattgtatgctcatttattaaaagaggaacattggctgatattggctcagaccacgcatatctacctatatatgcaattcaaaacgacttatgcacaaaagcaatagcgggagaagtgattcaaggaccttataaggctgctaaaagaaatattgcaaattatgaattaaatcaacaggttgatgtacgtctaggcgatggtctaagcgttataaacacagaagaccaaattgataatataactgtttgtggtatgggagggccattaattgcaaaaatattaaacgatggaaaagataaattagttaaccatccaagactcatactacaaagcaacatacaaactcaagcattaagacaaactcttaataaactttcatatgaaatcgttgatgaaagaatcattgaggaaaagggtcacatatatgaaatcgtggtagctgagtttaataataacttagttaaattaaatatattacaagaaaaattcggaccatttttacttagagaatgtaataacatttttcaaaaaaaatggcaaagagagttagaagcactgcgtgatataaaatcccaattgaattcaacatcacatcatgagagactaaaagaaatagaagatgaaattaacttaatacaagaggtgttaattaatgaaaattag

SEQ ID NO: 992 - protein, 229 aa, Artificial Sequence
  Description of Artificial Sequence: synthetic amino acid sequence
MINLNQRLSIVCSFIKRGTLADIGSDHAYLPIYAIQNDLCTKAIAGEVIQGPYKAAKRNIANYELNQQVDVRLGDGLSVINTEDQIDNITVCGMGGPLIAKILNDGKDKLVNHPRLILQSNIQTQALRQTLNKLSYEIVDERIIEEKGHIYEIVVAEFNNNLVKLNILQEKFGPFLLRECNNIFQKKWQRELEALRDIKSQLNSTSHHERLKEIEDEINLIQEVLINEN

SEQ ID NO: 993 - DNA, 735 bp, Artificial Sequence
  Description of Artificial Sequence: synthetic nucleic acid sequence
atgattaatacaaatagctcatattattacaaagttcaaacttttatacctaaaaattatattgaagatttcaaagacagtttaaacgaacttggattagctaaagaaggtaattacgaatattgtttctttgaaagtgaaggtaaagggcaatttaaaccagtaggtgatgcaagtccttatatagggaagttagatagtatcgaatatgttgatgaaataaaacttgagtttatgataaaagacaatgaattagaaataactaaacgtgctattttagataatcacccatacgaaacaccagtttttgattttattaaaatgaacaaagaaagtgagtatggattagggattattggacaattaaaccaaactatgactttagatgaattttctgaatatgccaaaaaacagctcaatataccgagcgtacgatatacaggtcaacatgatagtccaattaagaaagtagctatcataggtggttcaggtataggatttgagtataaagctagccaacttggagcagatgtttttgttactggtgatattaaacaccatgatgctttagatgctaaaatccaaaatgtaaatttattagacatcaatcattatagtgagtatgttatgaaagaaggattaaaagaattattagaaaaatggttatttaaatatgaaaatcaatttccaatatatgcttctgaaatcaacacagatccatttaaatataaataa

SEQ ID NO: 994 - protein, 244 aa, Artificial Sequence
  Description of Artificial Sequence: synthetic amino acid sequence
MINTNSSYYYKVQTFIPKNYIEDFKDSLNELGLAKEGNYEYCFFESEGKGQFKPVGDASPYIGKLDSIEYVDEIKLEFMIKDNELEITKRAILDNHPYETPVFDFIKMNKESEYGLGIIGQLNQTMTLDEFSEYAKKQLNIPSVRYTGQHDSPIKKVAIIGGSGIGFEYKASQLGADVFVTGDIKHHDALDAKIQNVNLLDINHYSEYVMKEGLKELLEKWLFKYENQFPIYASEINTDPFKYK

SEQ ID NO: 995 - DNA, 1347 bp, Artificial Sequence
  Description of Artificial Sequence: synthetic nucleic acid sequence
atgtcaaaacatccatttgaacactttaatttagatgagaatttaattgaagctgttaaaaatctcaattttgaaaaaccgactgaaatccaaaatagaatcataccgagaattcttaaaggaacaaatttaataggacaatctcaaactggaactggaaagtcacacgcttttcttttaccattaattcaacttatagaaagtgacattcaagagccacaagccatcgtagtagctccaacacgtgaacttgctcagcaactatatcaagttgctatgcatttagtaaaattcaaaaaaggtataaatgtaaaacttttcattggtggtaccgatttagaaaaagataaacaacgatgtagccatcaaccacaactcattattggtacaccaacaagaattaatgatttagcacattcaggttatcttcatgcacatttagcgtcatatttaattatagatgaagctgatttaatgattgacctcggtctcattgaagatgttgaccatattgcagcgagattagatgatgaaaatgctcatctagcggtatttagtgcaacaatacctaaatcattacaaccatttttaaataaatatttaagtcaaccagaatttgtagaagttgatggcaaagctcataataaagaaaatatcgaattttatctaattcctacaaaaggttctgctaaggtagataaaacattggaattgatagatatattgaatccttatctatgtattattttctgtaacagtcgtgaaaatgccgatgaattggcagacactttaaataaagaaggaattaaaataggtatgattcatggtggtttaacaccaagagaacgtaaacaacaaatgaaaagaataagaaatttagattttcaatttgtcattgcaagcgatcttgcttctagaggaatagatattgaaggcgtaagtcatgttattaatttcgatgtacccaatgatatcgatttcttcacacatcgcgtaggtcgaacaggaagaggtaattataaaggtgtagccattacattatatagtcctgatgaagaaagtaatattactcttattgaagacagaggttataaatttgaaaatgtagatattaagaatggtgaattaaaaccgataaaggcatacaatatgcgtaaatcaagacagcgcaaagatgaccatttaacaaatgaagttaaacacaaagtaagaagtaaatcaaaacgtaaagttaaaccaggctataaaaagaagtttaaacaagaagttgaaaaaatgaaacgtcaagaaagaaagcagtatagtaaaaagcaaaatagacaaaaacgaaaaaataataaaggatag

SEQ ID NO: 996 - protein, 448 aa, Artificial Sequence
  Description of Artificial Sequence: synthetic amino acid sequence
MSKHPFEHFNLDENLIEAVKNLNFEKPTEIQNRIIPRILKGTNLIGQSQTGTGKSHAFLLPLIQLIESDIQEPQAIVVAPTRELAQQLYQVAMHLVKFKKGINVKLFIGGTDLEKDKQRCSHQPQLIIGTPTRINDLAHSGYLHAHLASYLIIDEADLMIDLGLIEDVDHIAARLDDENAHLAVFSATIPKSLQPFLNKYLSQPEFVEVDGKAHNKENIEFYLIPTKGSAKVDKTLELIDILNPYLCIIFCNSRENADELADTLNKEGIKIGMIHGGLTPRERKQQMKRIRNLDFQFVIASDLASRGIDIEGVSHVINFDVPNDIDFFTHRVGRTGRGNYKGVAITLYSPDEESNITLIEDRGYKFENVDIKNGELKPIKAYNMRKSRQRKDDHLTNEVKHKVRSKSKRKVKPGYKKKFKQEVEKMKRQERKQYSKKQNRQKRKNNKG

SEQ ID NO: 997 - DNA, 711 bp, Artificial Sequence
  Description of Artificial Sequence: synthetic nucleic acid sequence
gtgacattaggtggtatttcctttggtatgtttttgcttaccattattcccgttttctcagtaataaaccctatgtggtttggtattctttttgctgttattggagcgttattaattgaaaaattaaggacttcgttttctaattatcaagaaattgcaattcctattataatgagcgctggtattgctctaagtgctatttttatttctctagcagatggttttaatcaagaaatcgtagacctactatttggatcaattagtgcagtaaatattagtgatttaactacaattattatcattacaataattgttctcatatttattgttttattttataaagaattgtttattttatcatttgacgaagaatatagtaaggtcataggtataccaaagtggattcaatttttatttatagtaattgttgctatggtaatatctgcatcaatgagagttgtaggtatattattagtaagcgcgttaataactcttcctatagcaatttcaatgagaataactaaaggatttaaacaattaatagcattaagtgttatattaggagaattatctgtaattctaggattaattatagctttttatatgaatatatcacctggtggcgtcattgttgtactattggtattaatgctcatactaacgatgattattcagaagttaaaaattaagtttaaaaagggagtcgtttaa

SEQ ID NO: 998 - protein, 236 aa, Artificial Sequence
  Description of Artificial Sequence: synthetic amino acid sequence
VTLGGISFGMFLLTIIPVFSVINPMWFGILFAVIGALLIEKLRTSFSNYQEIAIPIIMSAGIALSAIFISLADGFNQEIVDLLFGSISAVNISDLTTIIIITIIVLIFIVLFYKELFILSFDEEYSKVIGIPKWIQFLFIVIVAMVISASMRVVGILLVSALITLPIAISMRITKGFKQLIALSVILGELSVILGLIIAFYMNISPGGVIVVLLVLMLILTMIIQKLKIKFKKGVV

SEQ ID NO: 999 - DNA, 1325 bp, Artificial Sequence
  Description of Artificial Sequence: synthetic nucleic acid sequence
atgaattttggatttttgggtactattttaactatattgttagtagttgggtttataactaacgtagtattggcatttgtcatcattttccttgaacgtgatcgacgtactgccagttcaacttgggcgtggttattcgtattattcgttcttcctgtcattggatttattttgtatctatttttaggacgaacggtttccaagaaaaagatggaaaaaaataacggtgatgaattacatgcatttgaagatttagttcaagaccaaatcgacagttttgataaacataattatggttatatcaatgatcaagtcattaaacaccgtgatttaatacgtatgttgttaatgaaacaagatgcctttttaacagaaaataataaaatcgatttatttacagatggtcataagctttatgaaaaagtacttgaggatatttacaatgctcaagactatatacatctagagtactatacctttgaacttgatggattaggtaaaagaatcttagatgcacttgaaactaaacttaaagaaggtttagaagttaaacttttgtatgacgatgttggttctaaaaaggttagattatcaaaatttaaacatttcagagcattaggtggagaagttgaagcatttttcccttcgaaagtacctttaatcaatttcagaatgaataatcgaaatcatagaaagattatcattatagatggacaaattggttacgttggcggttttaatgtcggcgatgattatttaggattaggtaagttaggttactggagagatacacatacacgtgttcaaggtgaatgcatcgatgcactacaattaagatttattttagactggaattcacagtcgcatcgtccacaatttaaatttgatcaaaaatatttccctaaaaaaaatggggacaaaggaaacgcggctattcaaatcgcttctagtggacctgcatttgatttacatcaaatagaatatggttatacaaaaatgataatgagcgctaaaaagtctatctatctacaaagcccttactttattccagaccaatcatacattaatgcattaaaaatggctgctaatagcggcgttgaagtaaaccttatgataccgtgtaaacctgatcatccattcgtttattgggctacattttcaaatgcagctgatttattggatagcggagttaatatttacacttatcaaaatggatttattcattctaaaatattaatgattgatgatgaaatttcttcaattggtagtgcaaacatggactttagaagctttgaactgaatttcgaagtgaatgcatttatata

SEQ ID NO: 1000 - protein, 442 aa, Artificial Sequence
  Description of Artificial Sequence: synthetic amino acid sequence
  MOD_RES (442): variable amino acid
MNFGFLGTILTILLVVGFITNVVLAFVIIFLERDRRTASSTWAWLFVLFVLPVIGFILYLFLGRTVSKKKMEKNNGDELHAFEDLVQDQIDSFDKHNYGYINDQVIKHRDLIRMLLMKQDAFLTENNKIDLFTDGHKLYEKVLEDIYNAQDYIHLEYYTFELDGLGKRILDALETKLKEGLEVKLLYDDVGSKKVRLSKFKHFRALGGEVEAFFPSKVPLINFRMNNRNHRKIIIIDGQIGYVGGFNVGDDYLGLGKLGYWRDTHTRVQGECIDALQLRFILDWNSQSHRPQFKFDQKYFPKKNGDKGNAAIQIASSGPAFDLHQIEYGYTKMIMSAKKSIYLQSPYFIPDQSYINALKMAANSGVEVNLMIPCKPDHPFVYWATFSNAADLLDSGVNIYTYQNGFIHSKILMIDDEISSIGSANMDFRSFELNFEVNAFIX

SEQ ID NO: 1001 - DNA, 675 bp, Artificial Sequence
  Description of Artificial Sequence: synthetic nucleic acid sequence
atgttgattatttttactgctttaatgattattgctaatttttactatatattttttgaaaaaattggctttttactagtactcctattaggatgtgtacttgtatatgtagggtatgtgtattttcataaagtaagaggactactatctttttggataggaaccttattaattgcttttacacttttgtctaataagtacacgataattattctatttatatttttaatagtagtcatcatacgttatttggtttataagtttagacctttaaaagtgattgctacagatgaagaaatcacatcacccatttttattaagcaaaaatggtttggtgaacaacatacaccagtgtatgtatataaatgggaagacgtacagattcaacacggtataggagacatacacattgatatgacaaaagcggcaaatattaaggaaacaaataccatagttgtgcgtcatattttaggtaaagtacaagtagttgtacctcttaattataatataaatttacatgcgactctcttctacggcactgcttatgtgaacgataaatcttataagattgagaataaccatgttcaaattgaagaaaaaacgaaagatgataattatactgttaatgtttacgtttcatcattcattggagacgtagaggtgatttacagatga

SEQ ID NO: 1002 - protein, 224 aa, Artificial Sequence
  Description of Artificial Sequence: synthetic amino acid sequence
MLIIFTALMIIANFYYIFFEKIGFLLVLLLGCVLVYVGYVYFHKVRGLLSFWIGTLLIAFTLLSNKYTIIILFIFLIVVIIRYLVYKFRPLKVIATDEEITSPIFIKQKWFGEQHTPVYVYKWEDVQIQHGIGDIHIDMTKAANIKETNTIVVRHILGKVQVVVPLNYNINLHATLFYGTAYVNDKSYKIENNHVQIEEKTKDDNYTVNVYVSSFIGDVEVIYR

SEQ ID NO: 1003 - DNA, 1017 bp, Artificial Sequence
  Description of Artificial Sequence: synthetic nucleic acid sequence
atgcttatattagtatatagtatgcttattgcttttttatttattgataaagtgtttgtaaatattatcttttttcaggggatgttttatacacaaatatttggaatacctgtttttctatttttaaatttattaattgttcttttatgtattatagttggatctgttttagcttataaaattaatcaacaaaatgattggattatttcacaaatagaaagatcaatagaaggacaaacagtaggtatcaatgatcaaaatatcgaattatatacagaaacgatagatatttatcatacactagttccattaaatcaagaattacatcgacttagaatgaagactcaaaatttaactaatgaaaactacaatattaatgatgtaaaagtcaaaaagattatcgaagatgagcgacaacgacttgccagggaattacatgattctgttagtcaacaattatttgctgcgagcatgatgctatcggcgataaaagagtcgaaattagaaccacctttaaatcaacagataccaattcttgaaaaaatggttcaagactcacaacttgaaatgagagctttgttattacatttaagaccgataggtttaaaagataagtctttaggtgaaggaattaaagatttagtcatcgatttacaaaagaaagtaccaatgaaagttgtgcatgaaattcaagattttgaagtgccaaaaggcattgaagatcacttgttcagaattacacaagaagctatttcaaatacattgagacattcaaatggtacaaaagtaactgtggaattatttaatcaagaggattatcttttactaagaattcaagataatggaaaagggtttaatgtagatgaaaaatttgaacaaagttatggtttgaaaaatatgcgagaacgagcgttagaaattggtgcgacgtttcatattgtatctttacctgattcaggtacacgaattgaagttaaggcaccattgaataaggaggagaattcaagtggcgattaa

SEQ ID NO: 1004 - protein, 338 aa, Artificial Sequence
  Description of Artificial Sequence: synthetic amino acid sequence
MLILVYSMLIAFLFIDKVFVNIIFFQGMFYTQIFGIPVFLFLNLLIVLLCIIVGSVLAYKINQQNDWIISQIERSIEGQTVGINDQNIELYTETIDIYHTLVPLNQELHRLRMKTQNLTNENYNINDVKVKKIIEDERQRLARELHDSVSQQLFAASMMLSAIKESKLEPPLNQQIPILEKMVQDSQLEMRALLLHLRPIGLKDKSLGEGIKDLVIDLQKKVPMKVVHEIQDFEVPKGIEDHLFRITQEAISNTLRHSNGTKVTVELFNQEDYLLLRIQDNGKGFNVDEKFEQSYGLKNMRERALEIGATFHIVSLPDSGTRIEVKAPLNKEENSSGD

SEQ ID NO: 1005 - DNA, 471 bp, Artificial Sequence
  Description of Artificial Sequence: synthetic nucleic acid sequence
atggatttacttatggacgatatggatggtgtagaagcaactactgaaataaaaaaagatttacctcaaattaaagtagtcatgttaacaagctttatagaggataaagaagtttatcgtgcacttgattctggagtagatagttatattttaaagacaacaagtgcaagtgatatagctgacgctgtgcgtaaaacgtatgaaggtgaatcagtatttgaaccagaagtgttagtaaaaatgcgcaatcgtatgaaaaaacgtgccgagctttatgaaatgttgacagaaagagaaatggagatcctattacttatagctaaaggatactctaaccaagagattgcaagcgcctctcatatcaccatcaaaacagtaaaaactcatgtaagtaacatactaagtaaattagaagtacaagatcgaacacaagcagtaatatatgcgttccagcataatttaattcaataa

SEQ ID NO: 1006 - protein, 156 aa, Artificial Sequence
  Description of Artificial Sequence: synthetic amino acid sequence
MDLLMDDMDGVEATTEIKKDLPQIKVVMLTSFIEDKEVYRALDSGVDSYILKTTSASDIADAVRKTYEGESVFEPEVLVKMRNRMKKRAELYEMLTEREMEILLLIAKGYSNQEIASASHITIKTVKTHVSNILSKLEVQDRTQAVIYAFQHNLIQ

SEQ ID NO: 1007 - DNA, 1179 bp, Artificial Sequence
  Description of Artificial Sequence: synthetic nucleic acid sequence
atgtcaaaaaaagagaaaacaacttctaaatatcttaattcaatagaagataaagagcataaaaagaataaaaaaatagaagttgaccgtacatatatagaacctcaagaattccaatctaagaaacctaaaaaaaagaatcaagtattttttgtttcccggctgaataaaccagcaaaatacaccgaaaactctaatttcttttcttacctgatttataggataggtaaagatgacgctgcaggtttagcagcacagatgacatatcattttgtattagcacttttcccaatgctaatttttttacttacgctacttggtcaatttatcacgattgatgctaatcagattaatcaaaaagtaagtcaatatgtccctgatcaagaaacagctagcatcgttggtggaattgttaaagatatctctgacactgccagtggaggtattttgtcagttgggttaattttagctatttggtcagcatcaaatggaatgtccgctattattaactcatttaatgttgcttatgacgttgaggattctcgaaacggtgtagtagttaaattattaagtattctatatacacttgttttaggtgcagtatttgttgttgctgtagtacttataacactaggtccagtcattaataaatttttatttggaccactaggtattgataatcaaattgaatggatttttaatttagtacgaattgttattccattgattattattttcatcatatttactgtactttattcagttgcacctaatgttaaaacaaaattacgttctgttattcctggcgctattttcacttccattatttggttactagggtcctttgcattcggttactatatttcaaactttagtaactattcgaaaacatacggaagtttagctggtattatcattttattcttatggttgtatatcacaagctttattattattatcggtgctgaaatcaatgcaattattcaccaaagaaaagtcatagctggtcacacgcctgaagaagccgctattaaacatgatgataacaatgaaaatcactataacgaaaatacgacttatgaatactatgaagatagcaaagatgtagatatctctaatgaagatgacacgtataatatcaatcatcaatctaaagaagaacatcacacaagcgactga

SEQ ID NO: 1008 - protein, 392 aa, Artificial Sequence
  Description of Artificial Sequence: synthetic amino acid sequence
MSKKEKTTSKYLNSIEDKEHKKNKKIEVDRTYIEPQEFQSKKPKKKNQVFFVSRLNKPAKYTENSNFFSYLIYRIGKDDAAGLAAQMTYHFVLALFPMLIFLLTLLGQFITIDANQINQKVSQYVPDQETASIVGGIVKDISDTASGGILSVGLILAIWSASNGMSAIINSFNVAYDVEDSRNGVVVKLLSILYTLVLGAVFVVAVVLITLGPVINKFLFGPLGIDNQIEWIFNLVRIVIPLIIIFIIFTVLYSVAPNVKTKLRSVIPGAIFTSIIWLLGSFAFGYYISNFSNYSKTYGSLAGIIILFLWLYITSFIIIIGAEINAIIHQRKVIAGHTPEEAAIKHDDNNENHYNENTTYEYYEDSKDVDISNEDDTYNINHQSKEEHHTSD

SEQ ID NO: 1009 - DNA, 489 bp, Artificial Sequence
  Description of Artificial Sequence: synthetic nucleic acid sequence
atgccaaaagtacatcaagttaaggaaagatttgtgaaattaggggaccaacagtttaaagcatttgaaattagatacgatacatacattcattacgtgttgatgtgtgatggtgtagatttagcaatgaaacagcgcgtggaagattttgtcagtgcgcaaacatggcatcaacaatttaaaacgattggcgtcatgctttttcaacaagataaacaattcatatatccactgatacatatacctaaaatagatagcttaatctgggaaaatagctgtggttcaggagcggcttctatcggtgtgttagttaattatctaacagatcatgatattcaagattacctagttaaccaacccggaggcagtattattgtctcatccagaaagtctggacaaaatgaataccaaacaacgattaagtgtcaagtttcaactgtcgcaacaggacaagcatatatagaacaggagacaatgacgcaaatatga

SEQ ID NO: 1010 - protein, 162 aa, Artificial Sequence
  Description of Artificial Sequence: synthetic amino acid sequence
MPKVHQVKERFVKLGDQQFKAFEIRYDTYIHYVLMCDGVDLAMKQRVEDFVSAQTWHQQFKTIGVMLFQQDKQFIYPLIHIPKIDSLIWENSCGSGAASIGVLVNYLTDHDIQDYLVNQPGGSIIVSSRKSGQNEYQTTIKCQVSTVATGQAYIEQETMTQI

SEQ ID NO: 1011 - DNA, 1278 bp, Artificial Sequence
  Description of Artificial Sequence: synthetic nucleic acid sequence
atggttggtagtggaccggtcgctattcaacttgctcgactatgtcatttacatggagaacatatagttgatatggtgagtcgcgttcatgcatcaaccaaatctaagagagtctttgatgcttatcaacgtgacggctttttttcagtaatgactcaaaatgatgcacatcagtgtttttcaggtaagtttacggttagacatttttttaaagatgttaaagatattactgaatattatgacgtggtgattttagcatgtactgccgatgcgtatcgaccgatattacagcaattatctaagtccacattaaagcgtattaagcaaatcatcttggtctcaccaacattaggatcacatatgcttgttaagcaattactatcagatgttcaatgtgaaggtgaagtgatttcattttccacttatctaggcgatacccgaatatttgataaagcacaaccacattgtgtcctaaccacacgagttaaatcaaaattattcgtaggttcgactcaatctcagtctatgacgttgtgtaagcttaagtctttatttgactatttgaatatagaattaacaacgatggacacaccactacatgcggagatacataatagttcactttatgtacacccaccattgtttatgaatcaattttcattaaaggcggtatttgaagggacgaaagtaccagtatatgtatataagctatttccagagggtccaatcacaatgaccttaatacacgaaatgcgattaatgtggcaagaaatgatgatgatattaaaaaaattaaaggtaccttcggtcaatcttctaaagtttatggtgaaagaaaactaccctatacgttatgagaccatgcgcgaagtagatattgaaaactttaaaaatttaccagctattcatcaagagtatctactttatgtgcgatatacagcaattttaatcgatccgttttctaatccggacgatcaaggtgcatattttgatttttctgccgtaccatacaaacatgttgatactgatgaacaaggagtcatacatataccacgcatgccgagtgaagattattatcgtactttgataattcaagcgattggaagagcattaaacgttgcaacaccgatgattgacacattgttattacgttatgaaaatactgttaaacaatactgtgacacacatttacatcaacaactatcaaggcaattcgaattacatcattttaaacaggatttagcgttagtgacgaactacttaactttttataaataa

SEQ ID NO: 1012 - protein, 425 aa, Artificial Sequence
  Description of Artificial Sequence: synthetic amino acid sequence
MVGSGPVAIQLARLCHLHGEHIVDMVSRVHASTKSKRVFDAYQRDGFFSVMTQNDAHQCFSGKFTVRHFFKDVKDITEYYDVVILACTADAYRPILQQLSKSTLKRIKQIILVSPTLGSHMLVKQLLSDVQCEGEVISFSTYLGDTRIFDKAQPHCVLTTRVKSKLFVGSTQSQSMTLCKLKSLFDYLNIELTTMDTPLHAEIHNSSLYVHPPLFMNQFSLKAVFEGTKVPVYVYKLFPEGPITMTLIHEMRLMWQEMMMILKKLKVPSVNLLKFMVKENYPIRYETMREVDIENFKNLPAIHQEYLLYVRYTAILIDPFSNPDDQGAYFDFSAVPYKHVDTDEQGVIHIPRMPSEDYYRTLIIQAIGRALNVATPMIDTLLLRYENTVKQYCDTHLHQQLSRQFELHHFKQDLALVTNYLTFYK

SEQ ID NO: 1013 - DNA, 1232 bp, Artificial Sequence
  Description of Artificial Sequence: synthetic nucleic acid sequence
atgaataaactcacaaaactaagtacagtcatttttgtatctggaattattttagccggttgtggaaataacaaagaactaacagagaaaaaagagaataaagtattatcatatacaactgtcaaagatattggagatatgaatccccatgtttatggaggttcaatgtcagcagaaagtatgatttatgagccgttagttcgcaataccaaggatggtattaagccattattagcaaaaaaatgggacatttcacctgatggtaagacatatacgtttcatttaagggatgatgtatcttttcatgatggtacgaaatttgatgcagatgcagtgaagaaaaacatcgatgcagtacaacaaaataagaaactacattcatggttaagactttcaacactgattgatgatgtcaaagttaaggataagtatacgatacaactacatttgaaggaagcttatcaacctgcgttagcagaactagctatgccacgaccatacgtttttgtatcgcctaaagattttaaacacggcacaaccaaagatggtgtgaaatcatttgacggtacaggaccatttaaaatgggtgaacacaaaaaagatatatctgcagagtttaataaaaataatcaatattggggagaaaaggcaaaattaaataaagtagaagcaaaagttaaacctgcaggagaaacaacatttttatcaatgaaaaaaggagaaaccaactttgcttatacagatgatagaggtacagacagcttagataaagatagtttaaaacaattaaaagaaaccggaagctaccaagtaaaacgtagccaggctatgaatacaaaaatgcttgttgttaattctggtaagaaagatagtgcagtcagtgataaagcagtcagacaagcattaggtcacatggtaaatagagataaaatagctcaagatattttagacaaacaagaaaagccagccacacaactatttgctaaaaatgtgacagatataaactttaatttaccaacaagaacatatgataagaaaaaagcgcaagcgttattagacaaggctggatgggtgctttcaaaagatcgacaagttcgtcaaaaagagggcaaagatttgaatcttaagttgtattatgacaaagggtcttccagtcaaaaagaacaagctgaattcttagaagcagaatttaagaagttaggtgtacaactagatataaacggagaaacgtt

SEQ ID NO: 1014 - protein, 411 aa, Artificial Sequence
  Description of Artificial Sequence: synthetic amino acid sequence
  MOD_RES (411): variable amino acid
MNKLTKLSTVIFVSGIILAGCGNNKELTEKKENKVLSYTTVKDIGDMNPHVYGGSMSAESMIYEPLVRNTKDGIKPLLAKKWDISPDGKTYTFHLRDDVSFHDGTKFDADAVKKNIDAVQQNKKLHSWLRLSTLIDDVKVKDKYTIQLHLKEAYQPALAELAMPRPYVFVSPKDFKHGTTKDGVKSFDGTGPFKMGEHKKDISAEFNKNNQYWGEKAKLNKVEAKVKPAGETTFLSMKKGETNFAYTDDRGTDSLDKDSLKQLKETGSYQVKRSQAMNTKMLVVNSGKKDSAVSDKAVRQALGHMVNRDKIAQDILDKQEKPATQLFAKNVTDINFNLPTRTYDKKKAQALLDKAGWVLSKDRQVRQKEGKDLNLKLYYDKGSSSQKEQAEFLEAEFKKLGVQLDINGETX

SEQ ID NO: 1015 - DNA, 522 bp, Artificial Sequence
  Description of Artificial Sequence: synthetic nucleic acid sequence
atgtcaaaaatcttaaacacacaattaactggtatttttaatcggcttgaaaaacaagagttggatattcaaatggcagctcaatgtctcattcaagcaattggtggagaaggacatgtctatatcaaaggctacgatgatttaaaattctatgagtcattcatattacaaagccatgaaaaattagcgtctagcttaccacttgaagatttacaaaattttaacgatatagatacaacagatagggtactgttattttcaccatactacacttcggaagttgaaagtgatgtacttcaacttattgatttagatgtcgatttagtgcttatttgtaataaccctaaacgagatgattttcctaatcatttaattcattatgttaatttatcaacacctaggcccattgtttacacagaagattatgataaaatcattcaaccacatccgatggccttaaattatatttattatgatatttatactcaaatgattgagatgactagagacctagatttatag

SEQ ID NO: 1016 - protein, 173 aa, Artificial Sequence
  Description of Artificial Sequence: synthetic amino acid sequence
MSKILNTQLTGIFNRLEKQELDIQMAAQCLIQAIGGEGHVYIKGYDDLKFYESFILQSHEKLASSLPLEDLQNFNDIDTTDRVLLFSPYYTSEVESDVLQLIDLDVDLVLICNNPKRDDFPNHLIHYVNLSTPRPIVYTEDYDKIIQPHPMALNYIYYDIYTQMIEMTRDLDL

SEQ ID NO: 1017 - DNA, 432 bp, Artificial Sequence
  Description of Artificial Sequence: synthetic nucleic acid sequence
atgatacaaggtttaggctatttattgtccaatataacagattataaagaattaacgaatttagctcaaaatggagatcgtgatgccattgatttaaaagtaaaacatatttataaagatactgaaccaccaattcctggagatttaacagcagcaaattttggaaatgtattacatcacttagataatcagtttacatcagctaacaaacttgcctctgcaattggcgtcgttggtgaagttataacaactatggctattacattagcacgtgaatataagactaagcacgttgtatatatcggttcatcatttaataacaatcaattactacgtgaagttgttgaaaattacactgttctaagaggatttaaaccgtactatattgagaatggtgctttttcaggcgctttaggagcactttacctctaa

SEQ ID NO: 1018 - protein, 143 aa, Artificial Sequence
  Description of Artificial Sequence: synthetic amino acid sequence
MIQGLGYLLSNITDYKELTNLAQNGDRDAIDLKVKHIYKDTEPPIPGDLTAANFGNVLHHLDNQFTSANKLASAIGVVGEVITTMAITLAREYKTKHVVYIGSSFNNNQLLREVVENYTVLRGFKPYYIENGAFSGALGALYL

SEQ ID NO: 1019 - DNA, 861 bp, Artificial Sequence
  Description of Artificial Sequence: synthetic nucleic acid sequence
atgtttataaaaaaggattttgatgatattacagttcaagtatttgaagaaaaatatagagatgcacttaaccaatttgaattaagtgaacgacaacaaatatattcttcattgcctcaaactgttttagatgatgcattaaaagatgaaaatcgaattgctaatgtagctttaaataaagaaggaaaagtagtggggttcttcgttttgcatcgttattatcaacatgaaggttatgatacaccaaacaatgttgtttatgtacgttcattgtcagttaatgaaaagtttcaaggccatggatatgggacaaaaatgatgatgtttttaccagagtatgttcaagcattatttcctgattttacacatttatacttagtagtagacgctgaaaaccaaagtgcttggaacgtttatgaacgtgcaggttttatgcatacagctacaaaagaagaaggacctattgggaaagaaagactttattatttagatttagattcaaaacatgtatcttctttaaggctaaaagagggggaagtcacatataatgatgatattcacgtgattaatttgcttaaagatgatgtaaaggtaggctttattgcactagaacaaaatgataataaaatgaatatttctgcaatcgaagttaataagaaaaataggaatgagggaattgcagaaagtgctttacgccaattaccaacgtatatacgtaaacagtttgaagacattgaagttttatcaattactttatatggcgaacgtaatgaattaaaaccattgtgcttgaatagtaattttgtagcaatagaggaaactgaggattatacacgttttgaaaaatatattaattattaa

SEQ ID NO: 1020 - protein, 286 aa, Artificial Sequence
  Description of Artificial Sequence: synthetic amino acid sequence
MFIKKDFDDITVQVFEEKYRDALNQFELSERQQIYSSLPQTVLDDALKDENRIANVALNKEGKVVGFFVLHRYYQHEGYDTPNNVVYVRSLSVNEKFQGHGYGTKMMMFLPEYVQALFPDFTHLYLVVDAENQSAWNVYERAGFMHTATKEEGPIGKERLYYLDLDSKHVSSLRLKEGEVTYNDDIHVINLLKDDVKVGFIALEQNDNKMNISAIEVNKKNRNEGIAESALRQLPTYIRKQFEDIEVLSITLYGERNELKPLCLNSNFVAIEETEDYTRFEKYINY

SEQ ID NO: 1021 - DNA, 537 bp, Artificial Sequence
  Description of Artificial Sequence: synthetic nucleic acid sequence
atgaaaattcaagattacacaaaagaaatggttgatgagaaatcattcatcgatatggcctatactttattaaatgataaacaaacaacgatgaatttatatgatattattgatgaatttaaatctttaggcggatatgagtatgaagatattgaaaatcgaatcgtacaattctataccgatttaaacactgatggtcgttttttaaatgtaggagaaaatctttggggtctacgtgattggtactctgtagatgatattgaggaaaaaatcgcaccaacaattcaaaaattcgatattctagatgacgaagatgaagaagatcaaaaccttaaattattaggtgatgacgacgctgatgaagatgacgatattcctgctcaaacagatgatcaagaaacattagacgagtcagataatgatgaagatgatgttgaaatgaatgaagcagatatcgttattgatgaagacgaagacgaagatattgctgaaggtgaagaagaagcctttgaagacgccgaagactttaatgattaa

SEQ ID NO: 1022 - protein, 178 aa, Artificial Sequence
  Description of Artificial Sequence: synthetic amino acid sequence
MKIQDYTKEMVDEKSFIDMAYTLLNDKQTTMNLYDIIDEFKSLGGYEYEDIENRIVQFYTDLNTDGRFLNVGENLWGLRDWYSVDDIEEKIAPTIQKFDILDDEDEEDQNLKLLGDDDADEDDDIPAQTDDQETLDESDNDEDDVEMNEADIVIDEDEDEDIAEGEEEAFEDAEDFND

SEQ ID NO: 1023 - DNA, 1608 bp, Artificial Sequence
  Description of Artificial Sequence: synthetic nucleic acid sequence
atgacaaagtttatttttgtaacaggcggggttgtgtcatcattaggaaaaggaataacagccgcttctctaggaagattacttaaagatagaggacttaaagttacaatacaaaaattcgatccatatttaaatgtagacccaggcacaatgagtccgtatcaacatggtgaagtgttcgttacagacgatggtgctgagactgatttagacttaggacattatgaacgttttatagatattaatttaaataaatattcaaatgttactgccggaaaagtatattcacatgtgttgaaaaaagaacgccgtggtgattacttgggtggtactgtacaagttattccccatattacaaacgaaattaaagaaagattgctattagctggtgagagtactaatgcggatgttgtaattactgaaattggtggaacaacaggtgatatagagtctttacctttcttggaagccattcgtcaaattagaagcgacttaggtcgtgaaaatgtaatgtatgtacattgtactttgctaccatatattaaagctgctggggaaatgaaaacaaaacctacacagcacagtgttaaagaattacgaggtctaggtattcaacctgatttaatagtagtacgtacagaatacgaaatgacacaagatttgaaagacaaaatcgccctattttgtgatatcaaaaaggaaagtgttatagaatgtagagatgcagattctctttatgaaattccgttacaacttagtaagcaaaatatggacgacattgttattcaacgtttacaattaaatgccaagtatgaaacgcaattggatgagtggaaacatctattaaataccgttaataatttagatggtaaaattacaatcggtttagttggtaaatatgtgagcttacaagatgcttatctatcagttgttgaatcacttaagcatgctggttatccatttaaaaaagacgttgtggtaaaatggattgattcaagtgaggtcaatgatgataatgttgaggcttatttatccgacgttgatggtattttagttcctggtggatttggattcagagcaagtgaaggtaaaattgcagctattcgttatgcccgtgagaataacataccattctttggcatttgtctaggaatgcaattggcaactgttgaatttgcgcgtcatgttttaggctatgaaggtgcgcattcagcagaattagatccaagtacaccatatccaattatagatttattaccagaacaaaaagatattgaagatttaggtggaaccttaagacttggtctttatccttgccacattaaagaaggtacattggcagagaaaatttataataaaaacgatattgaagaacgtcatcgtcatagatatgaattcaataacgagtttagggaacaattagaaagtaacggtatggtattttcaggtacaagtccagatggtcgtttagtagaaattattgaaatacctaaaaatgatttctttattgcatgtcaattccatcctgaattcttatcaagacctaatcgtccacagcctatatttaaatcatttgtagaagcggcgttgaattaccaacaaaaataa

SEQ ID NO: 1024 - protein, 535 aa, Artificial Sequence
  Description of Artificial Sequence: synthetic amino acid sequence
MTKFIFVTGGVVSSLGKGITAASLGRLLKDRGLKVTIQKFDPYLNVDPGTMSPYQHGEVFVTDDGAETDLDLGHYERFIDINLNKYSNVTAGKVYSHVLKKERRGDYLGGTVQVIPHITNEIKERLLLAGESTNADVVITEIGGTTGDIESLPFLEAIRQIRSDLGRENVMYVHCTLLPYIKAAGEMKTKPTQHSVKELRGLGIQPDLIVVRTEYEMTQDLKDKIALFCDIKKESVIECRDADSLYEIPLQLSKQNMDDIVIQRLQLNAKYETQLDEWKHLLNTVNNLDGKITIGLVGKYVSLQDAYLSVVESLKHAGYPFKKDVVVKWIDSSEVNDDNVEAYLSDVDGILVPGGFGFRASEGKIAAIRYARENNIPFFGICLGMQLATVEFARHVLGYEGAHSAELDPSTPYPIIDLLPEQKDIEDLGGTLRLGLYPCHIKEGTLAEKIYNKNDIEERHRHRYEFNNEFREQLESNGMVFSGTSPDGRLVEIIEIPKNDFFIACQFHPEFLSRPNRPQPIFKSFVEAALNYQQK

SEQ ID NO: 1025 - DNA, 846 bp, Artificial Sequence
  Description of Artificial Sequence: synthetic nucleic acid sequence
atgaaagaaatgttaatcgatgcgaaagaaaacggttatgcggttggtcaatacaatcttaataacctcgaatttacacaagctattttagaagcgtctcaagaagagaatgcgccagttattttaggtgtttctgaaggggcagctcgttatatgagtggtttttatacagttgtgaaaatggtagaaggtttaatgcatgacttaaacatcacaatcccagtagcaattcatttagaccacggttcaagctttgaaaaatgtaaagaagcaattgatgctggattcacatctgtaatgattgatgcatctcatagtccttttgaagaaaatgttgaaatcacttctaaagtagttgagtatgctcatgatagaggcgtttctgtagaagctgaattaggtacagttggtggacaagaagacgacgtagttgctgatggcgttatctatgcagaccctaaagaatgtcaagaattagtagaaaaaactggaattgatactttagctccagcattaggttctgtacatggaccatataaaggtgaacctaaattaggatttaaagagatggaagaaattggtgcttcaactggattacctttagtattacacggtggtacaggtattccaactaaagatattcaaaaagctattccttatggtactgctaaaattaacgtgaatactgaaaatcaaattgcgtctgctaaagcagttcgtgaagtattaaacaacgacaaagatgtgtatgatccacgtaaatatttaggaccagcacgtgaagcaattaaagagacagttaaaggtaaaattagagaattcggtacttctaatcgcgctaaataa

SEQ ID NO: 1026 - protein, 281 aa, Artificial Sequence
  Description of Artificial Sequence: synthetic amino acid sequence
MKEMLIDAKENGYAVGQYNLNNLEFTQAILEASQEENAPVILGVSEGAARYMSGFYTVVKMVEGLMHDLNITIPVAIHLDHGSSFEKCKEAIDAGFTSVMIDASHSPFEENVEITSKVVEYAHDRGVSVEAELGTVGGQEDDVVADGVIYADPKECQELVEKTGIDTLAPALGSVHGPYKGEPKLGFKEMEEIGASTGLPLVLHGGTGIPTKDIQKAIPYGTAKINVNTENQIASAKAVREVLNNDKDVYDPRKYLGPAREAIKETVKGKIREFGTSNRAK

SEQ ID NO: 1027 - DNA, 318 bp, Artificial Sequence; identical to SEQ ID NO: 921
  Description of Artificial Sequence: synthetic nucleic acid sequence

SEQ ID NO: 1028 - protein, 105 aa, Artificial Sequence; identical to SEQ ID NO: 922
  Description of Artificial Sequence: synthetic amino acid sequence

SEQ ID NO: 1029 - DNA, 1491 bp, Artificial Sequence
  Description of Artificial Sequence: synthetic nucleic acid sequence
atggaacttgtagataaattatcaaatcgtcaatatattgatggagaatgggttgaaagttcaaataaaaacacaagagatattataaatccttacaatcaagaaacaatcttcactgtagctgaaggaactaaagaagatgttgaaagagcaattttagctgctagaagatctttcgaagacggtgaatggtcacttgaaacaagtgaagtcagaggtaaaaaagtgagagccgttgctgataaaattaaagaaaatagagaagagttagctaaattagaaacattagacactggtaaaactttagaagaatcctatgctgatatggatgatattcataatgtgtttatgtattttgctggtttagctgataaagatggcggtgaaattatcaattcacctattcctaatgctgaaagtaaagtagttaaagaacctgtaggtgttgttactcaaattacaccttggaactatccattacttcaagcatcttggaaaattgcgccagctttagcaacaggttgctcattagttatgaaaccaagtgaaattactccgttaacaacaattcgtgtatttgaattgatggaggaagttggtttccctaaaggaacaattaatttagtacttggtgctggatcagaagtgggcgacgtgatgtcaggtcatgaagaagtcgatttagtttcatttacaggtggtattgaaacaggaaaacacatcatgaaacaagcagctaatcacgtgactgacgttgcattagaattaggcggcaaaaatcctaatattatttttgatgacgctgattttgaattagctgtagaccaagcacttaatggtggatatttccacgctggtcaagtgtgctctgctggttcaagaatcttagttcacaatgatattaaagataaattcgaaaaagctcttatcgatcgtgtaagcaaaatcaaattaggtaacggttttgatcaagatactgaaatgggaccagttatctcaacagcacaccgcgataaaattgaaggttatatggaagttgcgaaaaaagatggagcaacaattgcaattggtggtaaacgccctgaacgtgaagacttacaagccggattattctttgaacctactgtaattacagattgtgatacatcaatgcgtattgttcaagaggaagtctttggaccagttgtgactgtagaaggatttgctgacgaagaagaagctattcgcttagcaaatgattcaatttacggtttagcaggtgctatatttactaaagatattggtaaagcacaacgtgttgcaaataaattgaaacttggtacggtttggattaacgatttccatccatactttgcacaagcgccatggggcggttacaaacaatcaggtatcggtagagaattaggtaaagaaggattagaggaatatttagtaagtaaacacattcttacaaatactaatccagaaccagtggattggttcagtaaataa

SEQ ID NO: 1030 - protein, 496 aa, Artificial Sequence
  Description of Artificial Sequence: synthetic amino acid sequence
MELVDKLSNRQYIDGEWVESSNKNTRDIINPYNQETIFTVAEGTKEDVERAILAARRSFEDGEWSLETSEVRGKKVRAVADKIKENREELAKLETLDTGKTLEESYADMDDIHNVFMYFAGLADKDGGEIINSPIPNAESKVVKEPVGVVTQITPWNYPLLQASWKIAPALATGCSLVMKPSEITPLTTIRVFELMEEVGFPKGTINLVLGAGSEVGDVMSGHEEVDLVSFTGGIETGKHIMKQAANHVTDVALELGGKNPNIIFDDADFELAVDQALNGGYFHAGQVCSAGSRILVHNDIKDKFEKALIDRVSKIKLGNGFDQDTEMGPVISTAHRDKIEGYMEVAKKDGATIAIGGKRPEREDLQAGLFFEPTVITDCDTSMRIVQEEVFGPVVTVEGFADEEEAIRLANDSIYGLAGAIFTKDIGKAQRVANKLKLGTVWINDFHPYFAQAPWGGYKQSGIGRELGKEGLEEYLVSKHILTNTNPEPVDWFSK

SEQ ID NO: 1031 - DNA, 759 bp, Artificial Sequence
  Description of Artificial Sequence: synthetic nucleic acid sequence
gtggcatattatgaagcatcgcaattaaaatcaacaggtcaattaaaagatattttaagtgaaacattacctgaatatatgatacctgtgcattttatgaaggtggatcgtatacctatcacgatgaatgggaaattagatgtgcgtgcattacctgaaattaatctaaagaataatagaaattatgtagaaccacgtaacgatattgaacgcacagtttgccgtattttcgaagagattttacatgttgatcaggtaggtgttaaagataatttctttgaactaggtggacactctcttagagcaacattagttgtaaaccgtattgaagaaaggttaaaaaaacgtcttaaagtaggtgatttaatgaaatcgcctactgtagagcaacttggacaacaaattgaagaactgcaaaatgatgtctatgaagtgattcccaaagcaaatgaatcgtatcaatatgatttaagtgcgtctcaaaaaagtatgtatcttttatggaaggtcaatcctaaagacacagtgtataacattccattcttatggagattatcttctgaacttaatgttatgcaattgcaacgtgcattatctaagttgattgaacgtcatgaaatattacgaacacaatatgtaattgatgacaatgaagttaaacaacgtattgcgacacatgtttcgcctgattttgaagaggtaaccgacatctctaacgaacgagcaagatattattcaatcatttatggaaccgtttga

SEQ ID NO: 1032 - protein, 252 aa, Artificial Sequence
  Description of Artificial Sequence: synthetic amino acid sequence
VAYYEASQLKSTGQLKDILSETLPEYMIPVHFMKVDRIPITMNGKLDVRALPEINLKNNRNYVEPRNDIERTVCRIFEEILHVDQVGVKDNFFELGGHSLRATLVVNRIEERLKKRLKVGDLMKSPTVEQLGQQIEELQNDVYEVIPKANESYQYDLSASQKSMYLLWKVNPKDTVYNIPFLWRLSSELNVMQLQRALSKLIERHEILRTQYVIDDNEVKQRIATHVSPDFEEVTDISNERARYYSIIYGTV

SEQ ID NO: 1033 - DNA, 705 bp, Artificial Sequence
  Description of Artificial Sequence: synthetic nucleic acid sequence
atgcgagttaaatatatacatggaccacaacaagattatttatttatggatactcatcatagtattaatgatggtatgagtaacacgattttactatctgatttgaacgctttataccaagataaatcattacctgaacttaagcttcagtataaagattatagtgagtggatggtgcacagagacttatctaaacaacgtcacttttggttacagcaatttgaaaatcaggttccaatattaaatatgcctacggattatcctagaccaagtattaaaacaaccaacggtaatatgttgacgtttcattacaatcgtcaaatcaaacagcaattgaaatcttatgtagaacaacatcaagtgacagactttatgttctttgctagtgcaatcatggtattattgcacaaatatacacgtcaggacgatatcgctattggtagtgtaatcagtgcgcgtactcatcgcgatactgaaaatatgttaggtatgtttgctaatacacttgtatatcgtggtcgaccacatgatcaaaagacatgggatcaattgatggctgagatgaaagagatgtgtctaggggcatatgaacatcaagaatatccttttgaaagcttagtcatctatgaatgggcctatttctccatccataacagcgtctactttaccagtttcttcattcgtacgatgatctttaatcattga

SEQ ID NO: 1034 - protein, 234 aa, Artificial Sequence
  Description of Artificial Sequence: synthetic amino acid sequence
MRVKYIHGPQQDYLFMDTHHSINDGMSNTILLSDLNALYQDKSLPELKLQYKDYSEWMVHRDLSKQRHFWLQQFENQVPILNMPTDYPRPSIKTTNGNMLTFHYNRQIKQQLKSYVEQHQVTDFMFFASAIMVLLHKYTRQDDIAIGSVISARTHRDTENMLGMFANTLVYRGRPHDQKTWDQLMAEMKEMCLGAYEHQEYPFESLVIYEWAYFSIHNSVYFTSFFIRTMIFNH

SEQ ID NO: 1035 - DNA, 2259 bp, Artificial Sequence
  Description of Artificial Sequence: synthetic nucleic acid sequence
atgggtggtattgctatacataaaggtgatattgcagaaatgagaacaggtgaagggaaaacattgactgcaaccatgccgacgtatttgaatgctttagctggtagaggtgtacatgttattacagtcaatgaatatctatcaagttcacaaagtgaagaaatggctgaactatataactatcttggcttaactgtaggtttgaacttaaatagtaagtcaactgaagaaaaacgtgaggcttacgcacaagatatcacttatagtacgaataatgaacttgggtttgattatcttagagataatatggtgaactatgctgaagagagagtaatgcgtcctctacattttgcaattattgatgaggtcgattccatattgatcgacgaagcaagaacacctttaattatttctggtgaagcggaaaaatctacttctttatatactcaagcaaatgtttttgcaaaaatgcttaaagcggaagatgattataattatgatgaaaaaaccaaagctgtacatcttacagaacaaggtgcagataaagctgaacgtatgttcaaagtagataatctttatgatgttcaaaatgtggaagtgattagtcatattaatacagctttaagagctcatgttactttgcaacgcgatgttgattacatggtcgttgacggtgaagtattaattgttgaccaatttactggacgtacaatgcctggacgtcgtttttctgaaggtttacaccaagcaattgaggctaaagaaggtgtagcaattcaaaatgagtctaaaacgatggcatccattactttccaaaactatttcagaatgtataataagttagcggggatgactggtacagcgaaaaccgaagaggaagaatttcgtaatatctataatatgacagttacccaaattccaacaaacaaacctgttcaacgtaaagataattcagacttaatttatattagtcaaaaaggaaagtttgatgcggtagttgaagatgttgtagaaaaacataaaaaaggacaacccgtcttactaggtactgttgctgttgagacttctgaatatatttcaaatttactaaaaaaacgtggtgtcagacatgacgtattaaacgctaaaaatcatgaacgcgaagctgaaatcgtttcaaacgcggggcaaaaaggtgcagttacaattgccacaaatatggctggacgtggaacagatattaaacttggtgatggtgttgaagagttaggtggacttgctgttattggtactgagcgtcatgaatcaagacgtattgatgatcaattacgtggacgttcaggacgccaaggtgatagaggagatagtcgtttttacctatctttacaagatgaattaatggtacgttttggttcagaacgcttacagaaaatgatgaaccgtttaggaatggatgattcaacgccaatcgagtcgaaaatggtatctcgagctgtagaatcagctcaaaaacgagtagaaggtaataactttgacgcgcgtaaacgtattctagaatacgatgaagttttacgtaagcaacgtgaaattatttataatgagcgtaatgaaatcattgatagtgaagaaagttctcaagtcgttaacgcgatgttacgttctacattgcaacgtgcgattaatcattttattaatgaagaagacgataatcctgactacacgccatttatcaattacgttaatgatgtgttcttgcaagaaggagatcttcaagatacagaaattaaaggtaaagattcagaagatatttttgaaattgtatggtctaaaattgaaaaagcatatgcacagcaacaagaaacattaggagaccaaatgagtgaatttgagcggatgattttattacgttcaattgatacacattggactgatcatattgatacgatggatcaattgcgtcaaggtattcatttacgttcatatgcacaacaaaatccacttcgtgattatcaaaatgaaggtcatgaattatttgatatcatgatgcaaaatatcgaggaagatacatgtaagtatatcttgaaatcagtggttcagtttgaagatgatgtagaacgtgaaaaatctaaaagctttggtgaagcaaaacatgtaactgctgaagatggcaaagaaaaagcaaagccccaaccgattgtaaaaggtgatcaggtaggtagaaatgatccatgcccatgtggtagtggtaaaaaatataaaaattgtcatgggaaagcgtaa

SEQ ID NO: 1036 - protein, 752 aa, Artificial Sequence
  Description of Artificial Sequence: synthetic amino acid sequence
MGGIAIHKGDIAEMRTGEGKTLTATMPTYLNALAGRGVHVITVNEYLSSSQSEEMAELYNYLGLTVGLNLNSKSTEEKREAYAQDITYSTNNELGFDYLRDNMVNYAEERVMRPLHFAIIDEVDSILIDEARTPLIISGEAEKSTSLYTQANVFAKMLKAEDDYNYDEKTKAVHLTEQGADKAERMFKVDNLYDVQNVEVISHINTALRAHVTLQRDVDYMVVDGEVLIVDQFTGRTMPGRRFSEGLHQAIEAKEGVAIQNESKTMASITFQNYFRMYNKLAGMTGTAKTEEEEFRNIYNMTVTQIPTNKPVQRKDNSDLIYISQKGKFDAVVEDVVEKHKKGQPVLLGTVAVETSEYISNLLKKRGVRHDVLNAKNHEREAEIVSNAGQKGAVTIATNMAGRGTDIKLGDGVEELGGLAVIGTERHESRRIDDQLRGRSGRQGDRGDSRFYLSLQDELMVRFGSERLQKMMNRLGMDDSTPIESKMVSRAVESAQKRVEGNNFDARKRILEYDEVLRKQREIIYNERNEIIDSEESSQVVNAMLRSTLQRAINHFINEEDDNPDYTPFINYVNDVFLQEGDLQDTEIKGKDSEDIFEIVWSKIEKAYAQQQETLGDQMSEFERMILLRSIDTHWTDHIDTMDQLRQGIHLRSYAQQNPLRDYQNEGHELFDIMMQNIEEDTCKYILKSVVQFEDDVEREKSKSFGEAKHVTAEDGKEKAKPQPIVKGDQVGRNDPCPCGSGKKYKNCHGKA

SEQ ID NO: 1037 - DNA, 648 bp, Artificial Sequence
  Description of Artificial Sequence: synthetic nucleic acid sequence
atgcttcttaggatgtatcaacgttactgtgaacaaaatggctttaaagttgaaacggttgattatcttccaggagatgaagcaggcgttaaaagtgtcacattacttattaaaggacataatgcttatggttatttaaaggcagaaaaaggtgttcatcgtttagttagaatttcacctttcgattcatctggtagacgccatacttcttttgcatcatgtgatgttattcctgattttaataatgatgaaattgaaatcgagattaacccagatgatatcacagtggatacttttagagcttcaggcgctggtggacaacatattaacaaaactgagtctgcaattagaattacacatcaccctacaggtattgtagtcaacaaccaaaatgaacgatctcaaataaaaaatagagaagctgcaatgaaaatgttgaagtccaaactttatcaattaaagttagaagagcaagagcaagaaatggctgaaattcgaggcgaacaaaaagacattggatggggaagtcagattcgttcttacgtctttcatccatattcaatgattaaagatcatcgtacgaatgaagaaactggtaaagtagacgctgttatggatggagaaataggcccattcatagatgactaa

SEQ ID NO: 1038 - protein, 215 aa, Artificial Sequence
  Description of Artificial Sequence: synthetic amino acid sequence
MLLRMYQRYCEQNGFKVETVDYLPGDEAGVKSVTLLIKGHNAYGYLKAEKGVHRLVRISPFDSSGRRHTSFASCDVIPDFNNDEIEIEINPDDITVDTFRASGAGGQHINKTESAIRITHHPTGIVVNNQNERSQIKNREAAMKMLKSKLYQLKLEEQEQEMAEIRGEQKDIGWGSQIRSYVFHPYSMIKDHRTNEETGKVDAVMDGEIGPFIDD

SEQ ID NO: 1039 - DNA, 960 bp, Artificial Sequence
  Description of Artificial Sequence: synthetic nucleic acid sequence
gtggcaaagttaaacattaacaacgaaataaagaaagtagaaaagcgacttgaagaagcaattataagttctgatcaaacattacaagaagcctcattccatttactatcttcagggggaaaaagagttagacccgcttttgttattttaagtggtcaatttggctctaacaacaaaccttcagaagacacgtatcgtgtagcagtagctttagaactaattcacatggctaccttagtccacgatgatgtgatagataaaagtgataaacgtagaggccgactcactatttcaaaaaaatgggaccaaagtacagctattttaacaggaaatttcttacttgctatggggctcaagcatttatctgaaatcagtgatactcgtgtccattcgaccatttctaaatcaattgttgatgtgtgtagaggagaactattccaatttcaagatcaatttaatagcaatcaaacaattactaattacttacgtcgtatcaaccgtaaaacagcacttcttattcaactgtctacacaagttggtgcgattacttccaatgcgtcaaatgacgttattcgtaaattaaaaatgatcggacattatataggtatgagtttccaaataatagatgatgtgctagattttactagttctgaaaagaaacttggtaagccggttggtagtgaccttatgaatggtcatattacattacctgtactattagaaatgcgaaaaaataagacttttaaagataaaatttcacaacttaatcctgacagtcctcaacatgcctttgaaacttgtataacaataattagacagtccgaaagcatagaacaatcaaaacaaataagtgaaaagtatttaaataaagcaatcaatttaatcgatgaattagaggatggtcctaataaagaactatttagaaagcttattaaaaaaatgggaagtcgaaataagtaa

SEQ ID NO: 1040 - protein, 319 aa, Artificial Sequence
  Description of Artificial Sequence: synthetic amino acid sequence
VAKLNINNEIKKVEKRLEEAIISSDQTLQEASFHLLSSGGKRVRPAFVILSGQFGSNNKPSEDTYRVAVALELIHMATLVHDDVIDKSDKRRGRLTISKKWDQSTAILTGNFLLAMGLKHLSEISDTRVHSTISKSIVDVCRGELFQFQDQFNSNQTITNYLRRINRKTALLIQLSTQVGAITSNASNDVIRKLKMIGHYIGMSFQIIDDVLDFTSSEKKLGKPVGSDLMNGHITLPVLLEMRKNKTFKDKISQLNPDSPQHAFETCITIIRQSESIEQSKQISEKYLNKAINLIDELEDGPNKELFRKLIKKMGSRNK

SEQ ID NO: 1041 - DNA, 738 bp, Artificial Sequence
  Description of Artificial Sequence: synthetic nucleic acid sequence
atggaagcacgtatgacgatttgtaatatggctattgaagcaggagcaaagtatggtttaatgcaacctgatgaaacaacctttaattacgtaaaaggtcgtccttatgctactgattttgatagttctatggcgtggtggaaagaactttattctgatgatgatgcctattttgataaagttattgaacttgatgtaacaaatttagaacctcaagtaacttggggaactaacccagaaatgggagttagttttagtaatccattcccagaaattaaaaatgcaaatgaccaacgtgcttatgactatatgggacttcacccaggtcaaaaagccgaagatataaaattaggttatgtttttttaggttcatgcacgaatgcaagattatctgatcttattgaagcaagtcatattattaaaggacaacaagttcatccaaatattactgctattgtggttccgggttcaagaactgttaagaaggaagctgaagctctgggactagataaattatttaaagatgctggatttgagtggcgtgaaccaggatgttctatgtgcttaggtatgaatccagatcaagttcctgaaggagtacattgtgcatccacgagtaatcgcaattttgaaggaagacaaggcaaaggcgctcgtacacatttggtatcccctgctatggctgctgctgctgcgattaatggtaaattcattgatgttagaaaggtggtagtataa

SEQ ID NO: 1042 - protein, 245 aa, Artificial Sequence
  Description of Artificial Sequence: synthetic amino acid sequence
MEARMTICNMAIEAGAKYGLMQPDETTFNYVKGRPYATDFDSSMAWWKELYSDDDAYFDKVIELDVTNLEPQVTWGTNPEMGVSFSNPFPEIKNANDQRAYDYMGLHPGQKAEDIKLGYVFLGSCTNARLSDLIEASHIIKGQQVHPNITAIVVPGSRTVKKEAEALGLDKLFKDAGFEWREPGCSMCLGMNPDQVPEGVHCASTSNRNFEGRQGKGARTHLVSPAMAAAAAINGKFIDVRKVVV

SEQ ID NO: 1043 - DNA, 483 bp, Artificial Sequence
  Description of Artificial Sequence: synthetic nucleic acid sequence
gtgcatcttaagcgggtctctaaatcaggctttggaccttttgcttttgatgaatggcgttacttacctgatggtagtgataatcctgattttaatcctaataaaccaaaatatcatggtgcgtcaattctaattactggagataactttggttgtggttctagccgtgagcatgcagcgtgggccttaaaagattatggttttaacattattattgcaggaagttttagtgacatcttttacatgaattgtactaaaaacgcaatgttacctatatgtttaaatcagaaagaaagagaacatttagctcaatttgatgaaataactgttgatttacctaatcaaacagtgtctacggtgtctcagtcttttcattttgatatagatgaaacctggaaaaataaattaatccatggcttagacgatattgctattactttacaatttgaaaatttaatagaaaaatacgaaaaaactttttaa

SEQ ID NO: 1044 - protein, 160 aa, Artificial Sequence
  Description of Artificial Sequence: synthetic amino acid sequence
VHLKRVSKSGFGPFAFDEWRYLPDGSDNPDFNPNKPKYHGASILITGDNFGCGSSREHAAWALKDYGFNIIIAGSFSDIFYMNCTKNAMLPICLNQKEREHLAQFDEITVDLPNQTVSTVSQSFHFDIDETWKNKLIHGLDDIAITLQFENLIEKYEKTF

SEQ ID NO: 1045 - DNA, 1275 bp, Artificial Sequence
  Description of Artificial Sequence: synthetic nucleic acid sequence
atgacagtgacagtaagaactaaagtttcgacaaaagatatagatgaagcatatttacgtctaaaaaatatagtaaaagaaactcccttacaattcgaccattacttatctcaaaaatataattgtaatgtttatttaaaaagagaagatttacagtgggtacgatcctttaaattaagaggagcttataatgctatttcagtattatccaatgaagaaaaaaataaaggtattacttgcgcaagtgctggaaatcatgctcaaggtgttgcttatactgccaaaaaactcaatttaaaagctgttattttcatgccagtaactacaccacgacaaaaaatcaatcaagtcaaattcttcggggatagtaacgtagaaatagtattaattggcgatacatttgatcactgcttagcacaagctttaaactatacgaagcaacataaaatgaattttattgacccatttaataatgtatatactattgcaggacaaggcactttagctaaggaaatattaaatcaagctgaaaaagaggataaaacatttgattatgtatttgctgctataggtggtggcggtcttatttcaggagtgagcacatattttaaagcacattccccccatactaaaattattggtgttgaaccaaccggtgccagtagtatgtatcaatcagtcgttatcaaccatagtatagttactttagaaaatattgataagtttgttgatggagcttcagtagcaagagttggtgatattacctttgatattgcgaaagataaagtggatgattatgttcaagttgacgaaggagctgtttgctccacaattctggatatgtactctaaacaagcgattgttgctgaaccagctggtgctttaagtgtaagtgccttagaacaatataaaaagcagattgaaaataaaactattgtatgcatagtaagtggaggcaacaatgatattaatcgaatgaaagaaattgaggagcgttcccttctatttgaagaaatgaaacattactttattttaaatttcccacaaagacctggtgctttaagagaatttgtcaatgatgtcctcggacctcaagacgatattacaaaatttgaatatttaaagaaaacatcacaaaacactggaactgttattataggtatacagctgaaacatcatgatgatctcattcagttaaaagatcgcgtatgtcaatttgatccttctaatatttatatcaatgaaaataaaatgttatattcattacttatttaa

SEQ ID NO: 1046 - protein, 424 aa, Artificial Sequence
  Description of Artificial Sequence: synthetic amino acid sequence
MTVTVRTKVSTKDIDEAYLRLKNIVKETPLQFDHYLSQKYNCNVYLKREDLQWVRSFKLRGAYNAISVLSNEEKNKGITCASAGNHAQGVAYTAKKLNLKAVIFMPVTTPRQKINQVKFFGDSNVEIVLIGDTFDHCLAQALNYTKQHKMNFIDPFNNVYTIAGQGTLAKEILNQAEKEDKTFDYVFAAIGGGGLISGVSTYFKAHSPHTKIIGVEPTGASSMYQSVVINHSIVTLENIDKFVDGASVARVGDITFDIAKDKVDDYVQVDEGAVCSTILDMYSKQAIVAEPAGALSVSALEQYKKQIENKTIVCIVSGGNNDINRMKEIEERSLLFEEMKHYFILNFPQRPGALREFVNDVLGPQDDITKFEYLKKTSQNTGTVIIGIQLKHHDDLIQLKDRVCQFDPSNIYINENKMLYSLLI

SEQ ID NO: 1047 - DNA, 1071 bp, Artificial Sequence
  Description of Artificial Sequence: synthetic nucleic acid sequence
atgaatttaagatcactagatacaaaagtagaggataataacactttatctgatgataagaaacaagcgcttaaacaagaaattgataagactaagcaaagtattgaccgacaaagaaatattattatagatcaactcaatggtgctagtaataaaaaacaagcaaccgaagatatcttaaatagtgttttcagcaaaaatgaagtagaagacataatgaaacgtattaaaacaaatggccgaagtaatgaagatattgctaatcaaattgccaagcaaattgatggtcttgcattaacttctagtgatgatattttaaaatcaatgttagatcaatctaaagataaagaaagtttaattaaacaattgttgacgacacgacttggtaatgatgaagcagatcgtattgctaaaaaattgttaagccaaaacttgtcgaattctcaaatcgtagaacaattaaaacgtcatttcaatagtcaaggaacagctacagctgatgatatattgaatggtgtgattaatgatgctaaagacaaaagacaagcgattgaaacaatattacaaacccgtatcaataaagacaaagctaaaattatcgctgatgttattgcgcgtgtacaaaaggacaaatcagatatcatggatctcattcactctgcgattgaaggcaaggcaaatgatttattagatatagaaaaacgagcaaaacaagctaagaaagatttagaatatattttagatcctataaagaatagaccatccttgttagatcgtattaacaaaggtgtcggtgattctaattcaatatttgatagaccaagtttacttgataaacttcactcaagaggatctattcttgataaattagatcattcggcaccggagaatggattatctttagataataaaggtggccttttaagtgatctatttgacgacgatggtaatatctcattaccagcgacaggtgaagtcatcaaacaacattggataccagtggctgttgtactcatgtcattaggtggagcgctcatctttatggcgcgtagaaaaaaacaccaaaattaa

SEQ ID NO: 1048 - protein, 356 aa, Artificial Sequence
  Description of Artificial Sequence: synthetic amino acid sequence
MNLRSLDTKVEDNNTLSDDKKQALKQEIDKTKQSIDRQRNIIIDQLNGASNKKQATEDILNSVFSKNEVEDIMKRIKTNGRSNEDIANQIAKQIDGLALTSSDDILKSMLDQSKDKESLIKQLLTTRLGNDEADRIAKKLLSQNLSNSQIVEQLKRHFNSQGTATADDILNGVINDAKDKRQAIETILQTRINKDKAKIIADVIARVQKDKSDIMDLIHSAIEGKANDLLDIEKRAKQAKKDLEYILDPIKNRPSLLDRINKGVGDSNSIFDRPSLLDKLHSRGSILDKLDHSAPENGLSLDNKGGLLSDLFDDDGNISLPATGEVIKQHWIPVAVVLMSLGGALIFMARRKKHQN

SEQ ID NO: 1049 - DNA, 2385 bp, Artificial Sequence
  Description of Artificial Sequence: synthetic nucleic acid sequence
atgaaaaacgcactaaaactttttatcacggatttaaaaagagttgctaaaacaccaggtgtatgggtcatcttagctggtttagcaattcttccttcattctatgcatggtttaacctctgggctatgtgggatccgtatggtcatacaggacatatcaaagttgccgtagtgaatgaagaccaaggtgaaaaagttcgtggtaagaatattaatgtaggaaataaaatggtcaaaactttaaaaaagaatgatagttttgactggcaatttgtgagtagagaaaaagccgaccatgaaattaagatgggaaaatattatgcaggtatttatataccgaagaaattcacacatgaaatcactggtactttaagaaaacatcctcaaaaggcggatatagattttaaagtaaatcagaagattaatgctgtagcagctaagttaaccgatacgggatcgtcgtttgtgattgataaagcaaataaacaatttaacaaaaccgtagcaaccgctttactttctgaagctaataaagtcggactatcaattgaagataatgtacctacaatcaataaaattaagagtgctgtatatcaagctaataattcattgcctaaaattaatcaatttgcagacaagattattgaactaaataaacatcaagacgatttggatgcttatgctaatcaatttagaagtttaggaaagtataaagggaatgtattagacgctcaagaaaaacttaatgctgttaattcgtctattccggcgcttaatgaaagggctaaattgatacttgcacttgatagctacatgcctaatattgaaagaattttaaatgttgctgctaatgatgttccagcacaatttcctagaattaataggggtgtcgatattgcaagtgaaggtattgatgcagcgagtggtcagttaaatgatgcaaaaggttatttgactcaagctaaagcgagagtgggagactatcaagaagcagctggccgcgctcaagatgtgaacaaccaagcaaatcaaaatctaagaaatcaaacatcaactacaccccaaagcgctataaaatcatcgcattcggaagggaagagtcattcaagcattaaaacagtacctgtgagtcaatcaggtgagaatcaacccgtttatggtgataacattttatctaacagtgatgtaaaatcaatgaatacagctttaacagaagctttattatcattatctaatcaaacagatcaacaagcacaagctacccaacaagacattaagtcattaaaaaatatagcatatggtgttatcgcttcagataaaccatcagagtttaaagaaccattaaaaaatataaaatcacgcttagaaaacgcatctaagtataatcaacaatttatagatatcttgtcagagttggaaaaaagtgaacatgttgatctatctaatgaaattaagcaagtgaaagaagcaaacaatagcattaatgataatttaaaaagtactaatcaattaatagatgcattgtcaaatggtagctccggacaattagaagcagtcaatgtattacgtgacttacctaacttaaataaaaggttagatacattacgaaattacattaaaaaagaacttaatcgtaatttactagctgtttctaatgagattactgatcaacttaataaaggtcaaaatacattatcgacaatccaatctaaattaaatactattaaccgagtgattaacgctggtcaagatattttaaatagcggtaaaaagagaattgatacgattcaaactgcattgccagcaatcgaaaacgcatatataaatgcaatgcgaactgcacaagcttacttcccaacagctaaaaaagatgtcgcgaaagctgcagactttgtacgtaatgacttgcctggattagagagagaattagctaatgtaacacagtctgtaaaccaaaaaataccatctttatttagtcgttatgataatgctgtagatttattaaacgagaaacagcctcaagcaaaagaagcacttgcttcgcttgccgatttctcagaaaataaattgccagatgttgagaaagacttgaaaaaagcaaataaaatcttcaaaaagttagataaagatgatgctgtagataagctaatagatacattgaaaaatgatttgaagaaacaggcagatattgttgctaaccctattaataaaaaaacgacagatgtgttcccagtaaaagactatggttctggtatgacgccgttctatactgcattgtctatttgggttggaggattattaatggtcagcttattatccgatgtttccttttccgacttgataaccgtacaagccatctgtcttacttgttttgtttttagataa

SEQ ID NO: 1050 - protein, 794 aa, Artificial Sequence
  Description of Artificial Sequence: synthetic amino acid sequence
MKNALKLFITDLKRVAKTPGVWVILAGLAILPSFYAWFNLWAMWDPYGHTGHIKVAVVNEDQGEKVRGKNINVGNKMVKTLKKNDSFDWQFVSREKADHEIKMGKYYAGIYIPKKFTHEITGTLRKHPQKADIDFKVNQKINAVAAKLTDTGSSFVIDKANKQFNKTVATALLSEANKVGLSIEDNVPTINKIKSAVYQANNSLPKINQFADKIIELNKHQDDLDAYANQFRSLGKYKGNVLDAQEKLNAVNSSIPALNERAKLILALDSYMPNIERILNVAANDVPAQFPRINRGVDIASEGIDAASGQLNDAKGYLTQAKARVGDYQEAAGRAQDVNNQANQNLRNQTSTTPQSAIKSSHSEGKSHSSIKTVPVSQSGENQPVYGDNILSNSDVKSMNTALTEALLSLSNQTDQQAQATQQDIKSLKNIAYGVIASDKPSEFKEPLKNIKSRLENASKYNQQFIDILSELEKSEHVDLSNEIKQVKEANNSINDNLKSTNQLIDALSNGSSGQLEAVNVLRDLPNLNKRLDTLRNYIKKELNRNLLAVSNEITDQLNKGQNTLSTIQSKLNTINRVINAGQDILNSGKKRIDTIQTALPAIENAYINAMRTAQAYFPTAKKDVAKAADFVRNDLPGLERELANVTQSVNQKIPSLFSRYDNAVDLLNEKQPQAKEALASLADFSENKLPDVEKDLKKANKIFKKLDKDDAVDKLIDTLKNDLKKQADIVANPINKKTTDVFPVKDYGSGMTPFYTALSIWVGGLLMVSLLSDVSFSDLITVQAICLTCFVFR

SEQ ID NO: 1051 - DNA, 1968 bp, Artificial Sequence
  Description of Artificial Sequence: synthetic nucleic acid sequence
atgaagaaaaataaatttttagtatatttactatcgacggcgcttatcacgccaaccttcgctacacaaacagcttttgctgaagattcatctaataaaaatacaaattcagataaaatggaacaacatcaatcacaaaaagaaacatcaaaacaatctgaaaaagatgaatttaacaacgatgattctaaacacgattctgatgataaaaaaagcacttctgacagcaaggacaaagactctaataaaccattatcagctgactcaacacatcgtaactataaaatgaaagatgataatttagttgatcaactttatgataattttaagtctcagtcagtagatttttctaaatactgggaaccgaataaatacgaagacagttttagtttaacgtcactcatacaaaatttatttgattttgattctgatataacagattacgaacagccacaaaagacaagccattcttctaatgacgaaaaagatcaagtagaccaagcagatcaggcaaaacaaccatcacaacatcaagaacaatcacagtcgtctgctaaacaagatcaagaatcatcaaacgatgaaaaagaaaagacaactaaccatcaagccgattctgacgtcagtgatttacttggagaaatggataaagaagatcaagaaggcgaaaacgtagatacaaacaaaaatcaatcttcttctgagcaacaacaaactcaagcgaatgatgatagctcagaacgtaacaagaaatattctagtattacagattcagcattagactctatattagatgaatatagtcaggacgctaagaaaacagaaaaagattacaataagagcaagaatacaagtcacactaaaacatctcaaagtgataatgccgacaagaatccacaattaccaacagatgatgaattaaaacatcaatcaaaacctgcacaatcatttgaggatgacattaaacgctcaaatacacgttcaacaagtcttttccaacaactacctgaattagacaatggtgacttatcttctgattcatttaatgttgttgacagtcaagacacacgtgatttcattcaatcaattgctaaagatgcgcatcagattggaaaagaccaagatatatatgcatcagttatgattgctcaagctattttagaatctgactctggaaaaagttcacttgcacaatcaccaaatcataacttgtttggaatcaaaggtgactacaaaggacaatctgtaacttttaatactttagaagctgatagcagtaatcatatgttcagtatccaagcaggtttccgtaaatacccaagtactaaacaatctcttgaagattatgcagatttaatcaaacatggtatcgatggtaatccgtcaatttataaaccaacttggaagagtgaagctctatcatataaagatgctacttcacatctgtcacgctcatacgccacagatcctaattattctaaaaaattaaatagtattattaaacattatcatttaacatcttttgacaaagaaaaaatgcctaacatgaagaaatacaacaaatcaataggtacggatgtctctggtaatgacttcaaaccatttactgaaacttccggtacatcaccttacccacatggccaatgtacttggtatgtgtaccaccgtatgaatcaatttgatgcatccatttctggtgacttaggtgatgctcataattggaataatcgtgctgaaagtgaaggctatacggtaacgcacacacctaaaaatcatactgcagttgtgtttgaagctggacaattaggtgctgatacacagtatggtcatgttgctttcgttgaaaaagttaatgacgacggttcaattgttatttctgaatcaaatgttaaaggattaggtgtcatttcattcagaactattgatgcagaagatgctcaagatttagattacattaaaggtaaatag

SEQ ID NO: 1052 - protein, 655 aa, Artificial Sequence
  Description of Artificial Sequence: synthetic amino acid sequence
MKKNKFLVYLLSTALITPTFATQTAFAEDSSNKNTNSDKMEQHQSQKETSKQSEKDEFNNDDSKHDSDDKKSTSDSKDKDSNKPLSADSTHRNYKMKDDNLVDQLYDNFKSQSVDFSKYWEPNKYEDSFSLTSLIQNLFDFDSDITDYEQPQKTSHSSNDEKDQVDQADQAKQPSQHQEQSQSSAKQDQESSNDEKEKTTNHQADSDVSDLLGEMDKEDQEGENVDTNKNQSSSEQQQTQANDDSSERNKKYSSITDSALDSILDEYSQDAKKTEKDYNKSKNTSHTKTSQSDNADKNPQLPTDDELKHQSKPAQSFEDDIKRSNTRSTSLFQQLPELDNGDLSSDSFNVVDSQDTRDFIQSIAKDAHQIGKDQDIYASVMIAQAILESDSGKSSLAQSPNHNLFGIKGDYKGQSVTFNTLEADSSNHMFSIQAGFRKYPSTKQSLEDYADLIKHGIDGNPSIYKPTWKSEALSYKDATSHLSRSYATDPNYSKKLNSIIKHYHLTSFDKEKMPNMKKYNKSIGTDVSGNDFKPFTETSGTSPYPHGQCTWYVYHRMNQFDASISGDLGDAHNWNNRAESEGYTVTHTPKNHTAVVFEAGQLGADTQYGHVAFVEKVNDDGSIVISESNVKGLGVISFRTIDAEDAQDLDYIKGK

SEQ ID NO: 1053 - DNA, 693 bp, Artificial Sequence
  Description of Artificial Sequence: synthetic nucleic acid sequence
atgcttaaaatagagagattaaccaaatatatagacacgcaactgatatttaaagagatatcatgtacaattaacgaccagcacttactcataagtggggagagtggttgtggtaaatccacattagccaagattatcgctggcttagatacggattatcagggcgaattatatcttaatgggcgcttacgtgaatcttatacgtctaaagagtggatgaagcacatccaatatgtacctcaatatcaacgtgatactttaaatcagcgtaaaacggtattagctacattattagaaccacttaagaattataaggtaaataaacagcgttatacatcaagcattgaagcagtgcttgatcagtgtaatttaccacacgatatacttaatcataaagtttcgacattaagtggtggccaatttcaacgcgtctggatagctaaagctttaatattagaaccagagattctcatattggatgaagctacaaccaacttagatgtcattaatgaagaagctatacttcaaatgttgatttccttaaagatgacacaattaatcattatttcacatgatacatacgtcttaagccaatttgaaggaattcatgactatcagtcgattccttttggttcttacgcaataagtcttcatctaattctgttaagggtacgagtgaaccatatcgtttaa

SEQ ID NO: 1054 - protein, 230 aa, Artificial Sequence
  Description of Artificial Sequence: synthetic amino acid sequence
MLKIERLTKYIDTQLIFKEISCTINDQHLLISGESGCGKSTLAKIIAGLDTDYQGELYLNGRLRESYTSKEWMKHIQYVPQYQRDTLNQRKTVLATLLEPLKNYKVNKQRYTSSIEAVLDQCNLPHDILNHKVSTLSGGQFQRVWIAKALILEPEILILDEATTNLDVINEEAILQMLISLKMTQLIIISHDTYVLSQFEGIHDYQSIPFGSYAISLHLILLRVRVNHIV

SEQ ID NO: 1055 - DNA, 1203 bp, Artificial Sequence
  Description of Artificial Sequence: synthetic nucleic acid sequence
atgaaattaaataaatttaaaatcgtattttttattatcgtattattaactttagtcgtgtcaataggtatattaggtgttgaatggacaagacacctagaattaaaaaaacaaacgttaagtcaagaaagtggaaatacgaattatatagaaaagagagataagactgttgagaaacctaaaaaaataaagactaaatatgataaaaaagatcctacttccaaatcgataaacaaatatttagaaaaaactcaatttaatggaactgtagctgtatttgataatggaaaagttaaaatgaataaaggatatggttatcaagatatagagaaaggcaaaaagaacactgcaaatacaatgtatttaataggatcagcgcaaaaatttacaacaggtttaatgctgaagcaacttgaagtcgaaaataaagtgaatttgcaagattcagtcactaaatatattccttggtttaaaacaaataaagaaattacaattaaagatttaatgttacataaaagtggactatataaatatgaagcttcaactaatatcaaaaatttagaacaggctgttagagcaattcaagctcgaggtattgatgatacagtttatcataagcatcaatataatgatgctaattatttagttttagctaaagttattgaaaatgttactggaaaaccatatgttaaaaattattatgaacgattaggtaataaatataatctcaaacatactgctttttatgacgagaaacctcttcaaagtgagatggcaaaaggctataagtttaaaaataatactttttcattccttaaacctaatatattagatcaatattatggagctggtaatttatatatgacgccacatgatatgggcaaattaatttatacgttacaacaaaataaaatctttaatgcacgtcaaactcgacctattttacatgaatttggaactcaagaatatccagaagaatatagatatggtttttacataactccgtatttaaatagagtcaacggggtattctttggtcaaatttttactgtttactttaatgatcggtatattgtcattttagggacgaatgtaagtaatacacctggattagtgagtaatgaagacaaaatgagacacattttctataatattcttgaccagaaaaagccttataatacagcaggtgttaaagttgagtaa

SEQ ID NO: 1056 - protein, 400 aa, Artificial Sequence
  Description of Artificial Sequence: synthetic amino acid sequence
MKLNKFKIVFFIIVLLTLVVSIGILGVEWTRHLELKKQTLSQESGNTNYIEKRDKTVEKPKKIKTKYDKKDPTSKSINKYLEKTQFNGTVAVFDNGKVKMNKGYGYQDIEKGKKNTANTMYLIGSAQKFTTGLMLKQLEVENKVNLQDSVTKYIPWFKTNKEITIKDLMLHKSGLYKYEASTNIKNLEQAVRAIQARGIDDTVYHKHQYNDANYLVLAKVIENVTGKPYVKNYYERLGNKYNLKHTAFYDEKPLQSEMAKGYKFKNNTFSFLKPNILDQYYGAGNLYMTPHDMGKLIYTLQQNKIFNARQTRPILHEFGTQEYPEEYRYGFYITPYLNRVNGVFFGQIFTVYFNDRYIVILGTNVSNTPGLVSNEDKMRHIFYNILDQKKPYNTAGVKVE

SEQ ID NO: 1057 - DNA, 394 bp, Artificial Sequence
  Description of Artificial Sequence: synthetic nucleic acid sequence
gtgttagaacgggaaacacatttacgcgtcatgcctttatttgaagaaaattattatatgtatgtgcccaaatcacatccactagctatgactgtacatcccccgctatctcaatttacaaatcaatcactatactgtctcgaaccaatgacaagctcaataaaaagtaaattgattgaaaagactaaggcacaagtacgaatgatttcagatatgaaactcgctcaacatattttgagtcataataagggatttattatttctagtcaaaattctttactatatgatcacgtaaattggactaaaatccctttaaatcatacagaattaaaacgaatgctatgtgtagttatgcgaaaagataacaagaaaaacgacattaatatagcatgga

SEQ ID NO: 1058 - protein, 132 aa, Artificial Sequence
  Description of Artificial Sequence: synthetic amino acid sequence
  MOD_RES (132): variable amino acid
VLERETHLRVMPLFEENYYMYVPKSHPLAMTVHPPLSQFTNQSLYCLEPMTSSIKSKLIEKTKAQVRMISDMKLAQHILSHNKGFIISSQNSLLYDHVNWTKIPLNHTELKRMLCVVMRKDNKKNDINIAWX

SEQ ID NO: 1059 - DNA, 1947 bp, Artificial Sequence
  Description of Artificial Sequence: synthetic nucleic acid sequence
atgattatctcagcacaaattgctgcgccattcttagtcatcggccttatagcagttatatcttatttcaaattatggaaatatctatataaagaatggttcacatccgtagaccataaaaaaatcggtatcatgtatttaatttctgccgtattaatgttcgttcgtggtggtatcgatgcgttaatgttacgtactcaattaacaattccagataacaaattcttggaagcaaaccactataatgaagtatttactacgcacggcgtaattatgattatatttatggctatgccatttatctttggtttatggaatgttgttattccattacaacttggtgcacgcgatgttgccttccctgtaatgaataacgttagtttctggctattcttcgctggtatgattttattcaacctatcatttattgtaggtggatcaccagctgctggttggactaactacgcaccacttgctggtgaattcagtccaggtccaggtgttaactattatttaattgcaattcaaatatctggtatcggatcgttaatgactggtatcaacttctttgttacgattctaagatgtaaaactccaacaatgaagtttatgcaaatgccaatgttcagtgtaacaacattcattacaacattaatcgttatattagcattcccagtgttcactgtagcacttgctttaatgactgctgatagaatttttggaactcagttcttcactgtagcaaatggcggtatgccaatgctttgggcaaacttcttctgggtatgggggcaccctgaagtttatatcgttattttgccagcattcggtatgtactcagaaatcatccctacttttgcccgtaaacgtttattcggtcatcaaagtatgatttgggcaactgcaggtatcgcattcttaagtttcttagtttgggttcaccatttcttcactatgggtaatggtgcgttaattaactcattcttctctatctcaacaatgttaatcggtgttccaaccggagttaaactatttaactggttgctcacattatacaaaggtagaattacatttgagtcacctatgctattctcattagcattcatccctaacttcttattaggaggggttactggtgtaatgcttgcaatggcatcagctgactatcaatatcacaacacttatttcttagtagctcacttccactatacattggttactggtgtagtatttgcctgcttagctggtttaatcttctggtatccaaaaatgatgggctacaagttaaatgaaacattaaacaaatggtgcttctggttcttcatgatcggatttaacgtttgtttcttaccacaattcattctaggtttagatggtatgccacgtcgtctatacacttacatgccttctgatggttggtggttactaaacttcatctcaactatcggtgcagtattgatggcaattggattcttattcctagttgcaagtatcgtttatagtcatatcaaagctccacgtgaagctactggagataactgggatggacttggtcgtactttagaatggtctacagcatcagctattccacctaaatacaactttgctatcactcctgattggaatgactacgatacattcgttgatatgaaagaacatggtcgtcattatttagacaaccataactacaaagatattcatatgccaaacaatactccagtaggattctggatgggtatatttatgactattggtggtttcttcttaatcttcgaatctattgttccagcacttatctgtttagcaggtatcttcattactatgatttggagaagtttccaaattgatcatggttaccacatccctgcttcagaagttgcagaaactgaagctcgtttaagagaagctcgaattaaagaaagggaggctgtaagtcatgagtcatga

SEQ ID NO: 1060 - protein, 648 aa, Artificial Sequence
  Description of Artificial Sequence: synthetic amino acid sequence
MIISAQIAAPFLVIGLIAVISYFKLWKYLYKEWFTSVDHKKIGIMYLISAVLMFVRGGIDALMLRTQLTIPDNKFLEANHYNEVFTTHGVIMIIFMAMPFIFGLWNVVIPLQLGARDVAFPVMNNVSFWLFFAGMILFNLSFIVGGSPAAGWTNYAPLAGEFSPGPGVNYYLIAIQISGIGSLMTGINFFVTILRCKTPTMKFMQMPMFSVTTFITTLIVILAFPVFTVALALMTADRIFGTQFFTVANGGMPMLWANFFWVWGHPEVYIVILPAFGMYSEIIPTFARKRLFGHQSMIWATAGIAFLSFLVWVHHFFTMGNGALINSFFSISTMLIGVPTGVKLFNWLLTLYKGRITFESPMLFSLAFIPNFLLGGVTGVMLAMASADYQYHNTYFLVAHFHYTLVTGVVFACLAGLIFWYPKMMGYKLNETLNKWCFWFFMIGFNVCFLPQFILGLDGMPRRLYTYMPSDGWWLLNFISTIGAVLMAIGFLFLVASIVYSHIKAPREATGDNWDGLGRTLEWSTASAIPPKYNFAITPDWNDYDTFVDMKEHGRHYLDNHNYKDIHMPNNTPVGFWMGIFMTIGGFFLIFESIVPALICLAGIFITMIWRSFQIDHGYHIPASEVAETEARLREARIKEREAVSHES

SEQ ID NO: 1061 - DNA, 411 bp, Artificial Sequence
  Description of Artificial Sequence: synthetic nucleic acid sequence
atgacttttgcattattaattagttcttatacttgtggtattgcaatttattacatgcgacaagaaaaacaaaacttaatgatgttttggatgattatcacagttatcctaggtcttgtattcgtaggtttcgaaatttacgaattcgcacactatgcttctgaaggtgttaacccaactattggctccttctggtctagtttctttatactactaggtacgcacggtgcacacgtatcattaggtattgtttgggttatttgtttgttaattcaaatcggcactcgtggtttggattcatacaatgctcctaaattatttatagtaagtttatactggcacttcttagatgttgtttgggtcttcatctttactgccgtatatatgatagggatggtgtatagcggatga

SEQ ID NO: 1062 - protein, 136 aa, Artificial Sequence
  Description of Artificial Sequence: synthetic amino acid sequence
MTFALLISSYTCGIAIYYMRQEKQNLMMFWMIITVILGLVFVGFEIYEFAHYASEGVNPTIGSFWSSFFILLGTHGAHVSLGIVWVICLLIQIGTRGLDSYNAPKLFIVSLYWHFLDVVWVFIFTAVYMIGMVYSG

SEQ ID NO: 1063 - DNA, 1113 bp, Artificial Sequence
  Description of Artificial Sequence: synthetic nucleic acid sequence
atgaacaaatttataaaatattttttaatattattatcttttggtctcctcgttgttccaattatttttgctactcaattatatcaaagttcagaatcggcatttgagtcatctcaaaacactaaagattctcaacgaaagtctactttaagagattcaaaagttgatcctgaaaaacaacctatatcaattttattcttaggtatagacgataatgaaggtagagaaaaaaacgggcaaagtgtagaacattctaggtcagatgctatgatattatctacttttaatcagaaaaagcatcaaataagaatgcttagcatacctagagatactatcagttatatacctaaagttggctattacgataaaataacacatgcgcatgcatatggtggacctcttgctgctatggactcagttgaagcaacaatgaatgtaccggtagattattatgtgcgtattaatatgaaagcctttgttgaagcagttgatgaattaggtggtatatattatgacgtaccatataacttaaatgaacctaacagtgatgatactggtagaattaaaataaaaaaaggataccaaaagctaaacggcgaccaagcattagctgtagctcgaactagacaccatgattcagaccttaaacgtggtcaaagacaaatggaacttattaaaatattgttccaaaaagctcaaaatttaaaatctatagataaacttgacaatgttattagtattgtagggaaaaatgctaaacataatttaactcaaaaagaaattaagtctctagccaaaatgtatcttggtggtagtactgaaattaaaacatcacaacttaaaggtaaggatgactacttaaatgatatatactattaccacccaagcgtaaaaagtattatggaatattcaaatcttttacgtaatgatttagatttatctaaaataacaaacaaaaacgatttcttagatcaaagagtcattaaacgatatggttcactcgtacccttaacagaattagatgaagacttattgcgtaagaaccaaaaggaatcgactgatagtcatgaattccttcaaattggcttaagacgtatgtatcatgtgaaataa

SEQ ID NO: 1064 - protein, 370 aa, Artificial Sequence
  Description of Artificial Sequence: synthetic amino acid sequence
MNKFIKYFLILLSFGLLVVPIIFATQLYQSSESAFESSQNTKDSQRKSTLRDSKVDPEKQPISILFLGIDDNEGREKNGQSVEHSRSDAMILSTFNQKKHQIRMLSIPRDTISYIPKVGYYDKITHAHAYGGPLAAMDSVEATMNVPVDYYVRINMKAFVEAVDELGGIYYDVPYNLNEPNSDDTGRIKIKKGYQKLNGDQALAVARTRHHDSDLKRGQRQMELIKILFQKAQNLKSIDKLDNVISIVGKNAKHNLTQKEIKSLAKMYLGGSTEIKTSQLKGKDDYLNDIYYYHPSVKSIMEYSNLLRNDLDLSKITNKNDFLDQRVIKRYGSLVPLTELDEDLLRKNQKESTDSHEFLQIGLRRMYHVK

SEQ ID NO: 1065 - DNA, 2476 bp, Artificial Sequence
  Description of Artificial Sequence: synthetic nucleic acid sequence
atgaatgcctatcaaattgaagaacttttttcacaagaaaatcttcaaaatgcagcacgttcaggccgtccaattcaatttcttgtaggttttgatgttgaagatagccatcataaccctgaaactcttttaccagtaaatttatatgtaaaacctgagttaaaacatacaattgagttatatcacgataatgaaaaacaagatagaaaggaattttcagtatcgaaacgagcgggccatggtgttttccaagtaatgagtggaacgcttcataacactgtaggatcaggaatattaccttatcaacaagagatacgtatcaaacttactagtaatgaaccaattaaagatagtgaatggtctattacaggatatcctaacacgcttacattacaaaacgctgtgggtagaacaaataatgctactgaaaaaaacttagctcttgttggtcatattgatccaggaaattatttcatcactgttaagtttggtgataaagtagaacaatttgaaattagatcaaaaccaactccaccaagaatcattacaactgctaatgaattacgtggaaatcctaaccacaagcctgaaataagagtaacagatataccaaatgatactactgctaaaatcaaacttgtgatgggcggaaccgatggtgatcatgatccagaaataaatccatatactgtccctgaaaactacacagtagttgcagaagcataccatgataatgatccaagtaaaaatggggtcttaacattccgttcatcagactaccttaaagatctaccattaagcggtgaattaaaggcaattgtttattacaatcaatatgtacaatcaaactttagtaatagcgttccgtttagtagcgatacaacaccacctacaattaatgaaccagcaggactagttcataagtattacaggggagatcatgtagaaattactcttccagtcactgataatactggcggttcaggtttaagagatgtaaacgtcaatttacctcaaggttggacaaaaacctttacaatcaatcctaataataatactgagggtacgcttaagttaattggtaatatacctagtaatgaagcatataatacgacatatcatttcaatattactgcaaccgataattctggaaatacaacaaatccagctaaaacctttattttaaatgttggtaagttggctgatgatttaaatccagtcggattatctagagatcaactacaattagtgacagacccttcttcattatctaattccgaacgagaagaggtaaaaagaaaaataagtgaagcaaatgctaatataagatcatatttattacaaaataacccaatactcgctggagtaaacggcgatgttacattttattatagagatggttctgtagatgttattgatgctgaaaatgtaatcacatatgagcccgaaagaaaatccattttcagtgaaaatggtaatacaaataaaaaagaagcagtaatcactattgctagaggacaaaactataccattggtccaaacttaagaaaatatttctcattaagtaatggttcggatttacctaatagagatttcacctctatatcagctattggatctttaccttcatcgagtgaaattagtcgactcaatgttggaaattataactatagagttaatgctaaaaatgcttatcataagactcaacaagaacttaatttaaaacttaaaatagtagaggttaatgcacctactggtaataatcgtgtatatagagttagtacttataatttaactaatgatgaaatcaataaaatcaaacaagcatttaaagcagctaattctggacttaatttaaacgataacgatatcactgtttcgaataactttgaccatagaaatgttagtagtgtgacagtaactatacgtaagggcgatttgataaaagagttttcatcaaatctcaataatatgaatttcttacgttgggttaatataagggatgattataccatttcgtggacttctagtaagattcaaggtagaaatacagatggtggattagaatggtcaccagatcataaatcacttatttataaatatgatgcaacattaggtagacaaataaatactaatgacgtgttaactttacttcaagcaacagctaaaaactcaaatttacgttcaaatatcaatagtaatgaaaaacagttagcagaacgagggtctaatgggtattctaaatctataattagagatgatggcgagaaatcttatttacttaactcaaatcctattcaagtattagacttagtagaaccagataatggttacggtggacgtcaagtcagtcattctaacgttatatataatgaaaaaaattcttctatcgtaaatggtcaagttccagaagctaatggggcatccgcttttaatattgataaagttgttaaagctaatgcggcaaataatggta

SEQ ID NO: 1066 - protein, 826 aa, Artificial Sequence
  Description of Artificial Sequence: synthetic amino acid sequence
  MOD_RES (826): variable amino acid
MNAYQIEELFSQENLQNAARSGRPIQFLVGFDVEDSHHNPETLLPVNLYVKPELKHTIELYHDNEKQDRKEFSVSKRAGHGVFQVMSGTLHNTVGSGILPYQQEIRIKLTSNEPIKDSEWSITGYPNTLTLQNAVGRTNNATEKNLALVGHIDPGNYFITVKFGDKVEQFEIRSKPTPPRIITTANELRGNPNHKPEIRVTDIPNDTTAKIKLVMGGTDGDHDPEINPYTVPENYTVVAEAYHDNDPSKNGVLTFRSSDYLKDLPLSGELKAIVYYNQYVQSNFSNSVPFSSDTTPPTINEPAGLVHKYYRGDHVEITLPVTDNTGGSGLRDVNVNLPQGWTKTFTINPNNNTEGTLKLIGNIPSNEAYNTTYHFNITATDNSGNTTNPAKTFILNVGKLADDLNPVGLSRDQLQLVTDPSSLSNSEREEVKRKISEANANIRSYLLQNNPILAGVNGDVTFYYRDGSVDVIDAENVITYEPERKSIFSENGNTNKKEAVITIARGQNYTIGPNLRKYFSLSNGSDLPNRDFTSISAIGSLPSSSEISRLNVGNYNYRVNAKNAYHKTQQELNLKLKIVEVNAPTGNNRVYRVSTYNLTNDEINKIKQAFKAANSGLNLNDNDITVSNNFDHRNVSSVTVTIRKGDLIKEFSSNLNNMNFLRWVNIRDDYTISWTSSKIQGRNTDGGLEWSPDHKSLIYKYDATLGRQINTNDVLTLLQATAKNSNLRSNINSNEKQLAERGSNGYSKSIIRDDGEKSYLLNSNPIQVLDLVEPDNGYGGRQVSHSNVIYNEKNSSIVNGQVPEANGASAFNIDKVVKANAANNGX

SEQ ID NO: 1067 - DNA, 1872 bp, Artificial Sequence
  Description of Artificial Sequence: synthetic nucleic acid sequence
atggtaggtactgcgtatgaagtcgcagctttatatcaaactaaaatgaataaacctcagttaacaagcaatgaaagtcaagaatctgctaaagatgaattaacaatagaagttaaaaatgaagataaagcaccttactatagtgcacgtgttgttcatgacgtgactattggaccttctccagtatggatgcagttccgattaattaaagcgggaatacgtccaattaataatgtggtagatatttccaattatgtacttttagaatatggccaacctctacacatgtttgatcaagaacaaattggttcgcaatctatagaagttagacaagctaaaaaagatgagacaatgagaactttagatggtgaagaacgtcgattgttagatactgacattgtcattacaaatggcaaagaccctattgcattaggaggtgttatgggaggagatttctctgaagtcactgaacaaacacgacatgttgtagtagaaggggctatctttgatcctgtatctattcgacatacatcacgccgtttaaatttaagaagtgaatcttcgagtcgatttgaaaaggggattgcaactgaatttgtcgatgaagctgtagacagagcttgttatttacttgaaagatatgcttcaggaacagttttaaaagaccgagtttcgcatggagatttaggatcatttgtgaccccaatagaaattactgctgacaaagttaaccgtacaattggttttaatttaactgatgaagaaatcattgatatttttgagcaattaggatttgacactgaaaataaaaatggtgaaattatcgtgaatgttccctcaagacgtaaagatatttctattaaagaagacttaatagaagaagtagcacgtatatatggatacgatgacataccatcaacgctacctgtatttaaagatgttacaagtggagaactaacagatcgacagtttaaaacgcgtactgttaaagaaacacttgagggcgctgggctagaccaagctattacttattcattggtatcaaaaaatcatgctaccgattttgcactacaaaatcgtcctacaattgaactacttatgcctatgagtgaagcacataccacattacgtcaaagtttattaccgcatttaattgatgcagtatcatacaatgttgctcgtaaaaatacaaatgttaagttatatgaaattggacgtgtcttctttggtaacggtgaaggtgagttaccagatgaagtagaatacttgagtggtatattaactggagattttgttaataacacttggcaaggtaagaaagagtcagttgatttctatttaactaagggtattgttgaacgtattgctgaaaagcttaatcttcaattcgattttagagctggtcaaatagatgggttacatccaggaagaacagcaattgtgtcacttaatggtaaagatattggcttcataggtgagctacaccctacgttagctgcaaacaatgatttaaagcgtacgtatgtatttgaacttaattatgatgcaatgatggaagtttctgtgggatatattaattatgagcctatacctagatttccaggtgtaacacgtgatattgcattagaagttaatcatgaagttacttcatctgaattgttatccattattcatgagaatggtgaagatattttaaatgatacactcgtatttgatgtatacgagggtgaacatttagaaaaagggaaaaaatctattgcaattagacttagttatctagatacagaaaacacacttaccgatgaacgtgtaaatgttgtgcatgataaaattttagaagcacttaaaaagcatggtgcaattattagataa

SEQ ID NO: 1068 - protein, 623 aa, Artificial Sequence
  Description of Artificial Sequence: synthetic amino acid sequence
MVGTAYEVAALYQTKMNKPQLTSNESQESAKDELTIEVKNEDKAPYYSARVVHDVTIGPSPVWMQFRLIKAGIRPINNVVDISNYVLLEYGQPLHMFDQEQIGSQSIEVRQAKKDETMRTLDGEERRLLDTDIVITNGKDPIALGGVMGGDFSEVTEQTRHVVVEGAIFDPVSIRHTSRRLNLRSESSSRFEKGIATEFVDEAVDRACYLLERYASGTVLKDRVSHGDLGSFVTPIEITADKVNRTIGFNLTDEEIIDIFEQLGFDTENKNGEIIVNVPSRRKDISIKEDLIEEVARIYGYDDIPSTLPVFKDVTSGELTDRQFKTRTVKETLEGAGLDQAITYSLVSKNHATDFALQNRPTIELLMPMSEAHTTLRQSLLPHLIDAVSYNVARKNTNVKLYEIGRVFFGNGEGELPDEVEYLSGILTGDFVNNTWQGKKESVDFYLTKGIVERIAEKLNLQFDFRAGQIDGLHPGRTAIVSLNGKDIGFIGELHPTLAANNDLKRTYVFELNYDAMMEVSVGYINYEPIPRFPGVTRDIALEVNHEVTSSELLSIIHENGEDILNDTLVFDVYEGEHLEKGKKSIAIRLSYLDTENTLTDERVNVVHDKILEALKKHGAIIR

SEQ ID NO: 1069 - DNA, 522 bp, Artificial Sequence
  Description of Artificial Sequence: synthetic nucleic acid sequence
atgctcattgatatagttgttcttcttattatttgttactttatagtgatagggtttcgtagaggtatttggttatcgatattgcactttgcttcttcaattgtatctttatatattgcgtcacaacattatcaatctattgcgcaacgtttagttgtctttgtgccatttccgaaaacggtggcgtttgacatggtctatactattccttatgatcatttgcaatacagatttgaaaaagtgatagcatttattataatatttggtatgtgtaagcttattttgtatctagttgttgttacatttgataatataataacgtataaaaagatacatttagtaagtcggatatcgagtgtcgttttgagtatcatagcggtttttatatatttacaaattggactttatttattatcgctatatccgcattcatttatacagtaccaattatctcaatcgctattaagtcgagttgtgattgaacaaattccttatttatcacaatttattttaaatttataa

SEQ ID NO: 1070 - protein, 173 aa, Artificial Sequence
  Description of Artificial Sequence: synthetic amino acid sequence
MLIDIVVLLIICYFIVIGFRRGIWLSILHFASSIVSLYIASQHYQSIAQRLVVFVPFPKTVAFDMVYTIPYDHLQYRFEKVIAFIIIFGMCKLILYLVVVTFDNIITYKKIHLVSRISSVVLSIIAVFIYLQIGLYLLSLYPHSFIQYQLSQSLLSRVVIEQIPYLSQFILNL

SEQ ID NO: 1071 - DNA, 927 bp, Artificial Sequence
  Description of Artificial Sequence: synthetic nucleic acid sequence
atgggaaatgtcgtatacaaactcacgtcaaaagaaattcaatcattgatggctcaaactacttttgagacgacgaagttacctcaaggtatgaaagctcgtacgagatatcaaaatactgttatcaatatctatagttctggcaaagtaatgtttcaaggtaagaatgctgaacaacttgcgagtcaattgctaccaaataaacaatcaacaactggcaaacatacatcatcaaatacaactagtattcaatataatcgttttcattgtattggaagcgatgaagcaggcagtggcgactattttggtccattgactgtatgtgcagcttatgtgagccaatcacatatcaaaatcttaaaagaacttggtgtagatgattcaaaaaaactaagcgatactaaaatcgtcgatcttgcagaacagctcattacctttatcccgcattctttattaacattagataatgttaagtataacgaacgacaaagtctaggatggtctcaagttaaaatgaaagctgtcttacataatgaagctatcaaaaatgtgcttcaaaaaattgagcaagatcaactggattatattgttattgatcaatttgcaaagcgagaagtttatcaacattatgcattatcagcattaccttttcctgacaaaacaaaatttgaaacaaaaggtgaatctaaatcactagcaatcgcggcagcaagcattatttctcgttatgcatttgttaaacacatggaccacatctctaaaaaactccatatggaaataccaaaaggagcaagtaacaaagtagatttaattgccgctaaagtcattcaaaaatatgatattcaacaacttgatactatttcaaaaaaacattttaaaaacagagataaagcaattcatcttatgaatcaaaaatacaataaataa

SEQ ID NO: 1072 - protein, 308 aa, Artificial Sequence
  Description of Artificial Sequence: synthetic amino acid sequence
MGNVVYKLTSKEIQSLMAQTTFETTKLPQGMKARTRYQNTVINIYSSGKVMFQGKNAEQLASQLLPNKQSTTGKHTSSNTTSIQYNRFHCIGSDEAGSGDYFGPLTVCAAYVSQSHIKILKELGVDDSKKLSDTKIVDLAEQLITFIPHSLLTLDNVKYNERQSLGWSQVKMKAVLHNEAIKNVLQKIEQDQLDYIVIDQFAKREVYQHYALSALPFPDKTKFETKGESKSLAIAAASIISRYAFVKHMDHISKKLHMEIPKGASNKVDLIAAKVIQKYDIQQLDTISKKHFKNRDKAIHLMNQKYNK

SEQ ID NO: 1073 - DNA, 516 bp, Artificial Sequence
  Description of Artificial Sequence: synthetic nucleic acid sequence
atgaaaattgcaataggttgcgatcatattgttactgatacaaaaatggaagtttcacaacacttaaaatcacagggacatgaagtgatagatgttggaacttatgatttcacacgtacacattatccgatttatggaaaaaaggtaggagaaaaagttgcgagtggtgaagcagatttaggtgtatgtatttgtggtactggtgtaggaattagtaatgctgcaaacaaagtaccaggtgttagaactgctttagttagagatatgacatcagcgctttattctaaagaagagttaaacgccaatgttgtaagttttggcggtaaagtagcaggtgaattatttattttcgacatcgttgatgcattcattgaggcagagtacaaacctactgaagaaaataaaaaattaattgctaaaatcaatcatttagaagcacataacaatgaccaagctgatccacatttcttcgacgagttcttagaaaaatggaataaaggtgaatatcacgattaa

SEQ ID NO: 1074 - protein, 171 aa, Artificial Sequence
  Description of Artificial Sequence: synthetic amino acid sequence
MKIAIGCDHIVTDTKMEVSQHLKSQGHEVIDVGTYDFTRTHYPIYGKKVGEKVASGEADLGVCICGTGVGISNAANKVPGVRTALVRDMTSALYSKEELNANVVSFGGKVAGELFIFDIVDAFIEAEYKPTEENKKLIAKINHLEAHNNDQADPHFFDEFLEKWNKGEYHD

SEQ ID NO: 1075 - DNA, 978 bp, Artificial Sequence
  Description of Artificial Sequence: synthetic nucleic acid sequence
atgacaaaatcacaacaaaaagtgtcatcaattgagaaattaagtaatcaagaaggtattatttcagctttagcatttgatcaacgtggtgcattaaaaagaatgatggcagaacatcaatctgaaacaccaacagttgaacaaatagaacaattaaaagtacttgtttctgaagaattaactcaatatgcgtcttcaattttattagatccagaatatggtttaccagcatcagatgctcgaaataatgactgcggactattacttgcatacgaaaaaactggatatgatgtgaatgcgaaaggtcgtttgccagattgcttggtagaatggtctgcgaaacgtttgaaagagcaaggggccaatgcagttaaatttttactttattatgatgtagatgacacagaagaaattaacatacaaaagaaagcatatattgaacgaattggttcagaatgtgttgccgaagatattcctttcttcttggaagttttaacatatgacgacaatattcctgacaataaaagtgcagaattcgctaaagttaagccacgtaaagttaatgaagcaatgaagttattctctgaagatcgttttaatgtggatgtacttaaagttgaagtacctgtgaatatgaattttgtggaaggattttcagaaggagaagttgtttatactaaagaagaagctgcacaacatttccgtgatcaagatgcagctactcacttaccatatatttatttaagtgcaggtgtatcagcagaattgttccaagatacattaaaatttgcgcatgattctggtgcgcaattcaatggtgttttatgtggacgtgccacatggtcaggagcagttaaggtatacattgaagaaggagagcaagctgccagagaatggttgcgtacggtaggatttaagaatattgatgatttgaatacagtattgaaaacaacagctacatcatggaaaaacaaataa

SEQ ID NO: 1076 - protein, 325 aa, Artificial Sequence
  Description of Artificial Sequence: synthetic amino acid sequence
MTKSQQKVSSIEKLSNQEGIISALAFDQRGALKRMMAEHQSETPTVEQIEQLKVLVSEELTQYASSILLDPEYGLPASDARNNDCGLLLAYEKTGYDVNAKGRLPDCLVEWSAKRLKEQGANAVKFLLYYDVDDTEEINIQKKAYIERIGSECVAEDIPFFLEVLTYDDNIPDNKSAEFAKVKPRKVNEAMKLFSEDRFNVDVLKVEVPVNMNFVEGFSEGEVVYTKEEAAQHFRDQDAATHLPYIYLSAGVSAELFQDTLKFAHDSGAQFNGVLCGRATWSGAVKVYIEEGEQAAREWLRTVGFKNIDDLNTVLKTTATSWKNK

SEQ ID NO: 1077 - DNA, 315 bp, Artificial Sequence
  Description of Artificial Sequence: synthetic nucleic acid sequence
atgaatagagatgaggtacaattactcggatttgaaattgttgcctatgctggggatgcacgttcaaaattattagaagctttaaatgctgctaaagatagtgaatttgataaagcagaacaacttgtagaggaagcgaatgaatgtattgctaatgcacataaagcacaaaccaatcttctagctcaagaggctaaaggcgaggatatcgcatatagtatcactatgattcatggtcaagaccatttaatgacaacattacttttaaaagatttaatgaagcatttaattgaattatacaaaaaagggagctga

SEQ ID NO: 1078 - protein, 104 aa, Artificial Sequence
  Description of Artificial Sequence: synthetic amino acid sequence
MNRDEVQLLGFEIVAYAGDARSKLLEALNAAKDSEFDKAEQLVEEANECIANAHKAQTNLLAQEAKGEDIAYSITMIHGQDHLMTTLLLKDLMKHLIELYKKGS

SEQ ID NO: 1079 - DNA, 1749 bp, Artificial Sequence
  Description of Artificial Sequence: synthetic nucleic acid sequence
atgaataaattaatagcatggatagaaaaaggaaagccattctttgaaaaaatatcacgaaatatttatttaagagcgattcgtgatggatttattgctgctattccaattatcttattctcaagtatatttattttaattacctatgtaccaaatgtgtttggttttacttggagtaaaactatggaaggtatattgatgaaaccctataactatacaatgggaatagttggtttgcttgtagcaggaaccacagctaaatctttaactgattcttacaatcgaaaactagataaaacgaatcagattaactttatttcgacaatgatggcagctatttgtggatttttattcttagctgctgatcctgttaaagatggtggattttcaagtgcatttatgggaacaaaaggtttattgacagcctttatttctgcgtttattaccgtgattgtttataatttctttgtcaaaagaaatattaccattaaaatgcctaaagaagtaccaccaaatatatctcaagtatttaaagatattttccctttatcagccgtaattttaattttgtatgctttagacttactttctagagcaatagtccacacgaatgtagcaaatgcagtattaaaagtatttgagccactatttactgcggcagatggttggattggggtaacactcatattcggtgcgtttgcgttcttctggtttgtaggtattcatggaccttctattgttgaaccagcgattgcagcaattacttatgcgaaccttgaaacaaatttacacttaatacaagctggagaacatgctgataaagtaattacaccgggtacacagatgttcgtagcaactatgggaggaaccggtgcaacattagttgttccatttatgtttatgtggttaacaaaatcaaaaagaaataaagcgataggtagagcatcagtcgtacctacattctttggtgtcaatgaacccatactttttggtgcaccactagtactaaatccggtattctttataccttttatttttgcacctatagtaaatatatggatttttaaattttttgttgatgttttaaatatgaatagttttagtatctttttaccttggactactcctggtccactcggtattgttatggggactggatttgcattttggtcatttgtgttagcaatattacttattgttgttgatgtgattatttactatccattcttaaaagtatacgatgaacaagtgcttgaagaagaattaggaaataaagaagcaaataatgaattaaaagaaaaagtatcagcaaactttgatacgaaaaaagccgatgctattttagcaactgcaggggcaagtgaagcggatactgatgatacatcttcagttgatgaaacaacttctacatcctctacagatactattagtgaacaaacaaatgttttagttttatgtgcaggtggaggtacaagtggtttactagctaatgctttaaataaagctgctgaagagtatgaagtaccagtaaaagcagcagcaggtggttatggtgcacatatggatattatgaaagattatcaattaattatcttagcaccacaagttgcttcgaattttgaagatattaaacaagatactgatcgcttaggaattaaattagccaaaactgaaggcgctcaatatatcaagttaacaagagacggtgaggcggctttagaatttgtaaaacaacaatttaacaattaa

SEQ ID NO: 1080 - protein, 582 aa, Artificial Sequence
  Description of Artificial Sequence: synthetic amino acid sequence
MNKLIAWIEKGKPFFEKISRNIYLRAIRDGFIAAIPIILFSSIFILITYVPNVFGFTWSKTMEGILMKPYNYTMGIVGLLVAGTTAKSLTDSYNRKLDKTNQINFISTMMAAICGFLFLAADPVKDGGFSSAFMGTKGLLTAFISAFITVIVYNFFVKRNITIKMPKEVPPNISQVFKDIFPLSAVILILYALDLLSRAIVHTNVANAVLKVFEPLFTAADGWIGVTLIFGAFAFFWFVGIHGPSIVEPAIAAITYANLETNLHLIQAGEHADKVITPGTQMFVATMGGTGATLVVPFMFMWLTKSKRNKAIGRASVVPTFFGVNEPILFGAPLVLNPVFFIPFIFAPIVNIWIFKFFVDVLNMNSFSIFLPWTTPGPLGIVMGTGFAFWSFVLAILLIVVDVIIYYPFLKVYDEQVLEEELGNKEANNELKEKVSANFDTKKADAILATAGASEADTDDTSSVDETTSTSSTDTISEQTNVLVLCAGGGTSGLLANALNKAAEEYEVPVKAAAGGYGAHMDIMKDYQLIILAPQVASNFEDIKQDTDRLGIKLAKTEGAQYIKLTRDGEAALEFVKQQFNN

SEQ ID NO: 1081 - DNA, 1413 bp, Artificial Sequence
  Description of Artificial Sequence: synthetic nucleic acid sequence
atgactaagaaattacctgatgactttatttttggtggagcaaccgctgcttatcaagcagaaggagctactcagactgatggtaaagggcgtgtcgcttgggacacgtatttagaggagaattattggtacacagctgaaccagcaagtgatttttataacagatatcctgttgacttggaattaagtgaacgctttggtgtaaatggtatacgtatctcaattgcttggtctcgtatttttcctaaaggttacggtgaagtgaatcaaaaaggtgtcgagtattatcataatcttttcaaagaatgtcataaacgtcatgttgaaccttttgtaacattacatcactttgacacaccagaggtacttcacaaagatggagacttcttaaatcgtaaaacaatagactattttgtagattatgctgaattttgttttaaagaatttccagaagttaagtattggacaacattcaatgaaattgggccgattggtgatggtcaatatttagttggtaaattccctccaggtatcaaatatgactttgaaaaagtattccaatctcatcataatatgatggttgcacacgcacgtgctgttaaactttttaaagatgaaaattataagggagaaataggtgttgtccatgcattacctacaaaatatccatatgatccatctaatcctgaagatgtgagagcagccgaacttgaagacattattcataataaatttattttagatgcaacataccttggtaagtactcacgtgaaacgatggaaggagtacaacacatcttatctgtgaatggtggtcaattagagatttctgatgaagactacaaaattttagatgaagctaaggatttaaacgatttcttaggtattaattattatatgagtgactggatgcgtggttttgaaggcgaatctgaaataacacataatgccactggtgataaaggtggatctaagtatcaacttaaaggtgtaggacaacgtgaatttgatgttgatgttcctagaaccgattgggattggatgatttatccacaaggtttatatgaccaaattatgcgtgtagtaaaagattatccgaattatcataagatttatattactgaaaatggattaggatataaagatgtattcgacgaaaaagaaaaaacagtacatgacgatgcacgaattgactatattaaacagcatctaagtgtgatagcagatgcgattgcagatggtgccaatgttaagggatacttcttatggtctcttatggatgtattttcatggtcaaatggttatgaaaaaagatacggtttattctacgttgattttgaaacacaagaaagattccctaagaaaagtgcatattggtacaaagaacttgcagaaagtaaagaaattaaataa

SEQ ID NO: 1082 - protein, 470 aa, Artificial Sequence
  Description of Artificial Sequence: synthetic amino acid sequence
MTKKLPDDFIFGGATAAYQAEGATQTDGKGRVAWDTYLEENYWYTAEPASDFYNRYPVDLELSERFGVNGIRISIAWSRIFPKGYGEVNQKGVEYYHNLFKECHKRHVEPFVTLHHFDTPEVLHKDGDFLNRKTIDYFVDYAEFCFKEFPEVKYWTTFNEIGPIGDGQYLVGKFPPGIKYDFEKVFQSHHNMMVAHARAVKLFKDENYKGEIGVVHALPTKYPYDPSNPEDVRAAELEDIIHNKFILDATYLGKYSRETMEGVQHILSVNGGQLEISDEDYKILDEAKDLNDFLGINYYMSDWMRGFEGESEITHNATGDKGGSKYQLKGVGQREFDVDVPRTDWDWMIYPQGLYDQIMRVVKDYPNYHKIYITENGLGYKDVFDEKEKTVHDDARIDYIKQHLSVIADAIADGANVKGYFLWSLMDVFSWSNGYEKRYGLFYVDFETQERFPKKSAYWYKELAESKEIK

SEQ ID NO: 1083 - DNA, 627 bp, Artificial Sequence
  Description of Artificial Sequence: synthetic nucleic acid sequence
gtgagtagtgaaggaaaagtatattttgataaaaaattaagtgaagatgcagcaaaccctattgtcaaagtagaatttaaagataataaaaatggaaattttaaagaaaatgcttattggattaaagaagttctatcacaactaaaaagtcaatttggaattcaacaatttaattttgtaggacattcaatggggaacatgtcatttgctttttacatgaaaaattatggggacgatcgacatttgccacaacttaaaaaggaagttaatatagcgggagtttataacgggattttgaatatgaatgagaacgtgaatgaaattatcgttgataaacaggggaaaccaagtagaatgaatgccgcatatcggcaattgttatcactgcataagatttattgtggtaaggaaatagaagttttaaatatctacggagatttagaagatggctcacattcagatggacgtgtgtcaaatagctcttctcaatcgcttcaatatttactaagaggtagcactaagtcttatcaagaaatgaaatttaaaggtgcaaaggcacaacatagtcaattacatgagaataaagatgttgcaaatgaaatcatacaattcttatgggaaacttaa

SEQ ID NO: 1084 - protein, 208 aa, Artificial Sequence
  Description of Artificial Sequence: synthetic amino acid sequence
VSSEGKVYFDKKLSEDAANPIVKVEFKDNKNGNFKENAYWIKEVLSQLKSQFGIQQFNFVGHSMGNMSFAFYMKNYGDDRHLPQLKKEVNIAGVYNGILNMNENVNEIIVDKQGKPSRMNAAYRQLLSLHKIYCGKEIEVLNIYGDLEDGSHSDGRVSNSSSQSLQYLLRGSTKSYQEMKFKGAKAQHSQLHENKDVANEIIQFLWET

SEQ ID NO: 1085 - DNA, 993 bp, Artificial Sequence
  Description of Artificial Sequence: synthetic nucleic acid sequence
atgaagaggagatgtgtgttcatgagattaagtttacttgattatgtcccgttgttcgaagggcgtaccccaaatgacgccctaaagcatagtattaaattagcccaacacgctgagaaacttgggtacttacgatactgggttgcagaacatcatcaagtttattctgtcgtttctagtgcacctgaaataataatgatgtcgattttagaacacacacaacacatcagagttggtagtggaggtgtgatgttaccacattatagtccttataaagtagctgagcaatttaaaattatggaagcaagacacccccaacgtatcgatatggctatcggacgttcgccaagctttaaaaatgttaatgcagcactaaatgaaaacaaaaatgaaaaattaccattcaatactcagattactgatttgcttaaatacttcaataacgatacaactcaagaccatcgttttaaatcattattagctacacctatggttacttcatttcctcaactatatattttaggtatgagtaatagaagcgcaaaattagctgctcagcgcggactaccttttgttattgcacgaatgggacaatctgagacagaccttcatgaagctataagcacttatagaaaatattttaaagcttatcatggtgaaattaataatgcgaaaccatatgttattttagcaacttttgtggtaacagcttctaatttatctagagttaaacaattgctacatacgcttcaactttggttgatgcgtattaactatttaaatcaacctaagagttatccatcgattgaaacagcacagaacaagcattatagtcaacgagaattagaaaagcttgaaaagatgaaatcgaaaatcatatacgaatgccaaatgatgttgcggaacaacttaccttacttcatcaacaatttaaagtggatgaaatcatcatcttacctcatgtatttggtgaagacgctagaatggaattaa

SEQ ID NO: 1086 - protein, 330 aa, Artificial Sequence
  Description of Artificial Sequence: synthetic amino acid sequence
MKRRCVFMRLSLLDYVPLFEGRTPNDALKHSIKLAQHAEKLGYLRYWVAEHHQVYSVVSSAPEIIMMSILEHTQHIRVGSGGVMLPHYSPYKVAEQFKIMEARHPQRIDMAIGRSPSFKNVNAALNENKNEKLPFNTQITDLLKYFNNDTTQDHRFKSLLATPMVTSFPQLYILGMSNRSAKLAAQRGLPFVIARMGQSETDLHEAISTYRKYFKAYHGEINNAKPYVILATFVVTASNLSRVKQLLHTLQLWLMRINYLNQPKSYPSIETAQNKHYSQRELEKLEKMKSKIIYECQMMLRNNLPYFINNLKWMKSSSYLMYLVKTLEWN

SEQ ID NO: 1087 - DNA, 321 bp, Artificial Sequence
  Description of Artificial Sequence: synthetic nucleic acid sequence
gtgcatccccagcataggcaacaatttcaaatccgagtaattgtacctcatctctattcatttgaatatcctcccttacattatttgtttttccatgatgtagctgttgttttcaatactgtattcaaatcatcaatattcttaaatcctaccgtacgcaaccattctctggcagcttgctctccttcttcaatgtataccttaactgctcctgaccatgtggcacgtccacataaaacaccattgaattgcgcaccagaatcatgcgcaaattttaatgtatcttggaacaattctgctgatacacctgcacttaaataa

SEQ ID NO: 1088 - protein, 106 aa, Artificial Sequence
  Description of Artificial Sequence: synthetic amino acid sequence
VHPQHRQQFQIRVIVPHLYSFEYPPLHYLFFHDVAVVFNTVFKSSIFLNPTVRNHSLAACSPSSMYTLTAPDHVARPHKTPLNCAPESCANFNVSWNNSADTPALK

SEQ ID NO: 1089 - DNA, 753 bp, Artificial Sequence
  Description of Artificial Sequence: synthetic nucleic acid sequence
atgacacaacctgttaaaaaaggtatgaaagaaaaaggtatcgaaatcgttactgaagcaatggcaaaatctgcagaagaaactgaaaatggtgtcaaagtaacttatgaggcaaaaggtgaggaacaaactatcgaagctgattatgtattagttacagttggccgtcgccctaatactgatgaattaggattagaagaacttggtctgaaatttgctgatcgtggattactagaagtggacaaacaaagtcgtacttctattgaaaatatctttgcgattggagatattgtacctggattaccattagctcacaaagctagttatgaaggtaaagttgctgctgaagcgatagatggtcaagccgcagaggtagactatattggtatgccagcagtttgctttacagaaccagaattagcacaagttggttatactgaagctcaagcaaaagaagaaggtttatcaattaaagcttctaaattcccttatgcagctaatggacgagctttatcattagatgatacaaatggttttgttaagttaattacacttaaagaagatgatacgcttattggagcacaagttgtaggtactggcgcatctgatattatctctgaattaggtttagctattgagtcaggtatgaatgctgaagatatcgcattaactgtacatgcacacccaactttaggtgaaatgacaatggaagctgctgaaaaagcaattggttatccaattcatactatgtaa

SEQ ID NO: 1090 - protein, 250 aa, Artificial Sequence
  Description of Artificial Sequence: synthetic amino acid sequence
MTQPVKKGMKEKGIEIVTEAMAKSAEETENGVKVTYEAKGEEQTIEADYVLVTVGRRPNTDELGLEELGLKFADRGLLEVDKQSRTSIENIFAIGDIVPGLPLAHKASYEGKVAAEAIDGQAAEVDYIGMPAVCFTEPELAQVGYTEAQAKEEGLSIKASKFPYAANGRALSLDDTNGFVKLITLKEDDTLIGAQVVGTGASDIISELGLAIESGMNAEDIALTVHAHPTLGEMTMEAAEKAIGYPIHTM

SEQ ID NO: 1091 - DNA, 540 bp, Artificial Sequence
  Description of Artificial Sequence: synthetic nucleic acid sequence
atggatattggatacaaattacgtaatttaagaagaataaaaaatttgacacaagaggaattagcagagcgaactgatttatcaaaaggatatatatcacaaattgaaagtaatcatgcttcacctagtatggaaacatttttaaatttaatagaagtacttggtacttctgcaagtgacttttttaaagaaccgtcagatgagaaggtactttataagaagaaggaacagaccatttatgatgagtatgataaaggttatatcttgaactggcttgtagcgaattctaatgaatttgacatggaaccattaatcctaactttacgaccaaatgcctcatataaaaactttaaaccatctgaatcagatacttttatctattgtttaaatggtgaagtatcacttcaattaggaaatcaagtatataaagcttgtaaagaagatgtactttattttaaagcgaaagataaacatcgcttatataacgaaacagataaagaagtgaaggttttaatcgttgccacagcttcatatttatag

SEQ ID NO: 1092 - protein, 179 aa, Artificial Sequence
  Description of Artificial Sequence: synthetic amino acid sequence
MDIGYKLRNLRRIKNLTQEELAERTDLSKGYISQIESNHASPSMETFLNLIEVLGTSASDFFKEPSDEKVLYKKKEQTIYDEYDKGYILNWLVANSNEFDMEPLILTLRPNASYKNFKPSESDTFIYCLNGEVSLQLGNQVYKACKEDVLYFKAKDKHRLYNETDKEVKVLIVATASYL

SEQ ID NO: 1093 - DNA, 1095 bp, Artificial Sequence
  Description of Artificial Sequence: synthetic nucleic acid sequence
atgaatccattgctttcttttaaagatgtcagtaagggctttgaagatgtacaaatactaaatgaaattaatattgatattgaaccaggctatttttatacactattaggtccctcaggttgtggaaaaacaacaattttaaaactcatagcaggatttgaatatcccgatagtggagatattatatataaagataaacctattggtaaaatgccaccgaataagcgtaaggtaaatactgtattccaagactatgcattgtttccacatttaaatgtattcgacaatattgcatatggtttaaaattaaaaaaattaagtaagtcagaaattaagcgtaaggttactgaagcacttcagttggtgaaattaagtggttatgaacataggcaaatacaaggtatgagtggtggacaaaaacaacgtgtagccatagcacgggcaattgttaatgagcctgaaatattattattagatgagtctttatccgcattagatttaaaattacgaactgaaatgcaatatttattgagagaacttcaatcccgtttaggtataacctttatatttgtaactcatgatcaagaagaggccttagcattaagtgattatatttttgttatgaaagatggcaaaattcaacaatttggcacaccaatagatatatacgatgaaccagttaaccgatttgttgctgattttataggagagtccaacatagttcacggtacaatggttgaagattttgtcgttaatatttatggtcaaaattttgattgtgtagatatgggaataaaagaaaataaaaaagttgaagttgtaattagacccgaagacatttcacttgtttcacaaaatgatgggctatttaaagccaaagttgattctatgctatttagaggtgtacattatgaaatttgttgtaaagatagaaaagggtatgaatgggtaatacaatcaacaaaaaaagctaatgtaggtagtgaagtaggtctgtattttgaaccagaagcaatacacatcatggtaccaggtgaaactgaagaagaatttgataagcgaattgaaagttatgaggactatcatcatgcataa

SEQ ID NO: 1094 - protein, 364 aa, Artificial Sequence
  Description of Artificial Sequence: synthetic amino acid sequence
MNPLLSFKDVSKGFEDVQILNEINIDIEPGYFYTLLGPSGCGKTTILKLIAGFEYPDSGDIIYKDKPIGKMPPNKRKVNTVFQDYALFPHLNVFDNIAYGLKLKKLSKSEIKRKVTEALQLVKLSGYEHRQIQGMSGGQKQRVAIARAIVNEPEILLLDESLSALDLKLRTEMQYLLRELQSRLGITFIFVTHDQEEALALSDYIFVMKDGKIQQFGTPIDIYDEPVNRFVADFIGESNIVHGTMVEDFVVNIYGQNFDCVDMGIKENKKVEVVIRPEDISLVSQNDGLFKAKVDSMLFRGVHYEICCKDRKGYEWVIQSTKKANVGSEVGLYFEPEAIHIMVPGETEEEFDKRIESYEDYHHA

SEQ ID NO: 1095 - DNA, 642 bp, Artificial Sequence
  Description of Artificial Sequence: synthetic nucleic acid sequence
atgtttattgattcaatatggtatgccgctttaattactatgattaccttaataataagttacccagctgcgtactttatttcttattcaagatttcaaaatatactgcttatgttgttaattatccctacttggattaatttacttcttaagacctatgcatttattggtttgttgggacatgatggagttattaaccaagctctacatatatttcaaatacctaaattaaatttgttgtttacaagtggtgcatttttattggtggcgagttatatttatatcccatttatgattttgcctatatttaacagcatgaaagcaattcctaacaatattttgcaagcctctaatgatttgggcgcgagtacatttactacgtttcgtaaagtaatcgttcctttaacaagagaaggtattaaaacaggtgtgcaagtaacatttataccagctctttcactgtttttgattactaggttgattgccgggaacaaagtaatcaatgtaggtacagcaattgaagaacagttcttaactatacaaaattatggattaggttccactatagcactttttctcattatttttatggcctttttactcattattacaaaatcaaaatcatctaatgggaaggggtga

SEQ ID NO: 1096 - protein, 213 aa, Artificial Sequence
  Description of Artificial Sequence: synthetic amino acid sequence
MFIDSIWYAALITMITLIISYPAAYFISYSRFQNILLMLLIIPTWINLLLKTYAFIGLLGHDGVINQALHIFQIPKLNLLFTSGAFLLVASYIYIPFMILPIFNSMKAIPNNILQASNDLGASTFTTFRKVIVPLTREGIKTGVQVTFIPALSLFLITRLIAGNKVINVGTAIEEQFLTIQNYGLGSTIALFLIIFMAFLLIITKSKSSNGKG

SEQ ID NO: 1097 - DNA, 1338 bp, Artificial Sequence
  Description of Artificial Sequence: synthetic nucleic acid sequence
atgaaaagaccaataattcaaaaattaaatcacttgatagagaaaaaagctatctctatgcatgttcctggacataaaaacatgacaatcggctacttaaataggcttgatttagcaatggatatgacagaaattactggattagatgatatgcattatcctgaaggaattattttagaaagcatggagaattttaggaaacataaaaactatgatgctttcttattagttaacggaacgacttcaggtatattatcggttatccaagcgttttcgacaagaaaaggtaaatatttaattagtagaaatgttcataaatcagtatttcacggtttagacataacacaacaacaagcgacaataactaagacagatgtcagtaagaaaacgaatcaatatgtaaatccaaagataaatcaagataaaaatcaatattataaacttgccatctgtacataccctaattattacggtgaaacttttgatatttctcaatatatcaaacaattacatcacagagggataccgatattagtagatgaagcgcatggtgcacattttggtttatatggatttccagaatcctcaatgaattttaatgctgattacgttgtgcagtcatatcacaaaacactccctgcactaacaatgggatcagttatatatatacataaagatgcaccattaagacaacaagtcatagattatttaacttatttccaaacgtcaagtccttcgtacctcattatgtctagtttagaattagcgaataaattttataaagaatatgattctacattatttgaccaacgaagaaagatgttaattgatttattagtaaatatgggatttacagttatagaaccagaggatcctttaaaattggttgtgagttttgagggtgttgaaggttatgatgtgcaaaaatggtttgaggataaagaaatttatgtagaattagctgatatgtatcaagtgttactcgttctccccctatggcatgaaggagataaatttccttttaagttgttgattgaaaaaattagagaaattaacgtgccaaaaaaatgtacgcgcgacataaaacctcttaattttatgacgggttttagcgaatacaaaactgttcattttcaaaatacgaaagaagtgtctattaaaagggcagaaggtaaagttttagcacaacatatcgttccataccctccaggtataccggtgatgtttaaaggagaagtcgtgacgtctcatatgatagacttattaaataaatatgataaacaaaatattaaagttgaaggtttaaatcataaaaaaatattagttaaggatgaataa

SEQ ID NO: 1098 - protein, 445 aa, Artificial Sequence
  Description of Artificial Sequence: synthetic amino acid sequence
MKRPIIQKLNHLIEKKAISMHVPGHKNMTIGYLNRLDLAMDMTEITGLDDMHYPEGIILESMENFRKHKNYDAFLLVNGTTSGILSVIQAFSTRKGKYLISRNVHKSVFHGLDITQQQATITKTDVSKKTNQYVNPKINQDKNQYYKLAICTYPNYYGETFDISQYIKQLHHRGIPILVDEAHGAHFGLYGFPESSMNFNADYVVQSYHKTLPALTMGSVIYIHKDAPLRQQVIDYLTYFQTSSPSYLIMSSLELANKFYKEYDSTLFDQRRKMLIDLLVNMGFTVIEPEDPLKLVVSFEGVEGYDVQKWFEDKEIYVELADMYQVLLVLPLWHEGDKFPFKLLIEKIREINVPKKCTRDIKPLNFMTGFSEYKTVHFQNTKEVSIKRAEGKVLAQHIVPYPPGIPVMFKGEVVTSHMIDLLNKYDKQNIKVEGLNHKKILVKDE

SEQ ID NO: 1099 - DNA, 462 bp, Artificial Sequence
  Description of Artificial Sequence: synthetic nucleic acid sequence
gtgaaaagtggcaaagcacgagcacatacaaatattgcgttgattaagtattgggggaaagctgatgaaacttacattattcctatgaataatagtttatcagttaccttagatagattttatactgaaacaaaagtgacatttgaccctgattttactgaagattgccttattttaaatggtaatgaagtgaatgccaaagagaaagaaaagattcaaaactatatgaatatagtgagagatttggctggaaatcgtttgcatgcgcgaattgaaagtgaaaattatgtgccaactgaacaatcaaaagaaaaacaagctaatgaacaagcaaaagcgcaaaatctttttgctcgctggagaaaagaagagcgtttttgctatacgacttactatcactttttctctattttcaaatgttggatgcatagacgctcctttgactgtataagaagcaaataa

SEQ ID NO: 1100 - protein, 153 aa, Artificial Sequence
  Description of Artificial Sequence: synthetic amino acid sequence
VKSGKARAHTNIALIKYWGKADETYIIPMNNSLSVTLDRFYTETKVTFDPDFTEDCLILNGNEVNAKEKEKIQNYMNIVRDLAGNRLHARIESENYVPTEQSKEKQANEQAKAQNLFARWRKEERFCYTTYYHFFSIFKCWMHRRSFDCIRSK

SEQ ID NO: 1101 - DNA, 648 bp, Artificial Sequence
  Description of Artificial Sequence: synthetic nucleic acid sequence
atgggtccttctggatcaggtaaaacgactttactcaatgtgttaagttcaatagatactatttcagaaggaactgtggaagttgaaggcaaagaaattaataaactgagccacaaagaagtggcaaattttcgaaaacaacatctcggttttatttttcaagattatagcgttttacccacattaacagtaaaagaaaatattatgctaccactctcagtacaaaaattccataaatatgaaatggaacaaaattataaagaagtggctgaggcattaggtatttataacctgggaaataaatatccaagtgaaatttctggcggtcagcaacaacgtacggcggcagcccgggcattcgtccataaaccaacgattattttcgcagatgaacctactggcgcattagattctaaaagtgctcaagatttgttacaccgtctagaagatatgaataaacaatttaattcaaccattatgatggtgacacatgatccttcagccgctagttacgctgagagagtcattatgttgaaagacggtgatatacactcagaaatctaccagggtaacgattcaaaacaaacattttaccaagaaattatgaaacttcaaaccgcattaggtggtgtcagtcatgacatttaa

SEQ ID NO: 1102 - protein, 215 aa, Artificial Sequence
  Description of Artificial Sequence: synthetic amino acid sequence
MGPSGSGKTTLLNVLSSIDTISEGTVEVEGKEINKLSHKEVANFRKQHLGFIFQDYSVLPTLTVKENIMLPLSVQKFHKYEMEQNYKEVAEALGIYNLGNKYPSEISGGQQQRTAAARAFVHKPTIIFADEPTGALDSKSAQDLLHRLEDMNKQFNSTIMMVTHDPSAASYAERVIMLKDGDIHSEIYQGNDSKQTFYQEIMKLQTALGGVSHDI

SEQ ID NO: 1103 - DNA, 979 bp, Artificial Sequence
  Description of Artificial Sequence: synthetic nucleic acid sequence
atgctcaatatagaacaactagtattttttattgtaacaggaattttaggcactttaattggtatttttggttcaaaacttttacttgttatcgcttctaaattaatgaagttaaacacacatatctctattggctttgaaccccaagctatacttattactatcgtaatgttagctgtcgcttttttattgataatgatacaaaattacattttcttaaaaaaacacagcattttagctttgatgaaagacaattataccccggaagctacccaaaaacggataactacgtttgaagcaatcggcggcattttaggaattataatgatagtatttggatattatatgtctactgaaatgtttggtgtttttaaagccttaacaactgctttgattacaccttttagcatacttttcttaactattgttggtgctttcttattctttagaagttctgtatcacttatttttaaaacactaaaacatattaaacatggtcgtgtaaatatcacagatgttgtctttacatcatctatcatgcacagaatgaagaaaaatgcgatgtctctcacagttattgctatcatttcagctttcacggttagtattctttgcttcgcggcaattacacaatctaatactaatacaactttagaaatgacctctccagatgattttaatataagccagaataaaatagctgcgcaatttaaacataaactagatcaaggaaatttaaaatatcatcagcggacttatgaagtaatcaatccaaaaacattaagcgaccacgtcatgaagagtaaaaatggttctgatatgtctactaatacaacatcactaatgatgaactcacatctcaaaggtcatgaagctaaaataacgaatatacaatcatcaacaggattaatagatattcatttaaatcataagattacagttaaaggaaaatctaaacaatctattatcgttaaagaca

SEQ ID NO: 1104 - protein, 327 aa, Artificial Sequence
  Description of Artificial Sequence: synthetic amino acid sequence
  MOD_RES (327): variable amino acid
MLNIEQLVFFIVTGILGTLIGIFGSKLLLVIASKLMKLNTHISIGFEPQAILITIVMLAVAFLLIMIQNYIFLKKHSILALMKDNYTPEATQKRITTFEAIGGILGIIMIVFGYYMSTEMFGVFKALTTALITPFSILFLTIVGAFLFFRSSVSLIFKTLKHIKHGRVNITDVVFTSSIMHRMKKNAMSLTVIAIISAFTVSILCFAAITQSNTNTTLEMTSPDDFNISQNKIAAQFKHKLDQGNLKYHQRTYEVINPKTLSDHVMKSKNGSDMSTNTTSLMMNSHLKGHEAKITNIQSSTGLIDIHLNHKITVKGKSKQSIIVKDX

SEQ ID NO: 1105 - DNA, 402 bp, Artificial Sequence
  Description of Artificial Sequence: synthetic nucleic acid sequence
atggagaaaaggagtattaatatgaaaaaagtatttatgatcataagtatacttaccataactgttactttaagtgcatgtggaggttctggaaaacaaaaagagccatctaaggaaagtcaaaaatctgataaatatgattatgtttattatgaaatattaaatgatggagattctgaaacgccaaatgttgagattaaatataaagataaaaaaggtaaatcacatatagaaaaagctgatttagatcacgtgtatgaacatatactaggtgatggtaataaaaaaccatatattgtaaaggatgggaagaaaattcatgtatatcgaccaccatatatgatttatggtgatgatgatgttgaaggcaaagccgtttcgaaagatgaagttacgaagtaa

SEQ ID NO: 1106 - protein, 133 aa, Artificial Sequence
  Description of Artificial Sequence: synthetic amino acid sequence
MEKRSINMKKVFMIISILTITVTLSACGGSGKQKEPSKESQKSDKYDYVYYEILNDGDSETPNVEIKYKDKKGKSHIEKADLDHVYEHILGDGNKKPYIVKDGKKIHVYRPPYMIYGDDDVEGKAVSKDEVTK

SEQ ID NO: 1107 - DNA, 609 bp, Artificial Sequence
  Description of Artificial Sequence: synthetic nucleic acid sequence
atggtacttctcacgtcttctttaagtattgtcagtacatattctcatgcaacaacgtcaggaggaacgagtagttccagttcggcaagttctagttcaagtagcagtgcagcttctgcatctagaggttcaacttcttcaagtacaagtatgagtcgttctagtgcaataaatgcgtctcgcaatgcacaacaatctagtcagcgtgctgcccaacaagcaacaaaatcaagtcgtgtaacagcaaccaaaaataaaggacaacaaagtgtatcaagacaaaaagcacaatctcgttctttgatgccgtctcaaagaccttatgattcaagtgcaccatactcatctcaatatattgctacaacttattataataattggttattctattatatttttgcacattcgtttttaaatcaacatgaaaagaaaaacagtgtagatgctcagtttaatatgttgaaacaacaaatgaagcctcatgagaaactttatactgttactgtaaagactaaacaaggaaagcgtgtcgttgttgtacctaaaaaacaatatgacaaaattgaaaaaggaaaacacattaaagttaaaaatggtgttgttcagtaa

SEQ ID NO: 1108 - protein, 202 aa, Artificial Sequence
  Description of Artificial Sequence: synthetic amino acid sequence
MVLLTSSLSIVSTYSHATTSGGTSSSSSASSSSSSSAASASRGSTSSSTSMSRSSAINASRNAQQSSQRAAQQATKSSRVTATKNKGQQSVSRQKAQSRSLMPSQRPYDSSAPYSSQYIATTYYNNWLFYYIFAHSFLNQHEKKNSVDAQFNMLKQQMKPHEKLYTVTVKTKQGKRVVVVPKKQYDKIEKGKHIKVKNGVVQ

SEQ ID NO: 1109 - DNA, 939 bp, Artificial Sequence
  Description of Artificial Sequence: synthetic nucleic acid sequence
atgaattggatggaactctcaattgtagttaatcacgaagtagaatacgatgttacagaaattcttgaaagttatggctctaatggagttgtaattgaagattcaaatattttagaagaacaacctattgataagtttggagaaatttatgacttaaaccctgaagactatcctgaaaaaggagttcgattaaaagcttactttaatgagttcacttataatgaaaacttaaaatccaacatcaattatgaaatattaagtcttcagcaaattgataaaacaatttatgattaccaggaaaaacttattgccgaagtagattgggaaaatgaatggaagaattattttcatccatttagagcttcaaaacaatttacgatagtaccaagttgggaatcatatgttaaagaaaatgataacgaattgtgcattgaattagatccaggtatggcttttggaacaggtgatcatccaacgacaagtatgtgtttaaaagcaattgaaacttttgtaaaaccaactgattcagttatcgacgttggaacagggtcaggcattttaagtattgctagtcatttacttggagttcaaagaataaaggcattagatatagatgaaatggctgtaaatgtggcaaaagaaaactttaagaaaaatcattgtgatgatgcaattgaagcagttccaggtaatttattaaaaaatgaaaatgagaaatttaatatcgttattgcaaatattcttgctcatattattgaagaaatgattgaagatacttataatactttaattgaagatggttattttatcacatcaggtattattgaagaaaagtatcaagatatagaatcacaaatgaagcgtattggtttcaaaattatttcagtagaacatgacaatggctgggtttgtatagttggtcagaaagtgagtggataa

SEQ ID NO: 1110 - protein, 312 aa, Artificial Sequence
  Description of Artificial Sequence: synthetic amino acid sequence
MNWMELSIVVNHEVEYDVTEILESYGSNGVVIEDSNILEEQPIDKFGEIYDLNPEDYPEKGVRLKAYFNEFTYNENLKSNINYEILSLQQIDKTIYDYQEKLIAEVDWENEWKNYFHPFRASKQFTIVPSWESYVKENDNELCIELDPGMAFGTGDHPTTSMCLKAIETFVKPTDSVIDVGTGSGILSIASHLLGVQRIKALDIDEMAVNVAKENFKKNHCDDAIEAVPGNLLKNENEKFNIVIANILAHIIEEMIEDTYNTLIEDGYFITSGIIEEKYQDIESQMKRIGFKIISVEHDNGWVCIVGQKVSG

SEQ ID NO: 1111 - DNA, 795 bp, Artificial Sequence
  Description of Artificial Sequence: synthetic nucleic acid sequence
atgaatcaaagcgctgatgaaaatcagtgcttttttattgaaaacaaagaagactatcatcatatcgtgaatgttatgcgctataaagaaggacaaaatattattgtcactttttcagatgaaaatgtattcaaatgtaaaattatttcaataaacgatcaatcgattgaaattaaattagtagaaaagcaacaaattaacactgaactacctcagaacattacaatatgtagtggtttaatcaaagcagacaaatatgaatggatgatacaaaaagcaactgaaatgggggcaaatgagtttatagctgtagctatggaacgttctgtggtcaagctcaatgattctaaagtagaaaagaaattatcgagatggcaaaaaattataaaggaagctgcagaacaaagttatcgtttaacaataccaaatataaaatttaagtcgaatttaaaagaaatttatggtatgataagtcaatatgactatgttcttatagcatatgaagaacaagcaaagcacggtgaattaagtcaatttaagcaaacaattaaacaatttaagacacaggatcgtgttttaatcatatttggaccaaatgaagaaactaatgcggattctaaattcacaaaattttatcaaaaccaaatcgacaaactgaaaaatgcaaataacgctcaacttaataacgaaaatcaaagtaaagttaacaacatgcttgaagacatcaatacaaaatttgatagtattaaagctaaactagaaaatatcttgaatggatcaaattcaggaaactaa

SEQ ID NO: 1112 - protein, 264 aa, Artificial Sequence
  Description of Artificial Sequence: synthetic amino acid sequence
MNQSADENQCFFIENKEDYHHIVNVMRYKEGQNIIVTFSDENVFKCKIISINDQSIEIKLVEKQQINTELPQNITICSGLIKADKYEWMIQKATEMGANEFIAVAMERSVVKLNDSKVEKKLSRWQKIIKEAAEQSYRLTIPNIKFKSNLKEIYGMISQYDYVLIAYEEQAKHGELSQFKQTIKQFKTQDRVLIIFGPNEETNADSKFTKFYQNQIDKLKNANNAQLNNENQSKVNNMLEDINTKFDSIKAKLENILNGSNSGN

SEQ ID NO: 1113 - DNA, 642 bp, Artificial Sequence
  Description of Artificial Sequence: synthetic nucleic acid sequence
atggataaatccataattactattaaacaagcacattcaattgaaaatgtgataagtaaatcacgctttatagcatatattaagcctgtttcgactgaaaatgaagcaaaagcttttatagatgaaattaaaacaaaacataaagatgcaactcataattgttcagcctatactgtcggaccagagatgaatattcaaaaggcaaacgacgatggcgaaccaagtggaacagctggcatcccaatgcttgaaatactgaaaaaacaagagatacacaatgtttgtgtcgtcgtgacacgctacttcggtggtatcaagttaggtgcaggcggtcttattagagcatatagcggcgccgtgcgtgatgtgatatatgatataggtagagtcgaactaagagaagctattccagtaaccgttacgttagattatgatcagacaggtaaatttgaatatgaacttgcctctactacattcttattaagagaacaattttataccgataaagtaagttatcaaattgacgtagtaaaaaatgaatatgatgcttttatagactttttaaatcgaattacttctggaaattatgatttgaaacaagaagaccttaaactattaccttttgatattgaaaccaattaa

SEQ ID NO: 1114 - protein, 213 aa, Artificial Sequence
  Description of Artificial Sequence: synthetic amino acid sequence
MDKSIITIKQAHSIENVISKSRFIAYIKPVSTENEAKAFIDEIKTKHKDATHNCSAYTVGPEMNIQKANDDGEPSGTAGIPMLEILKKQEIHNVCVVVTRYFGGIKLGAGGLIRAYSGAVRDVIYDIGRVELREAIPVTVTLDYDQTGKFEYELASTTFLLREQFYTDKVSYQIDVVKNEYDAFIDFLNRITSGNYDLKQEDLKLLPFDIETN

SEQ ID NO: 1115 - DNA, 1113 bp, Artificial Sequence
  Description of Artificial Sequence: synthetic nucleic acid sequence
gtgaggtacaacttattcaatgaaggtgaactgatgtatacactattacttatagcttttactatgatagtcagtttaataattacacccattattattgtaatatcaaaaaaattagatttagtagatcgtcctaatttcagaaaagtacatacgaaacctatctcagtgatgggaggaacggtcattttattttctttcttaatagggatttggctcggacaccctattgaacgtgaggttaaaccgcttatattaggtgcaattacaatgtatatggttggattgattgatgatatttacgatctaagaccttatttaaagttagcaggtcaaattgttgcagctttaattgttacgttttatggaattacaatagactttatttcattgccaattggtccaacgattcattttggcatattcagcattcctattacagtaatatggattgtagcaattaccaatgctattaatcttatcgacggacttgatggacttgcctcaggcgtctcagcattggcattaatgactattggattcatcgctattttacaagcgaacatatttattatcatgatttgctgtgtacttttagggtctttacttggtttcttattctataactttcacccagcgaaaattttcctaggtgatagtggtgcattaatgataggatttattatcggtttcttatccttactcggctttaagaatatcacatttattgcattattctttcctatagttatattagcggtgccatttattgatacattatttgcaatgattcgtcgaatgaaaaaagggcaacatataatgcaagcggacaagtcacatttacatcataaattacttgctttaggatatacgcatagacaaaccgttttacttatttattcaatagcgattatgtttagtttatctagtgttatcctctatttatcccaaccgttgggtgcacttatgatgttcattctcattgtctttacgattgagttgatcgttgaatttactggattaatagatgataattatcgaccaatattaaatttaattacaaaaaaaggaaatggtaagcaacatcattatgatgagcatcaccgttcataa

SEQ ID NO: 1116 - protein, 370 aa, Artificial Sequence
  Description of Artificial Sequence: synthetic amino acid sequence
VRYNLFNEGELMYTLLLIAFTMIVSLIITPIIIVISKKLDLVDRPNFRKVHTKPISVMGGTVILFSFLIGIWLGHPIEREVKPLILGAITMYMVGLIDDIYDLRPYLKLAGQIVAALIVTFYGITIDFISLPIGPTIHFGIFSIPITVIWIVAITNAINLIDGLDGLASGVSALALMTIGFIAILQANIFIIMICCVLLGSLLGFLFYNFHPAKIFLGDSGALMIGFIIGFLSLLGFKNITFIALFFPIVILAVPFIDTLFAMIRRMKKGQHIMQADKSHLHHKLLALGYTHRQTVLLIYSIAIMFSLSSVILYLSQPLGALMMFILIVFTIELIVEFTGLIDDNYRPILNLITKKGNGKQHHYDEHHRS

SEQ ID NO: 1117 - DNA, 867 bp, Artificial Sequence
  Description of Artificial Sequence: synthetic nucleic acid sequence
atgaagattgcagttatgaccgattctacaagttatttaccacaacatataatagaacaatataacataccagtcgcttcactaagtgtaactttcgatgatggagtgaatttcactgagagtgatgatttttctgtagatgatttttataaaaaaatggcttcatctaaaactataccaacaacaagccaacctgctattggcgattggattgaaaattttgagagattaagagaacaaggatacactgatgtcatcgtgattaacttatcaagtggtataagcggaagctatccttcagcaacacaagctggtgaaatggttgaagatattcaagtacatacgtttgatagccgtcttgctgcgatgattgaaggtagctttgcaatttacgctgctcaattggtacaaaagggatataaacctgatgatattattaatgaactaactgaaataagacaacatattggtgcatacttaattgttgatgatttaaaaaatttacaaaaaagtggtcgtatcactggagctcaagcttgggtaggtacattattgaaaatgaaacctgtcttgcgttttgaagaagatggtaaaatacatccacacgaaaaagtacgtactaaaaaacgtgcgctaaaatctttagaaacaaacatttttaaagaaatagaaggcatggaagatgtgacagtatttgtaataaacggtgataaaactgaagatggaaagtcatttcttcagcaattaaaggaagatcatcctaatgttcatattcagtattgtgaatttggaccagtgatagcatcacatttaggatcaggcggtttaggattgggttacttcccaagaagaatcgacattaattaa

SEQ ID NO: 1118 - protein, 288 aa, Artificial Sequence
  Description of Artificial Sequence: synthetic amino acid sequence
MKIAVMTDSTSYLPQHIIEQYNIPVASLSVTFDDGVNFTESDDFSVDDFYKKMASSKTIPTTSQPAIGDWIENFERLREQGYTDVIVINLSSGISGSYPSATQAGEMVEDIQVHTFDSRLAAMIEGSFAIYAAQLVQKGYKPDDIINELTEIRQHIGAYLIVDDLKNLQKSGRITGAQAWVGTLLKMKPVLRFEEDGKIHPHEKVRTKKRALKSLETNIFKEIEGMEDVTVFVINGDKTEDGKSFLQQLKEDHPNVHIQYCEFGPVIASHLGSGGLGLGYFPRRIDIN

SEQ ID NO: 1119 - DNA, 870 bp, Artificial Sequence
  Description of Artificial Sequence: synthetic nucleic acid sequence
atgggacataatattgctattgtatcacctcgtgtagacgttattattgagataagtcatcgaattaaagatgcttttatcgatgaacatatagatgtgctacatcaatctagtagacagcaatataatggtcattttgttattgctactatccatcaattattgaggtttaaacagcattttgatactgtatttgtcgatgaggtagatgcttttccgttgtctatggatccacaattatcaaatgcaatacaacttgcttcaaaatcgaatcattcacatattttcatgacggccacaccaccgcgtcattttttaaaacaattccccccagaaaaaataattaagttaccagcccgttttcaccgatccccccttcctattcctaagttcaaatatttcaaattaaaatcaacacgaaaacaaaatttattacttaatatatttagatatcaaattaaccaacaacgttttactttggtctttattaataatatagaaattatgaataaaatgtatcaacagtataaaatggacatccctgatttgatttgcgttcacagtgaagatgatttacgatttgaaaaaattgaagctttaagacgaggacaacacaaaattgtattcactacaactattttagaaagaggatttacaatgacacacttagatgtcgttgtagttgatgctggaagttttcaacaagaggctttaattcaaattgctggtcgcgtaggacgtaaacagcagtctccaagtggcttagttttatttcttcatgaaggtgttacattatcgatgattttagctaaaagaaacattatttcaatgaatcgtttagcaattaaaaggggatggattgatgcgtaa

SEQ ID NO: 1120 - protein, 289 aa, Artificial Sequence
  Description of Artificial Sequence: synthetic amino acid sequence
MGHNIAIVSPRVDVIIEISHRIKDAFIDEHIDVLHQSSRQQYNGHFVIATIHQLLRFKQHFDTVFVDEVDAFPLSMDPQLSNAIQLASKSNHSHIFMTATPPRHFLKQFPPEKIIKLPARFHRSPLPIPKFKYFKLKSTRKQNLLLNIFRYQINQQRFTLVFINNIEIMNKMYQQYKMDIPDLICVHSEDDLRFEKIEALRRGQHKIVFTTTILERGFTMTHLDVVVVDAGSFQQEALIQIAGRVGRKQQSPSGLVLFLHEGVTLSMILAKRNIISMNRLAIKRGWIDA

SEQ ID NO: 1121 - DNA, 459 bp, Artificial Sequence
  Description of Artificial Sequence: synthetic nucleic acid sequence
atggaacaattgttttgtgattatagttatgatggtatgatgaaagaaatcatacaccagtataagattaagcgagacttctatttggcagaagtattggcgagaaaattagttttacctcaaacgcaatatgattatatagttcccattccttctccaattgaacgcgacattgaacgtacatttaatcctgtgaccactgtcttagataaaatgggcatctcatatcaagatgtattaggtacacatatacgtcctaagcagtcaaagttaggaaagattgaacgttcaaaagcccctaatccattttatataaaagatgaagagataaatatcgaagggaaagtaatactactcatagatgatatttatacaacagggttaactattcatcacgcagggtgtaaattgtacgataaaaaagtcagaaaattcaaagtgtttgcgtttgcacgataa

SEQ ID NO: 1122 - protein, 152 aa, Artificial Sequence
  Description of Artificial Sequence: synthetic amino acid sequence
MEQLFCDYSYDGMMKEIIHQYKIKRDFYLAEVLARKLVLPQTQYDYIVPIPSPIERDIERTFNPVTTVLDKMGISYQDVLGTHIRPKQSKLGKIERSKAPNPFYIKDEEINIEGKVILLIDDIYTTGLTIHHAGCKLYDKKVRKFKVFAFAR

SEQ ID NO: 1123 - DNA, 753 bp, Artificial Sequence
  Description of Artificial Sequence: synthetic nucleic acid sequence
atgaatgccatgaaagataatactaataaattgcatcaagcgttaactaaaatacaacaaaaaatgcccggggatgggggagacacgcctcatcaagatatggctaaaccatataaactaacaacgcactatttatatggttcatcagattctacgtattttgatatgataaatcctattttaattggattttttgtctttttctttacgtttttaatttctggcattggcttattaaaagagcgtacttctggcacattagaacgtttacttgcctctccaataaaaagaagtgaaattatttttggttatgttttcggttatggtagttttagcgttatccaaacaatagttgtcgtattatatgcaatttatattctgcatatagacttagtaggttcgatatggttcgtactattaacggcaatattaacagcgcttgtcgctgtgacattcggtatattattatctacctttgcttcctcagaattccaaatgattcaatttataccattagtcatagtgccacaagtactatttgcaggcattataccaattgaatcaatgaataaaggattacaatacttttcacatatcatgccgttattctataccggccaaacgatgcaaaatattatgatcaagggttatggattcaacgatatttacatttatttaattgtgttattcgcatttttcattttcttattgattttaaatattataggcatgaaaagatatagaaaagtttag

SEQ ID NO: 1124 - protein, 250 aa, Artificial Sequence
  Description of Artificial Sequence: synthetic amino acid sequence
MNAMKDNTNKLHQALTKIQQKMPGDGGDTPHQDMAKPYKLTTHYLYGSSDSTYFDMINPILIGFFVFFFTFLISGIGLLKERTSGTLERLLASPIKRSEIIFGYVFGYGSFSVIQTIVVVLYAIYILHIDLVGSIWFVLLTAILTALVAVTFGILLSTFASSEFQMIQFIPLVIVPQVLFAGIIPIESMNKGLQYFSHIMPLFYTGQTMQNIMIKGYGFNDIYIYLIVLFAFFIFLLILNIIGMKRYRKV

SEQ ID NO: 1125 - DNA, 651 bp, Artificial Sequence
  Description of Artificial Sequence: synthetic nucleic acid sequence
atgaaccaagatattaagtcattagttgaaaccattgtgcctcaacttgaatatttaagcgataaacaaagacgtgtcatagaaagtgctattgcattattcagtgaacaaggatttgataaaacgagtactaaagaaattgcgcagcgtgcaaatgtcgcagaaggaacggtatttaagcagtttaaaagtaaaagaatgttattatacgcaggattaattccaattttaagagatcatatcgcacctgtagctgttaaacaatttacagatgaattaaacgaagtaacccattttgatgcatttataaatttatttgtagaaaatagatctaaatttatttatgacaatagacgtattcttaaagtcatcttaaatgaagctattactaatgaagattttcaaaatatattagttaatattttcacccataaattaacgagtaaattaaaagataaaattgaatggtttatcgataatggtgacatgcgcaatgttaaacctgagttttttatacgtacggtcgtcgcacaaattttaaatttaaatatcccaataatagttaataatgactatactaagggtgaaaactatcagcagtttgcgttattcgtaaaagagggcttatataggatgtttaagcgagaatag

SEQ ID NO: 1126 - protein, 216 aa, Artificial Sequence
  Description of Artificial Sequence: synthetic amino acid sequence
MNQDIKSLVETIVPQLEYLSDKQRRVIESAIALFSEQGFDKTSTKEIAQRANVAEGTVFKQFKSKRMLLYAGLIPILRDHIAPVAVKQFTDELNEVTHFDAFINLFVENRSKFIYDNRRILKVILNEAITNEDFQNILVNIFTHKLTSKLKDKIEWFIDNGDMRNVKPEFFIRTVVAQILNLNIPIIVNNDYTKGENYQQFALFVKEGLYRMFKRE

SEQ ID NO: 1127 - DNA, 639 bp, Artificial Sequence
  Description of Artificial Sequence: synthetic nucleic acid sequence
atgaaattagaggaaattaatacaatagataaaaatgatttttctaaaaaaccaacttatggggctgaaaaaaattattttaaaattgctgttatggattttcaaaaagagagtacaaagagactagacattgatatatatgatactggaactaagatagcaaaatattggagcgaaggatttttatcaatttatccgttgagagataatgaattaaatactaatgatattattaactctttaaaagaaaatactctgttcaatgaattacctaatataacagaaaaagatcttaatcaatctactaatgactttctaagtgataatagagaattttcatttgtaaaattaagagatcatattaatcagcgctttgaaacagacttcaaaaatgatgaactatttaaagatgacaaattaaatcatatagacgcagaatttaatttagaaccaaggattgtaggtaaatatttacagaaaaaaataaaaattaatgatgtaatcagtttagatattaataatattagtaaagcaacaaaaggaggcctaatgaaagtgtctaatgataaaagatacttaaaaatacgtctcgaaacaaatattaaagaagaccttcccgatattcaggaaggagattga

SEQ ID NO: 1128 - protein, 212 aa, Artificial Sequence
  Description of Artificial Sequence: synthetic amino acid sequence
MKLEEINTIDKNDFSKKPTYGAEKNYFKIAVMDFQKESTKRLDIDIYDTGTKIAKYWSEGFLSIYPLRDNELNTNDIINSLKENTLFNELPNITEKDLNQSTNDFLSDNREFSFVKLRDHINQRFETDFKNDELFKDDKLNHIDAEFNLEPRIVGKYLQKKIKINDVISLDINNISKATKGGLMKVSNDKRYLKIRLETNIKEDLPDIQEGD

SEQ ID NO: 1129 - DNA, 1215 bp, Artificial Sequence
  Description of Artificial Sequence: synthetic nucleic acid sequence
atgagttattattggtattatgaaattttaaaatttgataatgatttaaataattatttctctaatgaagacttaaaagttttttcttctaaatgtctttcaaatgaagaagaagatgaattatatttacaaggatcaaaaatatttattgatgacgactctaaaattaaacattcagaaagtattaaagatgtgtatgagtactattatgaaaaattcaggaaattagaaaattctaaatctgatttttttatatttaaggacagtaaaaagttatttgaaaaaattgaagtacctattaaacataatacgatacgaggagaatatattgaagatattactgtcagaaatataaatagcaatattttgcaaattaatccttattttttcaatgaaatgctggaagtatataaagaatatgaaaaagaatgcagtaatataaggaagttgcgtaatttacaatctgcaatcattttatctgataaaatttcatttgataacgatatcatgacattatactttcatgattcagataatgaagaagataagttccaaaagaacaagtttgatttttcaaacgctaatgtatcttcattatatttttatgtttttgattgggtagatattgaaaacgacaatctagaaatagtggatttaaaatataaagtagcaaaaatttatttatctaaattcgaaaaggtttctgatgacgaaaaaataaagaaaaaagaaatacatcatgacttaaatgttatgtataatttaatacttcaaaaaaaatctcaaaagtattatgaatataacaaagtaataaggaatcataaaatagaaatcattcaacgaaaaatagaattaaaaaatgaacttaataaaaaattaatgagcatgatggtattcattcccgtaactatttatggtttatatataacaatccaaaagagcaaagaatcactaaacattttcaataatgactttaatattatttatttcagttctctagttgcacttatatttataatattatctttaataaatgatgtgaaatctattaatagtgactatgaaacaattattttagaaatcataaatacatataaaataaacaaaagtatggacgattttggaaataatataagtttaagtgattttaaattttctttattttggatttttataatgattataactcttataatttttattttaattaagtga

SEQ ID NO: 1130 - protein, 404 aa, Artificial Sequence
  Description of Artificial Sequence: synthetic amino acid sequence
MSYYWYYEILKFDNDLNNYFSNEDLKVFSSKCLSNEEEDELYLQGSKIFIDDDSKIKHSESIKDVYEYYYEKFRKLENSKSDFFIFKDSKKLFEKIEVPIKHNTIRGEYIEDITVRNINSNILQINPYFFNEMLEVYKEYEKECSNIRKLRNLQSAIILSDKISFDNDIMTLYFHDSDNEEDKFQKNKFDFSNANVSSLYFYVFDWVDIENDNLEIVDLKYKVAKIYLSKFEKVSDDEKIKKKEIHHDLNVMYNLILQKKSQKYYEYNKVIRNHKIEIIQRKIELKNELNKKLMSMMVFIPVTIYGLYITIQKSKESLNIFNNDFNIIYFSSLVALIFIILSLINDVKSINSDYETIILEIINTYKINKSMDDFGNNISLSDFKFSLFWIFIMIITLIIFILIK

SEQ ID NO: 1131 - DNA, 336 bp, Artificial Sequence
  Description of Artificial Sequence: synthetic nucleic acid sequence
atgaatgatataactaaacgtttattaaaaccaataattaatgagctttcttcaatttttaataaccttcatattaataagatcaaagctaaaaaaggacgtaaaattgaatggttagagtttacctttgacgctgagaaacgcattcacaacaagcgacaaccacaaatgactaatataggtaagtcgcgccaatataccaatcgtgaaaaaacacctaaatggttagacgaaaagatatataaacaatctcaagagatacataatgaagatgcaaaattaaaacaagatcgagaggcatttcaacgtcaattagaagaaaaatgggaggaataa

SEQ ID NO: 1132 - protein, 111 aa, Artificial Sequence
  Description of Artificial Sequence: synthetic amino acid sequence
MNDITKRLLKPIINELSSIFNNLHINKIKAKKGRKIEWLEFTFDAEKRIHNKRQPQMTNIGKSRQYTNREKTPKWLDEKIYKQSQEIHNEDAKLKQDREAFQRQLEEKWEE

SEQ ID NO: 1133 - DNA, 675 bp, Artificial Sequence
  Description of Artificial Sequence: synthetic nucleic acid sequence
atgaactatttcagatataaacaatttaacaaggatgttatcactgtagccgttggctactatctaagatatgcattgagttatcgtgatatatctgaaatattaaggggacgtggtgtaaacgttcatcattcaacggtctaccgttgggttcaagaatatgccccaattttatatcaaatttggaagaaaaagcataaaaaagcttattacaaatggcgtattgatgagacgtacatcaaaataaaaggaaaatggagctatttatatcgtgccattgatgcagagggacatacattagatatttggttgcgtaagcaacgagataatcattcagcatatgcgtttatcaaacgtctcattaaacaatttggtaaacctcaaaaggtaattacagatcaggcaccttcaacgaaggtagcaatggttaaagtaattaaagcttttaaacttaaacctgactgccattgtacatcgaaatatctgaataacctcattgagcaagatcaccgtcatattaaagtaagaaagacaaggtatcaaagtatcaatacagcaaagaatactttaaaaggtattgagtgtatttacgctctatataaaaagaaccgcaggtctcttcagatctacggattttcgccatgccacgaaattagcatcatgctagcaagttaa

SEQ ID NO: 1134 - protein, 224 aa, Artificial Sequence
  Description of Artificial Sequence: synthetic amino acid sequence
MNYFRYKQFNKDVITVAVGYYLRYALSYRDISEILRGRGVNVHHSTVYRWVQEYAPILYQIWKKKHKKAYYKWRIDETYIKIKGKWSYLYRAIDAEGHTLDIWLRKQRDNHSAYAFIKRLIKQFGKPQKVITDQAPSTKVAMVKVIKAFKLKPDCHCTSKYLNNLIEQDHRHIKVRKTRYQSINTAKNTLKGIECIYALYKKNRRSLQIYGFSPCHEISIMLAS

SEQ ID NO: 1135 - DNA, 378 bp, Artificial Sequence
  Description of Artificial Sequence: synthetic nucleic acid sequence
atgcaattttattatagtaattgtgaacagaatgcatcaaacttattagtcatcaacgtacaacctaatgaaggattttctttatgtgtgaatggtaagaaaagtaatcaaaataatgaaatgcaaaaagtgaagctttcttatactatgccgattaaagataaaatgaacacagttgatgcatatgaaaatcttatttacgatacattaattggagaacaaacaaaatttacgcattgggaagaattaaaaattcttggaaatttattgatgatattgaaaatgtatggaaacaagaatagccacagtttcctaattatgcctttggatgctatgggcctaaagaaagtgaaaaattacttagtgaagacggattga

SEQ ID NO: 1136 - protein, 125 aa, Artificial Sequence
  Description of Artificial Sequence: synthetic amino acid sequence
MQFYYSNCEQNASNLLVINVQPNEGFSLCVNGKKSNQNNEMQKVKLSYTMPIKDKMNTVDAYENLIYDTLIGEQTKFTHWEELKILGNLLMILKMYGNKNSHSFLIMPLDAMGLKKVKNYLVKTD

SEQ ID NO: 1137 - DNA, 2259 bp, Artificial Sequence
  Description of Artificial Sequence: synthetic nucleic acid sequence
atggattttattaatattacaggtgcttcacaaaataacttgaaaaacatagatgtaaatatcccaaaacacttagtaacggtatttacaggtcgttctggttcagggaaatcatctttagtgtttaatactgttgctgcggagtctgaacagctactaaatgaaagttattctagttatattcaatttcatttaaatcaacaacccagaccgaaagtaaagaaaattaaaaatcttcctgtagcaatgacgattaatcagaaaagattcaatgggaattctcgctccacggtaggaacagtttcagatatatatgcttctgttagattactgtggtctagaataggcgaaccgtttgttggttattcagatgcatattccttcaatagtcctaagggcatgtgtaaaacttgtgagggattaggatatattgaagacattaacttagatgaattgctagattgggataagtctttaaatgaaggtgcaatagactttccttcttttggaccagacaaagagcgtggtaaagcctatcgagatagtggtttatttgataataataaaaaattgaaagattatacagaagatgaattagaattgtttttatatcaagagccaatgacattaaaaaatcctcctaaagaatggagaaagtcagctaaatatgtaggactaatacctagattcagtagaatatttttaggtgataaagaatttaataagaaacgctacgccaaacatcttaaaaatgtagtaaataataaaatctgttcaacatgtaaaggtcaacgtctaaactcgaaaatattaagttctaaaattatgagtaaaaatatttctgatttcacacaaatgacaattaaggaaaatttagagtttcttaataaattagaggatccaacagccaaatatattattgatcctctcaaaaagcagttagaagcactagaatatattggattaagttatttaacgcttaaccgtgtcacaacgacattatcaggcggtgaagcgcaacggcttaaattaatacgtcatttaaatagttctttatcggatttagtttacattatagatgaaccaagtgttggcttgcatccggaagatatagctaaaatcaatgaaattttaaaatcattaaaagaaaaaggtaatactgtgttaattgttgaacatgatcccgatgtcattaaagaaggagactatatcatagatatggggccaggttcaggaaaaaacggcggtgaaatcacatttgaaggaacatataatgaattactatcttcaaatacttcgacaggtaacgcattacgtaacaaacataatttaaaagagaatattcgtgaagctaaccacttttataatatcggtcctgtgacacaaaacaatttaaataacgtaaaaacgtctatacctaaacacgtattaacagtcttaacaggtgttgctggttcaggtaagagtacccttgttaaagcaggttttgaaaataatgaccataccatctttattgatcaaaaagcagttcaaggatctaatagatctaatctattaacgtatttaggtgtttttgatagtgtaagaagctatttcagtaaagaaacaggcttaaataaagctatgtttagttataattcaaaaggtgcctgtccaaattgtggtggaaagggctatattaaaacggaacttgcttttatgggtgatttttcacagacatgtgaagtttgtcatggcaaacgttataaacaagaagtattagatgctaccatagacgggtattcaattgccgatgttctcaatttgacggttgacgaaggtatcattttctttgataaaaagaatgatattaagtcaaaattacaatctgtaagtaagacaggtttgaattatatgtcactaggacaacctttgtccactttgtctggtggagagattcaacgcgtgaaactaggacaacatttagatgaagagataaagaatagtatttttatttttgacgaaccaactacaggcctacatgaatcggatatccctatattgatggagtgttttgatgatttaattgatcaaaacaatactgttattttgattgaacataatttatcgattatgtgtgaagcagattggatcatcgatgtcggcccaggcccagggttggatggcggaaaggtccaatttagtggaacacctaaaaacttcattgatagttcagaaacattgacatctaaacacttgaaacgctatatcaaacagtaa

SEQ ID NO: 1138 - protein, 752 aa, Artificial Sequence
  Description of Artificial Sequence: synthetic amino acid sequence
MDFINITGASQNNLKNIDVNIPKHLVTVFTGRSGSGKSSLVFNTVAAESEQLLNESYSSYIQFHLNQQPRPKVKKIKNLPVAMTINQKRFNGNSRSTVGTVSDIYASVRLLWSRIGEPFVGYSDAYSFNSPKGMCKTCEGLGYIEDINLDELLDWDKSLNEGAIDFPSFGPDKERGKAYRDSGLFDNNKKLKDYTEDELELFLYQEPMTLKNPPKEWRKSAKYVGLIPRFSRIFLGDKEFNKKRYAKHLKNVVNNKICSTCKGQRLNSKILSSKIMSKNISDFTQMTIKENLEFLNKLEDPTAKYIIDPLKKQLEALEYIGLSYLTLNRVTTTLSGGEAQRLKLIRHLNSSLSDLVYIIDEPSVGLHPEDIAKINEILKSLKEKGNTVLIVEHDPDVIKEGDYIIDMGPGSGKNGGEITFEGTYNELLSSNTSTGNALRNKHNLKENIREANHFYNIGPVTQNNLNNVKTSIPKHVLTVLTGVAGSGKSTLVKAGFENNDHTIFIDQKAVQGSNRSNLLTYLGVFDSVRSYFSKETGLNKAMFSYNSKGACPNCGGKGYIKTELAFMGDFSQTCEVCHGKRYKQEVLDATIDGYSIADVLNLTVDEGIIFFDKKNDIKSKLQSVSKTGLNYMSLGQPLSTLSGGEIQRVKLGQHLDEEIKNSIFIFDEPTTGLHESDIPILMECFDDLIDQNNTVILIEHNLSIMCEADWIIDVGPGPGLDGGKVQFSGTPKNFIDSSETLTSKHLKRYIKQ

SEQ ID NO: 1139 - DNA, 912 bp, Artificial Sequence
  Description of Artificial Sequence: synthetic nucleic acid sequence
gtgattaggaatttacttgcaatgtgttatttgtatctaggtgagtatgatagcgccaaagcaatgtttgaagaacttttaaaggaagataattcagacgtgcatgcactttgtcactacacattattactttataataaaaaagaaacagaaaaatatcaaaaatatcttaaaatacttaataaagtagtaccactaaatgacgacgaaacctttaaattaggaatcgtattgagttatttaaaacagtatcgtgcttctcaaaatttactttatccactttataaaaaaggtaaatttgtctctattcaaatgtataatgcattgagtttcaatttttattacctaggaaataaagacgaaagtattgagatgtggaacaagctcactcaaatttctgaagttgatgttggttatgcaccttgggtaattgaggaaagtaaaacggtatttgaatcacgagtgttaccattattactagatgataataatcattatcgactttacggtatttttttacttcatcaattaaatggaaaagaaatactaatgactgaagatatttggtcaattcttgaatcaatgaatgactatgagaaactttatctcacatatttggtacaaggactcacactcaataaattagattttatacacagaggtatgcaaaggttgtataattttaagaaattcaaatataacacgtctttatttacagattggattaatcaagcagaaatgattatagctgaaaatgtagatttagtagatgtcgatagatatgtagctgcatttgtttacctatcgtatcgtcgttctagccaaccacttaccaagaggcaattgatggacgattttaatgtttctagatacaaactgaataaagcaattgaatttatattgagcatataa

SEQ ID NO: 1140 - protein, 303 aa, Artificial Sequence
  Description of Artificial Sequence: synthetic amino acid sequence
VIRNLLAMCYLYLGEYDSAKAMFEELLKEDNSDVHALCHYTLLLYNKKETEKYQKYLKILNKVVPLNDDETFKLGIVLSYLKQYRASQNLLYPLYKKGKFVSIQMYNALSFNFYYLGNKDESIEMWNKLTQISEVDVGYAPWVIEESKTVFESRVLPLLLDDNNHYRLYGIFLLHQLNGKEILMTEDIWSILESMNDYEKLYLTYLVQGLTLNKLDFIHRGMQRLYNFKKFKYNTSLFTDWINQAEMIIAENVDLVDVDRYVAAFVYLSYRRSSQPLTKRQLMDDFNVSRYKLNKAIEFILSI

SEQ ID NO: 1141 - DNA, 933 bp, Artificial Sequence
  Description of Artificial Sequence: synthetic nucleic acid sequence
atgactgaagtagattttgatgtagcaataatcggtgcaggtcctgccggtatgacagcagcagtatatgcatctcgtgccaatttaaaaactgtcatgattgaacgcggtatgccaggcggtcaaatggcaaacactgaagaagtagagaattttccaggatttgagatgatcacaggtcctgacttatctactaaaatgtttgaacatgctaaaaaatttggtgcggaataccaatatggcgatattaaatctgttgaagataaaggcgactataaagttatcaatttagggaataaagagataacagcacatgcagttattatctcaactggagcagagtataaaaagattggcgttcctggtgaacaagaattaggaggacgtggagtaagttattgtgcggtttgtgatggagcattctttaaaaataaacgtcttttcgtaattggcggcggagattcagcggtagaagaaggtactttcttaactaaatttgcagataaagtaacgattgttcaccgtagagatgaattacgtgcacaaaacatcttgcaagaacgtgccttcaaaaatgataaagttgactttatttggagtcatacacttaaaacaattaatgaaaaagatggtaaagttggttcagttacacttgaatcaactaaagatggtgctgaacagacttatgatgccgacggtgtattcatttatattggaatgaaaccactcacagcaccatttaaaaatcttggtattacaaatgacgcgggatacattgtcacacaagatgacatgagtactaaagtacgaggtatttttgctgcaggtgacgttcgtgataaagggttacgtcaaattgttactgctacaggagacggtagtattgcggctcaaagtgcagctgattatattacagaattaaaagataattaa

SEQ ID NO: 1142 - protein, 310 aa, Artificial Sequence
  Description of Artificial Sequence: synthetic amino acid sequence
MTEVDFDVAIIGAGPAGMTAAVYASRANLKTVMIERGMPGGQMANTEEVENFPGFEMITGPDLSTKMFEHAKKFGAEYQYGDIKSVEDKGDYKVINLGNKEITAHAVIISTGAEYKKIGVPGEQELGGRGVSYCAVCDGAFFKNKRLFVIGGGDSAVEEGTFLTKFADKVTIVHRRDELRAQNILQERAFKNDKVDFIWSHTLKTINEKDGKVGSVTLESTKDGAEQTYDADGVFIYIGMKPLTAPFKNLGITNDAGYIVTQDDMSTKVRGIFAAGDVRDKGLRQIVTATGDGSIAAQSAADYITELKDN

SEQ ID NO: 1143 - DNA, 909 bp, Artificial Sequence
  Description of Artificial Sequence: synthetic nucleic acid sequence
atgacaagcaacgaaaaagaaatgggtaaaagtgaattgttagttgttacaggtatgtctggagcgggtaaatcattggtgattcaaagtctcgaagatatgggatttttctgtgtagataatttaccacctgtactattacctaaatttgtagaattgatggctcaaggaaatccttcattgcaaaaagtagcaattgcaatagatttaagaggtaaggaattatttaaatctctagttaaagaaattgatattattaaaagtcgtaatgacgtgattttagatgttatgtttttagaagctaaaactgaaaaaattatttcacgttataaagaatcaagaagagcgcacccactaaatgaacaaggacaaagatcattaatagatgcaataaatgaggaacgtgaacatctatcagaaatccgaagtatcgctaattacgtgattgatacaacaaaattaaaacctaaagaattaaagcaacgcatttcaaagttttatttagatgaaaactttgaaacatttacaatcaacgtgacaagtttcggtttcaagcatggtatacaaatggatgctgatttagtttttgatgtcagatttctacctaatccctactatgtagaggaattgcgtccatttactggtttagatgagccagtgtacaattacgttatgaagtggaaagaaacccaaatattttttgataaattaacagatttattaaaatttatgattcctggctacaaaaaagaaggtaaatcgcaattggttattgctataggttgtacgggtggacaacatcgatcagtcgcattagctaaacgtttagctgaatatcttaacgagatttttgaatataatgtttatgtgcatcatagagatgcgcatattgaaagtggagagagataa

SEQ ID NO: 1144 - protein, 302 aa, Artificial Sequence
  Description of Artificial Sequence: synthetic amino acid sequence
MTSNEKEMGKSELLVVTGMSGAGKSLVIQSLEDMGFFCVDNLPPVLLPKFVELMAQGNPSLQKVAIAIDLRGKELFKSLVKEIDIIKSRNDVILDVMFLEAKTEKIISRYKESRRAHPLNEQGQRSLIDAINEEREHLSEIRSIANYVIDTTKLKPKELKQRISKFYLDENFETFTINVTSFGFKHGIQMDADLVFDVRFLPNPYYVEELRPFTGLDEPVYNYVMKWKETQIFFDKLTDLLKFMIPGYKKEGKSQLVIAIGCTGGQHRSVALAKRLAEYLNEIFEYNVYVHHRDAHIESGER

SEQ ID NO: 1145 - DNA, 861 bp, Artificial Sequence
  Description of Artificial Sequence: synthetic nucleic acid sequence
atgaaaaatgaactaacacgcatagaagttgacgaatcgaatgctaaagcagagctcagtgcattaattcgcatgaatggcgcacttagtctatcaaatcaacagtttgtaattaatgtacagacagaaaatgcgacaacagctcgtcgaatttactctcttatcaaacgtatatttaatgttgaagttgaaattttagttagaaaaaagatgaaattgaaaaaaaacaatatttatatatgtcgaacaaagatgttagcgaaagaaatactaaatgatttaggaattttaaaaaagggagtttttactcacgatattgatccggatatgattaaagatgatgaaatgaaaagaagttatttaagaggggctttcttagcaggtggttctgtaaataatcctgaaacatcttcatatcatcttgaaattttttcacaatatgaagatcattccgaaggtcttactaaattgatgaatagttatgaactcaatgcgaaacatttggaacgtaaaaaagggagtattgcgtatcttaaagaagctgaaaaaatttccgactttcttagtttgataggtggctatcaagcattgttaaagtttgaagatgtaagaattgtccgtgatatgcgtaattcggttaatcgtcttgttaattgtgaaacagcaaatcttaataaaactgttagcgcagcaatgaaacaggttgaaagtatacaattaattgatgaagaaattgggcttgaaaatttacctgatcgtttaagagaagtagcgaagctcagagtagaacatcaagaaatatcgttaaaagaattgggtgagatggtttctacagggcctatatctaaatcaggtaccatt

SEQ ID NO: 1146 - protein, 287 aa, Artificial Sequence
  Description of Artificial Sequence: synthetic amino acid sequence
MKNELTRIEVDESNAKAELSALIRMNGALSLSNQQFVINVQTENATTARRIYSLIKRIFNVEVEILVRKKMKLKKNNIYICRTKMLAKEILNDLGILKKGVFTHDIDPDMIKDDEMKRSYLRGAFLAGGSVNNPETSSYHLEIFSQYEDHSEGLTKLMNSYELNAKHLERKKGSIAYLKEAEKISDFLSLIGGYQALLKFEDVRIVRDMRNSVNRLVNCETANLNKTVSAAMKQVESIQLIDEEIGLENLPDRLREVAKLRVEHQEISLKELGEMVSTGPISKSGTI

SEQ ID NO: 1147 - DNA, 888 bp, Artificial Sequence
  Description of Artificial Sequence: synthetic nucleic acid sequence
atgtctaaaatagtaggatcagatcgagttaaaagaggaatggctgaaatgcaaaaaggcggtgtcattatggacgtcgttaatgcagaacaagctaaaattgctgaagaagccggagctgttgccgtaatggcattagagcgtgtaccatcagatattcgtgctgctggcggtgttgcacgtatggcgaatcctaaaatagttgaagaagttatgaatgccgtatcaattccggttatggctaaagccagaattggtcatattacagaagctagagttttagaatcgatgggtgttgactatatagatgagtctgaagtattaacgcctgcagacgaagaatatcatttaagaaaagatcaatttacagttccttttgtgtgtggctgtcgtaacttaggtgaagcagcacgacgcattggtgaaggtgcggcgatgttgcgtacgaaaggtgaacctggtactggtaatattgttgaagctgtccgtcatatgagacgtgttaattctgaagttagccgcttaacagttatgaatgatgatgaaattatgacatttgcaaaagatttgggtgcaccttatgaagtattaaaacaaattaaagataatggacgtcttcctgtagttaattttgcagctggtggtgttgctacgcctcaggatgcagcactaatgatggaattaggtgcagatggtgtatttgttggttcaggtatatttaaatctgaagatcctgaaaaatttgctaaagctatcgttcaagctacaacacattatcaagattatgagttaatcggaaaattggctagtgagctaggtacggctatgaaaggtctagatattaatcaaatttcactagaagaaagaatgcaagagcgtggttggtaa

SEQ ID NO: 1148 - protein, 295 aa, Artificial Sequence
  Description of Artificial Sequence: synthetic amino acid sequence
MSKIVGSDRVKRGMAEMQKGGVIMDVVNAEQAKIAEEAGAVAVMALERVPSDIRAAGGVARMANPKIVEEVMNAVSIPVMAKARIGHITEARVLESMGVDYIDESEVLTPADEEYHLRKDQFTVPFVCGCRNLGEAARRIGEGAAMLRTKGEPGTGNIVEAVRHMRRVNSEVSRLTVMNDDEIMTFAKDLGAPYEVLKQIKDNGRLPVVNFAAGGVATPQDAALMMELGADGVFVGSGIFKSEDPEKFAKAIVQATTHYQDYELIGKLASELGTAMKGLDINQISLEERMQERGW

SEQ ID NO: 1149 - DNA, 348 bp, Artificial Sequence
  Description of Artificial Sequence: synthetic nucleic acid sequence
atgtttggaacatgtgctggattaattgttcttgcaaaaaatgttgaaaatgagtctggttatttaaataaattagatataactgttgagcgtaattcattcggtagacaagtcgatagctttgaatctgaacttgatattaaagggatagcaaatgatattgagggagtatttattagagcacctcatattgctaaagtggataacggagtggaaatacttagtaaagttggaggtaaaatagtagccgtcaaacaaggacaatacctcggtgtttctttccatccagaactaactgatgattatcgtatcactaagtattttattgaacacatgattaaacattaa

SEQ ID NO: 1150 - protein, 115 aa, Artificial Sequence
  Description of Artificial Sequence: synthetic amino acid sequence
MFGTCAGLIVLAKNVENESGYLNKLDITVERNSFGRQVDSFESELDIKGIANDIEGVFIRAPHIAKVDNGVEILSKVGGKIVAVKQGQYLGVSFHPELTDDYRITKYFIEHMIKH

SEQ ID NO: 1151 - DNA, 1014 bp, Artificial Sequence
  Description of Artificial Sequence: synthetic nucleic acid sequence
atggaacgattttgttgtgtaaatcaaattaactatattcaaatgaatccgttagaagccaaatttaaaacgagcgctctaagatcatggaaaactgatcaggcagatgctcataagcttgcttgtttaggaccgacgcttaaacaaacagacagcttacctatacatgagttaatattctttgaattaagagaacgcgtccgttttcatctagaaatcgagaatgaacaaaatcgacttaaatttcagatccttgaattactccatcaaacattccctggtttagaaagattgtttagtagtcgatattcaatcattgcactcaacatcgcagaaatctttactcatccagacatggttcttgatatcgacaaggaggtactgattacacatatattcaattctacagataagggaatgtcaatggataaagctacaaaatatgcacttcaattaagggtgattgctcaagaaagctatcctagtgtcgatagacattcctttctagtcgaaaaattacgcttacttattcaacaattaaaacaatctattcatcatctcaaacaattagatgatgccatgattcaattagcacaacaactcgattattttgaaaatattcattcgatacctggtattggtaagctaagcacagctatgattattggggagattggtgatattaagcgatttaaatcaaataaacaactcaatgcttttgttggcattgatatcaaacgatatcaatcaggtcatacacactgtagagataccatcaacaagcgtggtaataaaaaagcgagaaaacttttattttgggtgattatgaatataataagagggcagcatcattatgacaatcatgtcgtcgattattactacaaactaagaaagcagcctaatgagaaacctcataagactgccatcattgcttgtataaatcgattattaaaaacaattcattatcttgtaatgaatcataaattgtacgattatcaaatgtcaccacattag

SEQ ID NO: 1152 - protein, 337 aa, Artificial Sequence
  Description of Artificial Sequence: synthetic amino acid sequence
MERFCCVNQINYIQMNPLEAKFKTSALRSWKTDQADAHKLACLGPTLKQTDSLPIHELIFFELRERVRFHLEIENEQNRLKFQILELLHQTFPGLERLFSSRYSIIALNIAEIFTHPDMVLDIDKEVLITHIFNSTDKGMSMDKATKYALQLRVIAQESYPSVDRHSFLVEKLRLLIQQLKQSIHHLKQLDDAMIQLAQQLDYFENIHSIPGIGKLSTAMIIGEIGDIKRFKSNKQLNAFVGIDIKRYQSGHTHCRDTINKRGNKKARKLLFWVIMNIIRGQHHYDNHVVDYYYKLRKQPNEKPHKTAIIACINRLLKTIHYLVMNHKLYDYQMSPH

SEQ ID NO: 1153 - DNA, 420 bp, Artificial Sequence
  Description of Artificial Sequence: synthetic nucleic acid sequence
gtgctgtcagaagctgaaagaagtcctaatgagaaatatattcctaatgaacgtatcaaggtgtacgtaaataaagttgaacagactacaaaaggtccacaaatttacgtatcaagaagtcatcctggattactaaaacgcttattcgaacaagaagttccagaaatttatgatggtactgttattgttaaatcagtagcgcgtgaagctggagatcgttctaaaattagcgtgtattctgataatcctgatatagatgctgttggcgcatgtgtaggttctaaaggagcacgagtagaagcggttgttgaagaacttggtggcgaaaaaatcgatatcgtccaatgggatgaagatccgaaagtatttgttcgtaatgctttaagtccatcacaagttttagaagtaattgttaaataa

SEQ ID NO: 1154 - protein, 139 aa, Artificial Sequence
  Description of Artificial Sequence: synthetic amino acid sequence
VLSEAERSPNEKYIPNERIKVYVNKVEQTTKGPQIYVSRSHPGLLKRLFEQEVPEIYDGTVIVKSVAREAGDRSKISVYSDNPDIDAVGACVGSKGARVEAVVEELGGEKIDIVQWDEDPKVFVRNALSPSQVLEVIVK

SEQ ID NO: 1155 - DNA, 816 bp, Artificial Sequence
  Description of Artificial Sequence: synthetic nucleic acid sequence
atgaaacttgtattttatggtgctggtaatatggcgcaggcaatttttactggaattattaattccaacaatttaaatgcaaatgatatttatttaactaataaatccaatgaacaagcattaaaaagctttgcagaaaaattaggggttaattatagttatgatgatgaagcattactcaaagatgccgattatgtatttttaggtacaaagccccatgattttgaaaatttagctaatcgtattagagaacacattactaatgataataggtttatttctataatggcaggtttatctattgattatattcgtcagcagcttaataccaataatccattagctcgtattatgccaaatacaaatgctcaagttggacattcggttactggaataagtttttcaaataattttgatcctaaatctaaaaatgaagtggatgaattaatcaatgcatttggatcagttatagaagtctccgaagaacatctacatcaagttactgcaattacaggaagtgggcctgcatttttatatcatgtatttgaacaatatgtaaaagcaggtacagaattaggtttagaacgaaatcaagtcgaagaatctatacgcaatttaattattggaacaagtaaaatgattgagcgttcagacttaagtatgtctcaattaaggaaaaatattacatctaaaggtggtactacacaagctggacttgatgcactatctcaatatgatattgtatcgatgtttgaagattgtttaggtgcagctgtgaatagaagtatggaattatcacataaagaagatgaataa

SEQ ID NO: 1156 - protein, 271 aa, Artificial Sequence
  Description of Artificial Sequence: synthetic amino acid sequence
MKLVFYGAGNMAQAIFTGIINSNNLNANDIYLTNKSNEQALKSFAEKLGVNYSYDDEALLKDADYVFLGTKPHDFENLANRIREHITNDNRFISIMAGLSIDYIRQQLNTNNPLARIMPNTNAQVGHSVTGISFSNNFDPKSKNEVDELINAFGSVIEVSEEHLHQVTAITGSGPAFLYHVFEQYVKAGTELGLERNQVEESIRNLIIGTSKMIERSDLSMSQLRKNITSKGGTTQAGLDALSQYDIVSMFEDCLGAAVNRSMELSHKEDE

SEQ ID NO: 1157 - DNA, 810 bp, Artificial Sequence
  Description of Artificial Sequence: synthetic nucleic acid sequence
gtgggcgagggaacacaacatcaaattttaagacactctattaagttagggaagatagatcatatttttataacacacatgcatggtgatcatatttttggtctccctggacttttaacaagtcgttcgtttcaaggtggagaaaataaaccccttactattatagggcctaaaggtattcaaaattacatagaaacatctttacaactttctgaatcgcatttgaattatccgattacctatatcgaaatcaatcaacaattagcgtatcaccacaatggttttactgtacaagctgaaatgcttaaccatggcataccttcattcggatatcgtattgaagccccaatcacgcctggtacaatcaatgtagaggccttgagaggtattggactagagcctggtccaaaatatcaggaagtcaaattacaagaaacgttcgaatataaaggattaatttacaattcggatgattttaaaggtaaagctaaacctggtccaattatcagtatatttggtgatacaaaaccgtgtgaaaatgaatatgaattagcaaagaactcagatttaatgattcatgaagcaacttacattgaaggagataagaaacttgctaataattaccatcatagtcatatagacgatgtatttaatctaattaagcaagctaatgtaaataaaagtcttatcactcatatcagtaacagatataacattgatgaagttacatcaatatacaatgagttatcccttgatcaaacttctccacatttttatttcgttaaagattttgatactttcaaaatataa

SEQ ID NO: 1158 - protein, 269 aa, Artificial Sequence
  Description of Artificial Sequence: synthetic amino acid sequence
VGEGTQHQILRHSIKLGKIDHIFITHMHGDHIFGLPGLLTSRSFQGGENKPLTIIGPKGIQNYIETSLQLSESHLNYPITYIEINQQLAYHHNGFTVQAEMLNHGIPSFGYRIEAPITPGTINVEALRGIGLEPGPKYQEVKLQETFEYKGLIYNSDDFKGKAKPGPIISIFGDTKPCENEYELAKNSDLMIHEATYIEGDKKLANNYHHSHIDDVFNLIKQANVNKSLITHISNRYNIDEVTSIYNELSLDQTSPHFYFVKDFDTFKI

SEQ ID NO: 1159 - DNA, 759 bp, Artificial Sequence
  Description of Artificial Sequence: synthetic nucleic acid sequence
gtgataggcaaacactttattataactggagcaacgagtgggttaggttttgcaataaccaatgaattacttcaaagaggggcccatgttactatacttgcaagaaatatagataagttcaatcgaatcaaagaaaactattttaaacctgaacatatcaatgtgattaaatgtgatttaatgcaacgaaaagatattgaatcattacaaaaatttttaaatacacctataaatggtttcatctacagttcaggtgttggatattttaagtctataagtgagcattcaactcgtgaagtagtagaaacttacgaggttaatcttacaaattttaatttgttatacaaagtgattcaaccacaattagtaaaagcagcatatatcgttggtatatctagtcaagctgctcttgtttcacaggctaatgcggcacattacggtgcatcgaaagcagggtttagcgccgttcttaatgcattgagattagaacaaccggaattaaaagtgctcaatgtacagcccggtccaatagatacaccattccaaaaaaacgcagatcctactctaaagtattttaaaaattatagacacatgatgatacaacctcaacaacttgccaagcaaatagtggaaggaataatactaaataaaattgaaattaatcaaccatcatggatgcaaataatgcttaaattttatcaattatgtccacgtacactagaaaaattatgtccaaatctatttaaaaataaagtttaa

SEQ ID NO: 1160 - protein, 252 aa, Artificial Sequence
  Description of Artificial Sequence: synthetic amino acid sequence
VIGKHFIITGATSGLGFAITNELLQRGAHVTILARNIDKFNRIKENYFKPEHINVIKCDLMQRKDIESLQKFLNTPINGFIYSSGVGYFKSISEHSTREVVETYEVNLTNFNLLYKVIQPQLVKAAYIVGISSQAALVSQANAAHYGASKAGFSAVLNALRLEQPELKVLNVQPGPIDTPFQKNADPTLKYFKNYRHMMIQPQQLAKQIVEGIILNKIEINQPSWMQIMLKFYQLCPRTLEKLCPNLFKNKV

SEQ ID NO: 1161 - DNA, 321 bp, Artificial Sequence
  Description of Artificial Sequence: synthetic nucleic acid sequence
atgaatgtacagtttaagaaaggtgctttagaattaattgttctgctaattattaaaaaagaagatcagtatggttattcacttgtacaaaatatctccagatatatgaccatagctgaaggtacagtttatcctctgctaaggcgtttggttaaaagtggggaactgagtacgtattatcaaccttcaactgaaggtccgtctcgaaagtattatcaattaactcaacagggggctgcgagagttaatcaattagaggaggattggaaattgtttacggaagctgtagaacatttcattgaggagagtgagaatgaatga

SEQ ID NO: 1162 - protein, 106 aa, Artificial Sequence
  Description of Artificial Sequence: synthetic amino acid sequence
MNVQFKKGALELIVLLIIKKEDQYGYSLVQNISRYMTIAEGTVYPLLRRLVKSGELSTYYQPSTEGPSRKYYQLTQQGAARVNQLEEDWKLFTEAVEHFIEESENE

SEQ ID NO: 1163 - DNA, 513 bp, Artificial Sequence
  Description of Artificial Sequence: synthetic nucleic acid sequence
atgaataaagaagaaaaagaagatattttgaatgaatacgatacgcatttttatagcggacagcaagagggaaagtctgaatcagacgtgtgtaaagaattaggtaatccaaaattaataggtaaggaacttacagctacttccagtgtagaaaatgcacatcaaaaagtgtcgttaatgaatatttcatccgcaattgtagcagtaatggggctaagtttgcttaacttttttattgttataataccagcttttttatgcattttgctcgtattaaccttcatcatttttactctagcttcactagctgcaccattgatgttgctcattaaaggaattatggatggttttcattccattatcttatatgacgcatttatgactggtttaatgtttggtgttggactcgtacttgcagtggtgacttactatctcattaagtggctatttgatgtgactatgaaatatctaaaatggaatatctctattgtcaaaggaagtgtacaatcatga

SEQ ID NO: 1164 - protein, 170 aa, Artificial Sequence
  Description of Artificial Sequence: synthetic amino acid sequence
MNKEEKEDILNEYDTHFYSGQQEGKSESDVCKELGNPKLIGKELTATSSVENAHQKVSLMNISSAIVAVMGLSLLNFFIVIIPAFLCILLVLTFIIFTLASLAAPLMLLIKGIMDGFHSIILYDAFMTGLMFGVGLVLAVVTYYLIKWLFDVTMKYLKWNISIVKGSVQS

SEQ ID NO: 1165 - DNA, 687 bp, Artificial Sequence
  Description of Artificial Sequence: synthetic nucleic acid sequence
gtgggagtttatgcacaaaataaaaaattgagtaaagacaatcaatataataatcaaacaacaaatttaatgaaaaactatgatgataatactgtgaaaagtatttacattgatggaaaagtaagtgatataactgtgaaaaaaggtaaacatttttcggttaagtccaaagggaatgacaaaaatttaaacgtaactagcaaggtgaacaatcaacgttgggtaattacagagcgtcaaacaagtccacatattaattttagaatacaaggtaaagttagtaatcacattacgattacagtacctaaatatattaaaaacatagatattaaaactaatgccggggatttaaatattgttggagtaaatagtggcacaggaagatttgatgctgaatctggagacattaaagttcaaaaaggacgatataaaaaggtgacacttcataatgaggatggggatattcaaatgaaacaattagaccctgatattcctttacgtattaaaaatgaagaaggggatataaacttgaattataaaaaagaacttcatcacacccaaatcatcactcgtaatgaagaaggggaaacagacatcgatcatcgtgtgttatataatagtaaagttgaaaatggaaataataaagtgaaattaatcaatgaaaatggagatattaaagtaaaataa

SEQ ID NO: 1166 - protein, 228 aa, Artificial Sequence
  Description of Artificial Sequence: synthetic amino acid sequence
VGVYAQNKKLSKDNQYNNQTTNLMKNYDDNTVKSIYIDGKVSDITVKKGKHFSVKSKGNDKNLNVTSKVNNQRWVITERQTSPHINFRIQGKVSNHITITVPKYIKNIDIKTNAGDLNIVGVNSGTGRFDAESGDIKVQKGRYKKVTLHNEDGDIQMKQLDPDIPLRIKNEEGDINLNYKKELHHTQIITRNEEGETDIDHRVLYNSKVENGNNKVKLINENGDIKVK

SEQ ID NO: 1167 - DNA, 474 bp, Artificial Sequence
  Description of Artificial Sequence: synthetic nucleic acid sequence
atgttatggcatttaatttttatgattcctacaattattggttactcttttggaatgttctgtttaatatcaagtgaaacttttaaaagtaaaggatttctcttgttgggggtaggaatttttatcttttctttaatttatattttgatttatagtttagttacattaatacctaatgttgcgatattatcaagaagattccatgatcgctcaatgacgatgactcttccgattattttttatgttttcactgtcattgtatcaggttttaattatttaccaaatatagataattcagcggtattaatatttatgggaattatctgcttaatctactggattgggtcgatattaatattagtattgacttgcttagatagtaaaacagagtctaataaatatggaccaagtccaaagtacaatcgtaacgagacaaatttccatggtgataatgctaatccagttgataaataa

SEQ ID NO: 1168 - protein, 157 aa, Artificial Sequence
  Description of Artificial Sequence: synthetic amino acid sequence
MLWHLIFMIPTIIGYSFGMFCLISSETFKSKGFLLLGVGIFIFSLIYILIYSLVTLIPNVAILSRRFHDRSMTMTLPIIFYVFTVIVSGFNYLPNIDNSAVLIFMGIICLIYWIGSILILVLTCLDSKTESNKYGPSPKYNRNETNFHGDNANPVDK

SEQ ID NO: 1169 - DNA, 600 bp, Artificial Sequence
  Description of Artificial Sequence: synthetic nucleic acid sequence
atgatggtaaaggttattcacacttatgatgccaatcatcgatggtccgtacaatatgaggcaaaatcaacaaaaaaaacagtatttaatccttcaaatcatgtttattttaatttgaatcgtgataacaatgttgtctataaccactgtataaatagttcagcattaaaaatgtatatgttaaataataaacatattgttaaagaggggcaatctcttgatttacatcgattattggatacaaataaagtctatttaaaagatatttttgaaagtgacaatgaaactttgcaacaacaaattaatcattataatggcattgatcatcctttcgaatttggtggaaatgagcttaccattgataattctgaatttgaacttaatattaagactgatatgcctcattttgtaatgtttacgtttaatgatccacaagtttggaacaatgattttaatatttataaggcgcattctggattttccatcgaaactcaatatatgcctaatgatataaatatgtacggcgccaaagctcagtctattttagaggcagatacattatttacatctaaaacaagttttcaaattcatgaaaagtag

SEQ ID NO: 1170 - protein, 199 aa, Artificial Sequence
  Description of Artificial Sequence: synthetic amino acid sequence
MMVKVIHTYDANHRWSVQYEAKSTKKTVFNPSNHVYFNLNRDNNVVYNHCINSSALKMYMLNNKHIVKEGQSLDLHRLLDTNKVYLKDIFESDNETLQQQINHYNGIDHPFEFGGNELTIDNSEFELNIKTDMPHFVMFTFNDPQVWNNDFNIYKAHSGFSIETQYMPNDINMYGAKAQSILEADTLFTSKTSFQIHEK

SEQ ID NO: 1171 - DNA, 1566 bp, Artificial Sequence
  Description of Artificial Sequence: synthetic nucleic acid sequence
gtgatattagctgacacatccaacggacatatcatatcaagatatgaggaagactatgcgaacggaacttatatgaactcattatatgataaaccgttacctgaaaactacttcttacaaaatgctgacgactatttacaaattcttgaacaaggcgttcaatttgtattagaagatagtaaagttaataaaaacgatgtggttggaattggagtcgactttacaagcagtacaattatctttctcgatgaacaatttgaaccgcttcatcgtcatgaagatttaaagacaaatccacacgcgtacgtaaaattatggaaacatcatggagctcaagatgaggcaaactatatgattcagatgagtaagaataaaaattggttagattattatggctcaagcgtaaatagcgaatggatgataccgaaaatcctggaagttaaacatgaagcaccagaaatacttagaagagcacggtatataatggaagctggagattacatcactagtatactaacaaattcaaatatacgatcaaattgtggtattggttttaaaggtttttgggacaatgaagctggatttaattacgacttcttccatagcgtggatcctgatttacctaaaatcgtcaaagaaaaatgtgaagcgccaatcatatcaattggagaaagtgcaggtcgtttatgtaaagactatcaacaaatatgggggctttctcaatatgtccaggtttcaccttttatcatagatgcacattctggcgtcttaggtgttggggcaatagaagctggagaattcactgcagtcattggtacaagtacttgtcatctcatgctagattcaagacaagtacccatttcttcaataactggctcagttaaaaatgctattatacctggattatatgcctatgaagctggtcaaccagctgtcggtgatttgtttgaatactcaaagaaccaagcacctaaacatattgtagatcaagcaaatgaacatcatatgcatgtgcttaactatttagaggaattagcaagtcacattagaatagaagaacaacatgttgttgttttagattggttgaatggaaatcgtagtatacttagtaatagtcatctaactggaagtatctttggtcttacacttcaaacaccgtatgaaatgattcatcgagcatatattgaagctacagcatttggaacaaaattaattatgaaacaatttgaagataatcatattcctgttcatacagtgtatgcgtctggtggtatcccacaaaagagtaaattactcgttgaaatttatgcaaatgttttaaataaaagggttgtcgtcatagattcatctaatgcttcagcattaggtgcagcgatgttaggtgcaaatgttgggaatgcatatagtacattaaaagaggcggcattatctatgaagcaacctatagcttatatacaagaacctgaaatccaaaaagttcaagcttataaaccactctaccataaatattgtgaactacatgatttattagatcgtcaatatcctgaattatcatatttgatttaa

SEQ ID NO: 1172 - protein, 521 aa, Artificial Sequence
  Description of Artificial Sequence: synthetic amino acid sequence
VILADTSNGHIISRYEEDYANGTYMNSLYDKPLPENYFLQNADDYLQILEQGVQFVLEDSKVNKNDVVGIGVDFTSSTIIFLDEQFEPLHRHEDLKTNPHAYVKLWKHHGAQDEANYMIQMSKNKNWLDYYGSSVNSEWMIPKILEVKHEAPEILRRARYIMEAGDYITSILTNSNIRSNCGIGFKGFWDNEAGFNYDFFHSVDPDLPKIVKEKCEAPIISIGESAGRLCKDYQQIWGLSQYVQVSPFIIDAHSGVLGVGAIEAGEFTAVIGTSTCHLMLDSRQVPISSITGSVKNAIIPGLYAYEAGQPAVGDLFEYSKNQAPKHIVDQANEHHMHVLNYLEELASHIRIEEQHVVVLDWLNGNRSILSNSHLTGSIFGLTLQTPYEMIHRAYIEATAFGTKLIMKQFEDNHIPVHTVYASGGIPQKSKLLVEIYANVLNKRVVVIDSSNASALGAAMLGANVGNAYSTLKEAALSMKQPIAYIQEPEIQKVQAYKPLYHKYCELHDLLDRQYPELSYLI

SEQ ID NO: 1173 - DNA, 360 bp, Artificial Sequence
  Description of Artificial Sequence: synthetic nucleic acid sequence
atgatagaatttgatgcaattaccacattatgtttggcatgtgttttatatttaattggtcaaacaataatcaaccatgtttctattttaaggcgaatctgtattccagcacctgtcattggtggtcttttatttgcaatattagtggctatattagattcatttaatatcgttaaaataaaacttgattcggcgttcattcagaatttctttatgctcgctttctttactacaattggacttggcgcatcattaaaactattcaaaattggcggaaaagtcatgttgatagcgagaatgtctccatttttaggattttggacaaccattaacgcattgtccatatccttagcaccttga

SEQ ID NO: 1174 - protein, 119 aa, Artificial Sequence
  Description of Artificial Sequence: synthetic amino acid sequence
MIEFDAITTLCLACVLYLIGQTIINHVSILRRICIPAPVIGGLLFAILVAILDSFNIVKIKLDSAFIQNFFMLAFFTTIGLGASLKLFKIGGKVMLIARMSPFLGFWTTINALSISLAP

SEQ ID NO: 1175 - DNA, 537 bp, Artificial Sequence
  Description of Artificial Sequence: synthetic nucleic acid sequence
atgataatcaaaccaataattacaattaaaatactaagtgaaataagtggcttagctaatttaacaaagtttaacctttcatatgatgtttttaaatcatgtacatctttaccttcattaatatcatgtctatccttcttcttaacaccaaataaccagtattgttttttaaagaagtttgaagataccagtaatgataacaaccctcttgataagaatactgcggttacaaatatcattaaaatacctaagagtaacatggttgcgaagcctttgactgaactttctccaaagaagaaaagcacagctgcagcgatgacagttgttaagttggaatcaaatatagttaagaatgaacttttatttgcttttgaatacgcttgtttaagcgtgcgtccaattcttagttcatctttaatacgttcatacattatgatattggcatcgacagccatacctacacctaaaactaatgccgccaatccaggtagagttaatacacctgatatgaaattgaatgcgactaaagttaaataa

SEQ ID NO: 1176 - protein, 178 aa, Artificial Sequence
  Description of Artificial Sequence: synthetic amino acid sequence
MIIKPIITIKILSEISGLANLTKFNLSYDVFKSCTSLPSLISCLSFFLTPNNQYCFLKKFEDTSNDNNPLDKNTAVTNIIKIPKSNMVAKPLTELSPKKKSTAAAMTVVKLESNIVKNELLFAFEYACLSVRPILSSSLIRSYIMILASTAIPTPKTNAANPGRVNTPDMKLNATKVK

SEQ ID NO: 1177 - DNA, 2226 bp, Artificial Sequence
  Description of Artificial Sequence: synthetic nucleic acid sequence
atgacgtataagaatgtagttaaaaatgttaatttaggtctagatttgcaaggtggttttgaagtcctcttccaagtagatcctttaaataaaggagataaaattgataaaaaagcacttcaagctacatctcaaacattagaaaatcgtgtaaatgttctaggtgtatcagaaccgaaaatacaaatcgaagatccaaatcgaattcgtgtacaattagcaggtatcaaggatcaagcacaagcgcgtaaattattatcgacacaagctaatttaacaattagagatgctgaagatcatgttttaatgtctggttcagacattaaacaaggctctgctaaacaagaatttaaacaagaaactaatcaaccaacagttacatttaaagtaaaaagtaaagataaatttaagaaagtaactgaaaagatttctaaaaaacgtgacaatgtcatggtagtttggttagatttcgaaaaaggcgatagttacaagaaagaagctaaaaagcaacaagaaggtaaaaagcctaaatttatatctgcagcgagtgtagaccaacctattaattctagtagtgttgaaatttcaggtggcttcaatgggaaaaaaggtgttgaagaagcgaaacaaatagctgagttattaaatgccggctcattaccagttgatttaaaagaaatttactctaactctgttggtgcacaatttggtcaagatgctcttgataagaccatgtttgcatcaattgtaggtatagcattaatttatttatttatgcttggtttctatcgtttgcctggtttagttgcaatcattgccttaaccacttatatttatttaactttagtcgcattcaatttcatatcaggtgtattaactctacctggattggcggcattagttttaggtgtaggtatggctgtcgatgccaatatcataatgtatgaacgtattaaagatgaactaagaattggacgcacgcttaaacaagcgtattcaaaagcaaataaaagttcattcttaactatatttgattccaacttaacaactgtcatcgctgcagctgtgcttttcttctttggagaaagttcagtcaaaggcttcgcaaccatgttactcttaggtattttaatgatatttgtaaccgcagtattcttatcaagagggttgttatcattactggtatcttcaaacttctttaaaaaacaatactggttatttggtgttaagaagaaggatagacatgatattaatgaaggtaaagatgtacatgatttaaaaacatcatatgaaaggttaaactttgttaaattagctaagccacttatttcacttagtattttaattgtaattattggtttgattatcatttcaatatttaaattaaacttaggtattgatttctcatccggaacaagagcagatattcaatctaaaaatgctataacacaagcacaggttgagaaaactgtaaaatcagttggattggaaccagatcaaatacagattaatggtagtggaaataaaaatgccacagttcagtttaaaaaagatttatcacgtgaggaagacaataaattaagtgctaaggtgaaatctgaatttggagataatccacaaattaataccgtttcacctctcataggccaagagctagctaaaaatgctgtaactgcattaatacttgcttctataggcattattatctatgtttcactaagatttgaatggcgtatgggtctatcttctgtacttgcattattacatgacgtatttatcatcattgcaatctttagtttgtttagattagaagtagatttaacatttattgcagcagtattaactatcgttggttattcaatcaatgatacaatcgtaactttcgaccgtgttcgagaaaatctgcataaagttaaagtaattacgcatactgatcaaattgatgatatagtcaaccgctctattagacaaactatgacacgttctattaatacagtgttgactgtagttgtagttgtagttgcaatattaatattaggtgcaccaacaatatttaatttctctttagcattactaattggattattatctggtgtattctcgtcaattttcattgctgtaccattatggggcatgcttaagaaacgacagtttaaaaagacaaaaaataataaattagtagtacacaaagagaagaaatctaacgatgaaaaaatcttagtttaa

SEQ ID NO: 1178 - protein, 741 aa, Artificial Sequence
  Description of Artificial Sequence: synthetic amino acid sequence
MTYKNVVKNVNLGLDLQGGFEVLFQVDPLNKGDKIDKKALQATSQTLENRVNVLGVSEPKIQIEDPNRIRVQLAGIKDQAQARKLLSTQANLTIRDAEDHVLMSGSDIKQGSAKQEFKQETNQPTVTFKVKSKDKFKKVTEKISKKRDNVMVVWLDFEKGDSYKKEAKKQQEGKKPKFISAASVDQPINSSSVEISGGFNGKKGVEEAKQIAELLNAGSLPVDLKEIYSNSVGAQFGQDALDKTMFASIVGIALIYLFMLGFYRLPGLVAIIALTTYIYLTLVAFNFISGVLTLPGLAALVLGVGMAVDANIIMYERIKDELRIGRTLKQAYSKANKSSFLTIFDSNLTTVIAAAVLFFFGESSVKGFATMLLLGILMIFVTAVFLSRGLLSLLVSSNFFKKQYWLFGVKKKDRHDINEGKDVHDLKTSYERLNFVKLAKPLISLSILIVIIGLIIISIFKLNLGIDFSSGTRADIQSKNAITQAQVEKTVKSVGLEPDQIQINGSGNKNATVQFKKDLSREEDNKLSAKVKSEFGDNPQINTVSPLIGQELAKNAVTALILASIGIIIYVSLRFEWRMGLSSVLALLHDVFIIIAIFSLFRLEVDLTFIAAVLTIVGYSINDTIVTFDRVRENLHKVKVITHTDQIDDIVNRSIRQTMTRSINTVLTVVVVVVAILILGAPTIFNFSLALLIGLLSGVFSSIFIAVPLWGMLKKRQFKKTKNNKLVVHKEKKSNDEKILV

SEQ ID NO: 1179 - DNA, 519 bp, Artificial Sequence
  Description of Artificial Sequence: synthetic nucleic acid sequence
atggatttaaaacaatatgtttcagaagtaaaagattggccttcagcaggtgtaagctttaaggatataacaactataatggataatggtgaagcttatggatatgctacggatcaaattgttgaatacgcaaaggaaaaaaatatagatatagtagttggtcctgaagccagaggattcataatagggtgtccagttgcttactcaatgggtattggatttgctccagtacgtaaagaaggaaaactacctcgagaagttattcgttatgaatataatttagaatatggaactaacgtattaactatgcataaagacgcgattaaaccaggacaacgagttttaatcactgatgatttactagctacaggtggaactattgaagctgcaataaagcttgttgaacaattaggtggtatagttgtaggtattgcttttattattgaacttaaatatttgaatggaattgataaaataaaagattatgatgtgatgagtttgatttcatatgatgaataa

SEQ ID NO: 1180 - protein, 172 aa, Artificial Sequence
  Description of Artificial Sequence: synthetic amino acid sequence
MDLKQYVSEVKDWPSAGVSFKDITTIMDNGEAYGYATDQIVEYAKEKNIDIVVGPEARGFIIGCPVAYSMGIGFAPVRKEGKLPREVIRYEYNLEYGTNVLTMHKDAIKPGQRVLITDDLLATGGTIEAAIKLVEQLGGIVVGIAFIIELKYLNGIDKIKDYDVMSLISYDE

SEQ ID NO: 1181 - DNA, 1656 bp, Artificial Sequence
  Description of Artificial Sequence: synthetic nucleic acid sequence
gtgaataacgagtatccatatagcgcggatgaggtgctttataaagctaaatcatatttatcaacaagtgaatatgaatatgttctcaaaagttatcatatagcttatgaggcacataagggtcaatttagaaaaaatggcttaccttatattatgcatcctattcaagttgcagggattttaacagagatgcgtttagacggacccactattgtcgctgggtttctacatgatgtgattgaagatacttcttatacatttgaagatgttaaagatatgtttaatgaagaaattgcacgaatagtagacggagtaactaaacttaaaaaggttaagtatcgctctaaggaagaacaacaagcagaaaatcatcgtaaactatttattgctattgctaaagatgtacgcgtaattttagtgaagttagcagatcggcttcataatatgagaactttaaaggcaatgccaagagagaagcaggtaagaatctctaaggaaaccttagaaatctatgctcctttagcacatcgtctcggaatcaacacgataaagtgggaacttgaagatacagcgctgagatatattgacagtgtgcaatatttccgcatcgttaatcttatgaagaaaaaacgtagtgaacgcgaagcttacattacaaatgcaatcaataaaattaaaaacgaaatgactaaaatgaatctttcgggcgaaattaacggtagaccaaaacatatttacagtatataccgcaaaatgataaaacaaaaaaagcaattcgatcaaatatttgatttgcttgctatacgtattatagttaattcgataaatgattgttatgcgacacttggtttagttcatacattatggaaaccgatgcctggacgttttaaagattatatagctatgcctaagcaaaatatgtatcaatcactacataccactgtagttggacccaatggcgatcctttagaaatacaaattagaacgcacgaaatgcatgaaatcgctgaacatggtgttgctgcacattgggcttataaagaaggtaagacagttaatcaaaaaacacaggattttcaaaataagcttaattggttaaaagaacttgctgaaaccgaccatacttctgcagatgcgcaagaatttatggaatccttaaaatatgatttacagagcgataaggtatatgcatttactccagctagtgatgttatagagttaccttatggtgcagtaccaattgattttgcttatgcaatacacagtgaagtaggaaataaaatgattggtgctaaggttaatggtaaaatcgtacctatagattatgttctacaaactggtgatattatagagattcgtacaagtaaacattcttacggtccaagtagagactggttgaaaattgtaaaatcttctagtgccaaaagtaaaatcaaaagtttctttaaaaaacaagatcgttcttctaatattgaaaaaggtaaatttatggtagaagcggagattaaagaacaaggattccgtgttgaagatattctaactgagaaaaatttagaagtcgttaatgaaaaatatcattttgctaatgatgaagatttgtacgcagctgttggattcggtggtgttacatcaatacaaatcgtcaataaattaaga

SEQ ID NO: 1182 - protein, 552 aa, Artificial Sequence
  Description of Artificial Sequence: synthetic amino acid sequence
VNNEYPYSADEVLYKAKSYLSTSEYEYVLKSYHIAYEAHKGQFRKNGLPYIMHPIQVAGILTEMRLDGPTIVAGFLHDVIEDTSYTFEDVKDMFNEEIARIVDGVTKLKKVKYRSKEEQQAENHRKLFIAIAKDVRVILVKLADRLHNMRTLKAMPREKQVRISKETLEIYAPLAHRLGINTIKWELEDTALRYIDSVQYFRIVNLMKKKRSEREAYITNAINKIKNEMTKMNLSGEINGRPKHIYSIYRKMIKQKKQFDQIFDLLAIRIIVNSINDCYATLGLVHTLWKPMPGRFKDYIAMPKQNMYQSLHTTVVGPNGDPLEIQIRTHEMHEIAEHGVAAHWAYKEGKTVNQKTQDFQNKLNWLKELAETDHTSADAQEFMESLKYDLQSDKVYAFTPASDVIELPYGAVPIDFAYAIHSEVGNKMIGAKVNGKIVPIDYVLQTGDIIEIRTSKHSYGPSRDWLKIVKSSSAKSKIKSFFKKQDRSSNIEKGKFMVEAEIKEQGFRVEDILTEKNLEVVNEKYHFANDEDLYAAVGFGGVTSIQIVNKLR

SEQ ID NO: 1183 - DNA, 384 bp, Artificial Sequence
  Description of Artificial Sequence: synthetic nucleic acid sequence
atgtcagacattgttaaagatgcaaaagcacaaggttatgtggaaacactacttcatcgtcgtcgatacattcctgatataacaagtagaaacgttaatttaagaagttttgcagaaagaacagcaatgaatacacccatacaaggtagtgcagctgacataataaaattagcaatggttaaattcagtgaaaagattaaagaaactaaatatcatgctaagttattattacaagttcatgatgaactcatatttgaaataccaaaatcagaagtagaagattttagtaaatttgtagaagaaattatggaacaagcattagtgctcgatgtacctttaaaagtagattcgaattatggtgcaacatggtacgatgctaaataa

SEQ ID NO: 1184 - protein, 127 aa, Artificial Sequence
  Description of Artificial Sequence: synthetic amino acid sequence
MSDIVKDAKAQGYVETLLHRRRYIPDITSRNVNLRSFAERTAMNTPIQGSAADIIKLAMVKFSEKIKETKYHAKLLLQVHDELIFEIPKSEVEDFSKFVEEIMEQALVLDVPLKVDSNYGATWYDAK

SEQ ID NO: 1185 - DNA, 603 bp, Artificial Sequence
  Description of Artificial Sequence: synthetic nucleic acid sequence
gtgattgggataactggtggtattgccactggaaaatcaacagtttcagaattattaacagcatatgggtttaaaatcgtagatgctgatattgcttcacgcgaagcagttaaaaaaggctctaagggtcttgaacaagttaaagagatttttggggaagaagcaattgacgaaaatggtgagatgaatcgtcaatatgtaggagagatagtttttaatcatcctgacttacgcgaggctcttaatgaaatagttcatcctattgtaagagagataatggaacaagagaaaaacaattatctagaacatggatatcatgtaattatggatatcccattgttgtacgaaaatgaactacaagatactgtagatgaagtttgggtggtttatacatctgaaagtattcaaatcgatcgtttaatggagaggaataatttatcattagaagatgctaaagcacgtgtttatagtcaaatatctatagataaaaaaagtaggatggcagatcatgtgatagataatctaggtgataaattagaacttaaacagaatttacaaaaattacttgaagaagaagggtatattcaatcggagagtgaatag

SEQ ID NO: 1186 - protein, 200 aa, Artificial Sequence
  Description of Artificial Sequence: synthetic amino acid sequence
VIGITGGIATGKSTVSELLTAYGFKIVDADIASREAVKKGSKGLEQVKEIFGEEAIDENGEMNRQYVGEIVFNHPDLREALNEIVHPIVREIMEQEKNNYLEHGYHVIMDIPLLYENELQDTVDEVWVVYTSESIQIDRLMERNNLSLEDAKARVYSQISIDKKSRMADHVIDNLGDKLELKQNLQKLLEEEGYIQSESE

SEQ ID NO: 1187 - DNA, 1026 bp, Artificial Sequence
  Description of Artificial Sequence: synthetic nucleic acid sequence
atggcaacgaatattgcaattaacggtatgggtagaataggtagaatggtgttacgaatagcactaaataataaaaatttaaatgttaaagcgattaacgctagttatccacctgaaacaattgcacatttacttaattatgatacgacgcatggagtttatgataaaaaagttgaaccgattgaaagtggtattaaagtgaatggacatgaaattaaattactttctgatcgcaatccagaaaatttaccatggaatgagatggatattgatgttgttatagaagcgacaggtaaatttaatcacggagataaagcagttgctcatattaatgcaggtgctaaaaaggtattactcactggaccgtctaaaggtggagacgttcaaatgattgttaaaggagtcaatgataatcaacttgatattgatacatacgatatttttagtaatgcatcttgtactactaattgtatcggaccagttgcaaaagtcctcaatgataaatttggaatcataaatggtctgatgacaactgttcatgcaataacaaatgatcaaaaaaatattgataatccacacaaagatttaagaagagcacgttcttgtaatgaaagtattattccaacgtcaacaggtgctgctaaagcacttaaagaagtattgcctgaagttgaaggtaaacttcatggaatggctttaagagtaccaacaaaaaatgtctctctcgttgatttagttgttgatttagaacagaatgttacagttacacaagttaatgatgcatttaaaaatgccgatttatcaggtgttcttgatgttgaagaagctcctttagtttctgtagactttaacacaaatcctcattcagcaattattgattctcaatctacgatggttatgggacaaaataaggtgaaagttatcgcttggtatgataatgaatggggttattcgaatagagttgttgaagtagctgacaaaattggacaattaattgatgataaagcaatggtaaaagccatttaa

SEQ ID NO: 1188 - protein, 341 aa, Artificial Sequence
  Description of Artificial Sequence: synthetic amino acid sequence
MATNIAINGMGRIGRMVLRIALNNKNLNVKAINASYPPETIAHLLNYDTTHGVYDKKVEPIESGIKVNGHEIKLLSDRNPENLPWNEMDIDVVIEATGKFNHGDKAVAHINAGAKKVLLTGPSKGGDVQMIVKGVNDNQLDIDTYDIFSNASCTTNCIGPVAKVLNDKFGIINGLMTTVHAITNDQKNIDNPHKDLRRARSCNESIIPTSTGAAKALKEVLPEVEGKLHGMALRVPTKNVSLVDLVVDLEQNVTVTQVNDAFKNADLSGVLDVEEAPLVSVDFNTNPHSAIIDSQSTMVMGQNKVKVIAWYDNEWGYSNRVVEVADKIGQLIDDKAMVKAI

SEQ ID NO: 1189 - DNA, 1371 bp, Artificial Sequence
  Description of Artificial Sequence: synthetic nucleic acid sequence
atggggttacaaacctatgaatatggtctaaaaccacaagatggatttgaggtgattacacatttcgaattcacctcacaacatttagatattttaaatcgactattcacccctttaatcggagttgaatcaattggactctatcattttatgagtcaattcatagataaaagtcaacaactcgggttaacgcattatatattcatgaatgaactaaaaattaacttattagatttcagggagcaaatggacaatttagaggctattggattgattaaaacatttgtaaggcatgaagaaaagtactctcactttgtttatgagttaattcagcctccaacagcctatcaattttttaatgatcctatgttatcagtatttttatttagtgaggttgataaaaaacgttatcaagcacttaaatcttatttcgaaaaagatgagaaagatttaagcaaatatcaacagacaactagaaaatttacagaagtattcaacgtacctaaaaaggtcaatgtttctgatcaaattaatttaaagcaaatcaaacactatgatggtatagatttatctaatgaaacttttgattttgaaatgttgagacagatgttgaaccatcattttattagtaatgaaattatcgataaagaagctaagaatttgattatacaacttgcgacactttatggaattactgaagatggtatgaaaaatgttatattaagttccattaccagtgcacaacaattatcttttgaagaaatgcgtaagaaagctagaacttattacctgattgaacatgataatcaattaccaaaattagagcatcaaacaaataaaattaacgatgaaaaaaaagatcgacaagcggaagatacaacaaatgattggttacaactgctagatgaaacaagtccgattgatatgttagcaagttggtctgattcggaacctacacagtcgcaaaaaagtatgatagaagaattgattaaccgtgaaaaaatgaattttggtgtaatcaatatacttttacagtttgttatgttaaaagaagatatgaagttgccaaaatcttatatttttgaaattgcttccaactggaagaaaattggtatttcaaatgccaaacaagcatatgaatatgcattacaagttaatcaacctaaaaattacgaaacacattctaatgataaacgacagaacaatcgtggaagacaaaatcaatttttatccaaagaaaagacacctaaatggcttcaaaatagggacgatcaagaagaaaataaagaaataaatgatgacactctcgaagaagatcgacaagcatttcttgaaaagttaaatcaaaagtggaaggaggaagataactaa

SEQ ID NO: 1190 - protein, 456 aa, Artificial Sequence
  Description of Artificial Sequence: synthetic amino acid sequence
MGLQTYEYGLKPQDGFEVITHFEFTSQHLDILNRLFTPLIGVESIGLYHFMSQFIDKSQQLGLTHYIFMNELKINLLDFREQMDNLEAIGLIKTFVRHEEKYSHFVYELIQPPTAYQFFNDPMLSVFLFSEVDKKRYQALKSYFEKDEKDLSKYQQTTRKFTEVFNVPKKVNVSDQINLKQIKHYDGIDLSNETFDFEMLRQMLNHHFISNEIIDKEAKNLIIQLATLYGITEDGMKNVILSSITSAQQLSFEEMRKKARTYYLIEHDNQLPKLEHQTNKINDEKKDRQAEDTTNDWLQLLDETSPIDMLASWSDSEPTQSQKSMIEELINREKMNFGVINILLQFVMLKEDMKLPKSYIFEIASNWKKIGISNAKQAYEYALQVNQPKNYETHSNDKRQNNRGRQNQFLSKEKTPKWLQNRDDQEENKEINDDTLEEDRQAFLEKLNQKWKEEDN

SEQ ID NO: 1191 - DNA, 900 bp, Artificial Sequence
  Description of Artificial Sequence: synthetic nucleic acid sequence
atgggcgattctcaaaatctagataaacgtatacaaaaaataaaacaaaatgtaatcaatgatactgacgttaaacattttcttgagaaaaatcgtagtaatataactaatgagatgatagacgaagatttaaatgttcttcaagagtataaagatcaacaaaaagtttatgatggacatcgctatgatgattgtccgaattttgtaaaaggacatgttcctgaactatatattgaaaatgaaagaatcaaaattagatatctaccttgcccgtgtaaaattaaacatgatgaggaacgatttgattcacaacttattacatctcaccatatgcaaagagatacacttcatgcaaagctcaaagatatttatatgaataatcgagagagacttgatgtagcaatggcagctgatcaaatctgtacagcaattactaacgatgaaaaagtaaaggggttatatttatatggtccttttggtacaggaaaatcattcatattgggtgctattgcaaatcaacttaaatcgcaaaagatttcatcaacaattgtatatttaccagaatttattcgcactttaaaaggtggctttaaagacggtagttttgagaaaaaattacaacgtgtgcgagaagctaatattttgatgttagatgatattggcgcagaagaagtcacaccgtgggtaagagatgaagtgattggtcctttattacattatagaatggtacatgaacttcctacattttttagttctaactttaattatagtgagcttgagcatcatctttcaataactagagatggcactgaaaagactaaagcagcacgaattattgaaagaattaagactttatcgacaccttattatttgactggtaaaaattttagaaacaattga

SEQ ID NO: 1192 - protein, 299 aa, Artificial Sequence
  Description of Artificial Sequence: synthetic amino acid sequence
MGDSQNLDKRIQKIKQNVINDTDVKHFLEKNRSNITNEMIDEDLNVLQEYKDQQKVYDGHRYDDCPNFVKGHVPELYIENERIKIRYLPCPCKIKHDEERFDSQLITSHHMQRDTLHAKLKDIYMNNRERLDVAMAADQICTAITNDEKVKGLYLYGPFGTGKSFILGAIANQLKSQKISSTIVYLPEFIRTLKGGFKDGSFEKKLQRVREANILMLDDIGAEEVTPWVRDEVIGPLLHYRMVHELPTFFSSNFNYSELEHHLSITRDGTEKTKAARIIERIKTLSTPYYLTGKNFRNN

SEQ ID NO: 1193 - DNA, 389 bp, Artificial Sequence
  Description of Artificial Sequence: synthetic nucleic acid sequence
atgtcgacgataaaaaatatcgatggaccaaaggattttgtttttagagtgttatcaggggtagcaattggaatagtagccggactcgttccaaatgcaattttgggagaaatttttaaatactttatgcaatatcatcctattttcaaaactttattaggggtcgttcaagccatccaatttacagtgccagcgcttattggagcattgatagctatgaagttcaatatgacacctttagcaatagctgtagtagcaagtgcctcatatgttggtagtggtgcagctcaatttaaacaaggtacatgggtaattgcgggaattggggatttaattaatacgatgttaactgcatccatcgccgtgttacttattttattaatagaaga

SEQ ID NO: 1194 - protein, 130 aa, Artificial Sequence
  Description of Artificial Sequence: synthetic amino acid sequence
  MOD_RES (130): variable amino acid
MSTIKNIDGPKDFVFRVLSGVAIGIVAGLVPNAILGEIFKYFMQYHPIFKTLLGVVQAIQFTVPALIGALIAMKFNMTPLAIAVVASASYVGSGAAQFKQGTWVIAGIGDLINTMLTASIAVLLILLIEX

SEQ ID NO: 1195 - DNA, 762 bp, Artificial Sequence; identical to SEQ ID NO: 927
  Description of Artificial Sequence: synthetic nucleic acid sequence

SEQ ID NO: 1196 - protein, 253 aa, Artificial Sequence; identical to SEQ ID NO: 928
  Description of Artificial Sequence: synthetic amino acid sequence

SEQ ID NO: 1197 - DNA, 1014 bp, Artificial Sequence; identical to SEQ ID NO: 1151
  Description of Artificial Sequence: synthetic nucleic acid sequence

SEQ ID NO: 1198 - protein, 337 aa, Artificial Sequence; identical to SEQ ID NO: 1152
  Description of Artificial Sequence: synthetic amino acid sequence

SEQ ID NO: 1199 - DNA, 1332 bp, Artificial Sequence
  Description of Artificial Sequence: synthetic nucleic acid sequence
atgactcacattcaattagactatggcaaaactttagaattttttgataagcatgaactagatcagcaaaaggatattgttaaaactatccatcaaactattcataaaggtacaggagcaggtaatgactttttaggttggttagatttacctgttgattatgataaagaagaattttctagaatcgtcgaagcatctaaacgtatcaaatcaaattccgatgtacttgttgttatcggtattggaggttcatacttaggtgcacgtgctgcaatcgagatgcttacatcttcatttagaacaaatacggaataccctgaaattgtatttgtaggtaatcatttatcctcaagttatacaaaagaattacttgattatttacaaggaaaagatttttcagttaacgttatttcaaaatcaggtactacgacagaaccagcagttgcatttagattatttaaacaattggttgaagaaaaatatggaaaagatgaagctaagaaacgtatttttgcaacgacagataaatctaaaggtgcacttaaacaattagcagacaatgagggttatgagacgtttgttgtacctgatgatgtgggaggtcgttattctgttcttacagctgtaggattactaccaattgcaactgcaggtatcaatattgaatcaatcatgattggtgcggctaaggcacgtgaagagttatcttctgatgatttagatcaaaatatcgcatatcaatatgcaactattcgaaatattttatacagcaaaggttatactactgaaatgttaattaattacgaaccctctatgcagtatttcaacgaatggtggaaacaattatacggtgaatcagaagggaaagatttcaaaggtatttatccatcaagtgcgaattacacaactgatttacattccttaggacaatatgttcaagagggccgtcgtttcttattcgagacagtggttaaggtcaaccatccaaaacatgatatcaaaattgaagaggatgcagatgatttagacggactgaactatcttgctggcaaatcaatcgatgaagtgaatactaaagcatttgaaggtacattacttgcacataccgatggtggcgttccaaatatcgttgtaaatattcctcagttagatgaagaaacatttggatatgttgtttatttctttgaattagcttgtgcaatgagtggatatcaattaggtgttaatccatttaatcaacctggagttgaagcctataaacaaaatatgtttgcgctattaggtaaaccaggctttgaagataagaaaaaagaattagaaaatcgtttataa

SEQ ID NO: 1200 - protein, 443 aa, Artificial Sequence
  Description of Artificial Sequence: synthetic amino acid sequence
MTHIQLDYGKTLEFFDKHELDQQKDIVKTIHQTIHKGTGAGNDFLGWLDLPVDYDKEEFSRIVEASKRIKSNSDVLVVIGIGGSYLGARAAIEMLTSSFRTNTEYPEIVFVGNHLSSSYTKELLDYLQGKDFSVNVISKSGTTTEPAVAFRLFKQLVEEKYGKDEAKKRIFATTDKSKGALKQLADNEGYETFVVPDDVGGRYSVLTAVGLLPIATAGINIESIMIGAAKAREELSSDDLDQNIAYQYATIRNILYSKGYTTEMLINYEPSMQYFNEWWKQLYGESEGKDFKGIYPSSANYTTDLHSLGQYVQEGRRFLFETVVKVNHPKHDIKIEEDADDLDGLNYLAGKSIDEVNTKAFEGTLLAHTDGGVPNIVVNIPQLDEETFGYVVYFFELACAMSGYQLGVNPFNQPGVEAYKQNMFALLGKPGFEDKKKELENRL

SEQ ID NO: 1201 - DNA, 1100 bp, Artificial Sequence
  Description of Artificial Sequence: synthetic nucleic acid sequence
atgaaagataaaatcgttttagcatattcaggtggtttagatacaagcgttgcagttcaatggcttattgataaaggatatgatgtagttgcttgttgtcttgacgtaggcgaaggcaaagatttagacgttgtatatcaaaaagctttagatatgggtgcagtcgaatgtcatattattgatgcaactaaagaatttagtgatgattatgtaagttatgctattaaaggaaatttaatgtatgaaaatgcatatcctctagtttcagcattatcacgtccactcatcgcgaaaaaactggttgaaattgctgaaaaaacaaattctattggtattgcgcatggatgtactggtaaaggtaatgatcaagtacgtttcgaagtggcaatcaaagctttaaatcctaagttaaaagcatttgcacctgttcgtgaatgggcttggagcagagaagaagaaattgattacgcaatcaaacataatattcctgtttcaatcaattatgactcgccatactcaattgaccaaaacttatgggggagagctaatgaatgtggtattttagaagatccgtatgccgcacctccggaagatgcatttgatttaactacacctttagaagaaactccagacaatgcagacgaaattatccttacatttaaacaaggtattccagtacaagttgatggcaaagattatcaattagatgaccttattctttacttgaatcaacttgctggcaaacacggtattggtagaatcgatcatgttgaaaacagaatggtcgggataaaatcgagagagatttatgaaacacctggtgcggaagttattttaaaagcacacaaagcactagaaacaattacattaactaaagacgtagcgcactttaagcctgtcattgaaaaacaattttcagaacaaatatacaatggtttgtggttctcgccattaacagatagtttaaaactctttatcgatagtactcaacaatatgttgagggagatgtgagaattaaattatttaaagggaacgctattgtcaatggcagacaatctccttacactttatacgatgaaaaattagctacttatacgga

SEQ ID NO: 1202 - protein, 367 aa, Artificial Sequence
  Description of Artificial Sequence: synthetic amino acid sequence
  MOD_RES (367): variable amino acid
MKDKIVLAYSGGLDTSVAVQWLIDKGYDVVACCLDVGEGKDLDVVYQKALDMGAVECHIIDATKEFSDDYVSYAIKGNLMYENAYPLVSALSRPLIAKKLVEIAEKTNSIGIAHGCTGKGNDQVRFEVAIKALNPKLKAFAPVREWAWSREEEIDYAIKHNIPVSINYDSPYSIDQNLWGRANECGILEDPYAAPPEDAFDLTTPLEETPDNADEIILTFKQGIPVQVDGKDYQLDDLILYLNQLAGKHGIGRIDHVENRMVGIKSREIYETPGAEVILKAHKALETITLTKDVAHFKPVIEKQFSEQIYNGLWFSPLTDSLKLFIDSTQQYVEGDVRIKLFKGNAIVNGRQSPYTLYDEKLATYTX

SEQ ID NO: 1203 - DNA, 1215 bp, Artificial Sequence
  Description of Artificial Sequence: synthetic nucleic acid sequence
atgcatattgtgattgggatattaggaatcattttctttttagcactcgcagttttatttagttcagacagaaaaaatattcgctggcgatatgttggattgctattagtaattcaactaatatttgcatttatattacttaaaactaatttgggaatttcagttattgggagtatttcagatggttttaattatttattagctaaagcagcggtcggtgtcaattttgtatttggtggctttaaatttattgatcctaaacaaccaccattcttctttagcgttttgttacctattgtttttatttcagcattgattggtatattacaatatacacgaatacttccactaattattaacttactgggctttttaatttcaaaaattaatggaatgggccgtttagaatcttacaatgcggtcgcggcagcaattctaggacaatctgaagtctttatctcattaaaaaaacaattaccttacatacctaaacaacgcttatatacattaactgcttcagcgatgtcaacggtatcagcatcaattataggcgcttattttacacttattgaaccaaaatatgttgttactgcagtagtgcttaacttgtttggtggttttatcattgcatctatcattaatccttataaagtcaatgaggaagacgacaaattattaattgatgagaacgaaacaaaaaaacaatctttctttgaaatgcttggggagtatatactagatggatttaaagtagcagttattgtaggcgctatgctgataggttatattgcaattattgctttattaaatggaatggtgagtggaatcttaagctttatgtctggtggtgctattcaatggaacttccaaacgcttattggatttatttttgcacctttcgctttcctaactggaataccgtggcaagatgcagttcaatctggttcagtaatggctacaaaattactatctaatgaatttgtagcaatgcaagatttaggtaaagcgactggattatcggaacatgctaaaggaattacctctgtcttcttagtatcattcgcaaactttagttcaattggtattatttcaggagctattaaatcattgaatgatgaaaaaggtgacgttgttgctcgtttcggaataaaattattatttggtgcaacacttgtttcgtttatatcagcggctattgcaggattctttatctaa

SEQ ID NO: 1204 - protein, 404 aa, Artificial Sequence
  Description of Artificial Sequence: synthetic amino acid sequence
MHIVIGILGIIFFLALAVLFSSDRKNIRWRYVGLLLVIQLIFAFILLKTNLGISVIGSISDGFNYLLAKAAVGVNFVFGGFKFIDPKQPPFFFSVLLPIVFISALIGILQYTRILPLIINLLGFLISKINGMGRLESYNAVAAAILGQSEVFISLKKQLPYIPKQRLYTLTASAMSTVSASIIGAYFTLIEPKYVVTAVVLNLFGGFIIASIINPYKVNEEDDKLLIDENETKKQSFFEMLGEYILDGFKVAVIVGAMLIGYIAIIALLNGMVSGILSFMSGGAIQWNFQTLIGFIFAPFAFLTGIPWQDAVQSGSVMATKLLSNEFVAMQDLGKATGLSEHAKGITSVFLVSFANFSSIGIISGAIKSLNDEKGDVVARFGIKLLFGATLVSFISAAIAGFFI

SEQ ID NO: 1205 - DNA, 342 bp, Artificial Sequence; identical to SEQ ID NO: 451
  Description of Artificial Sequence: synthetic nucleic acid sequence

SEQ ID NO: 1206 - protein, 113 aa, Artificial Sequence; identical to SEQ ID NO: 452
  Description of Artificial Sequence: synthetic amino acid sequence

SEQ ID NO: 1207 - DNA, 387 bp, Artificial Sequence
  Description of Artificial Sequence: synthetic nucleic acid sequence
atgcaattattaggtagacaacctcaaattggtgaaacagtcaatgatcaaattgccaaacatatttcaatacatcaacaaggaataaatgtcgacgtatctccactcattacaaatcattacggtacactaagtaaagcagtatttgttggaattattgaggaaacgattcggcacgaaatgagaaagtataaaaaaggtaatgtcatgatagaaagtatgagtattatctatattaagactgtaccaattgaatctactattgaagtacattatgaaatgttagatgttggccgatattttgctaaattagaagttactatgattaataatggtgaaaaagttgctaatgcattagtaatttgtcaaatgtttgatgggttttaa

SEQ ID NO: 1208 - protein, 128 aa, Artificial Sequence
  Description of Artificial Sequence: synthetic amino acid sequence
MQLLGRQPQIGETVNDQIAKHISIHQQGINVDVSPLITNHYGTLSKAVFVGIIEETIRHEMRKYKKGNVMIESMSIIYIKTVPIESTIEVHYEMLDVGRYFAKLEVTMINNGEKVANALVICQMFDGF

SEQ ID NO: 1209 - DNA, 939 bp, Artificial Sequence
  Description of Artificial Sequence: synthetic nucleic acid sequence
atggaagtaaaaatgaatgaaataatggaagcattagaacaaagtgaattaattattattcacagacatctaagaccagatccagacgcatatggttcacaattaggtttgaaatattacttacaaaagaagtttccaaacaaacaaatttatgctgtaggagctaatgaagattctttgaaatttataggtttgatggacgaaattgacaatgatatatacaagaaagcgactgtagttgtatgtgatacggcaaatgcgccacgaatagatgaccaacgttatgatacaggtaccaaacttttgaaaattgatcatcatcctgctactgatcagtatggagatattaactatgttaataccaaagcttcttccactagtgaaataatttacgaattcatttcacatttcaatgatgaacatatcattgatgaacaagttgctagagtattatatcttggcatcgttggtgatactggacgttttttatttaataatacaacgccacgaacaatgcaaattgctggaaaattacttacatatccttttgatcacaaccaagaattaaacaaaatgtctgaaaaggatccaaaactattaccatttcaaggatatatattgcaaaattttgatttaaatgataaaggattttgcaaagttaaaataactaaagacatacttgaaaaatttcaaatacaacctaatgaagcgtctttatttgtaaatacaatcgcagatattcgaggattaaaaatatggatgtttggcgttgatgaaggagatcaaattagatgtcggttgcgttctaaaggtcatattattattaatgatgtcgctaatacatttggtggtggtggacatccaaatgcatctggagtttcagtaaatagttgggagcaattcgagcaactcgccgaagctttaaacgacaagttataa

SEQ ID NO: 1210 - protein, 312 aa, Artificial Sequence
  Description of Artificial Sequence: synthetic amino acid sequence
MEVKMNEIMEALEQSELIIIHRHLRPDPDAYGSQLGLKYYLQKKFPNKQIYAVGANEDSLKFIGLMDEIDNDIYKKATVVVCDTANAPRIDDQRYDTGTKLLKIDHHPATDQYGDINYVNTKASSTSEIIYEFISHFNDEHIIDEQVARVLYLGIVGDTGRFLFNNTTPRTMQIAGKLLTYPFDHNQELNKMSEKDPKLLPFQGYILQNFDLNDKGFCKVKITKDILEKFQIQPNEASLFVNTIADIRGLKIWMFGVDEGDQIRCRLRSKGHIIINDVANTFGGGGHPNASGVSVNSWEQFEQLAEALNDKL

SEQ ID NO: 1211 - DNA, 3198 bp, Artificial Sequence
  Description of Artificial Sequence: synthetic nucleic acid sequence
atggtagcacatttaaatattcatacttcttttgacctgttagattctagtttaagaattgatgcattaatagataaagctaaaaaagaaggatatcgtgcgcttgcaataaccgatacaaatgtattgtacggttatccaaagttttatgatgcttgtattgcagctcacatacatccaatctttggtatgactatatatttaacggatggtctctatactattgaaacggttgttttagcaaaaaataatcaaggactcaagtcattatatcaactttcttctgctataatgatgagaaataaagaagaagtgccaattgaatggctaaaaagatacgacgaacatttaattatcatatttaaagaggctgagttgtctcataagcaagttattgatgcttttgaaggtaagaaagaattatatttaaatcacaatagtaataatacattgactggcaaacgtgtatggatgcaatctgcaagatacttaaatgaagatgatgctgaaaccattccagcgttacatgccataagagataatactaagttagatttaatacatgagaaagaaacacttgatgaacattttcctagtatagaagaacttcaaacactaaatcttagtgaagatatgattactaacgcgaatgaaattgaagaattatgccaagcagaaattgcataccatcaatccctgttgccacaatttgtgacacctaatggtgaaacttcgaaagattatctttggacgatacttatacataggttacgagaatgggaacttaatgataaaacttatttcaatcggttgaaacatgaatataaaattattactgatatgggtttcgaggattattttcttattgtaagtgatttgattcattttgctaaaacacatgaagtgatggttgggccaggtcgtggttcatcagcagggtcattagtaagttatttattaggtattactactatagacccgttaaaatataatcttttatttgaaagatttcttaatcctgaacgcgtaactatgccagatattgatattgattttgaagacacgagacgtgaaaaagtaattaagtatgtacaagataaatatggtgaacatcatgtatcaggtattgtgacatttgggcatctgttagctcgtgctgttgctagagatgtaggaagaataatgggatttgatgaaacgagtttaaatgagatttcaaaacttattccacataaattaggtataactcttgaagaagcataccaaaagccagagtttaaagcatttgttcatcgtaatcatagaaatgaacgttggtttgaagtgagtaaaaagttagagggattaccaagacatacgtctacgcatgctgcaggtatcattatcaatgatcaaccattattcaaatttgccccattaacaactggtgatacaggattattaacgcagtggactatgacagaagcggaacgtataggattattaaaaattgatttcttgggattacgcaatctatcaattattcatcaaattattttacaagttaaaaaggatttaaatataaatattgatatagaagctataccttatgatgataaaaaagtttttgatttattatcaaacggtgacactacaggtatatttcaattggaatcagacggtgttagaagcgtattaaaaagattgcaacccgaacattttgaagatatcgtagctgtcacatcattatatagaccaggaccaatggaagaaataccaacttatataacccgtagacataatcctaaccaatttgcttatttacatccagatttagaaccaatcttaaaaaacacatatggtgttatcatttatcaagaacaaataatgctaatagcaagtcaagttgctggttttagttatggtgaagcagatattttaagaagggcaatgagtaaaaagaatcgtgcaatcttagaaagtgagcgtcaacatttcattgatggtgcaaaaaataacggttacgatgaacagataagtaagcaaatttttgatttaatacttaagtttgcagattatgggttcccacgtgcccatgctgttagttactcaaaaattgcatacattatgagctatttaaaagtgcactatcctcattatttttatgcaaatatcttgagtaatgtaataggaagtgaaaaaaagactgcagctatgattgacgaagctaagcaccaaagaattagcatcttgcctcccaatattaatcaaagtcattggtattataaggcaagtaataaaggaatatatctgtctttaggtacaattaaaggaattggatatcaaagcgttaaattaattattgatgaacgtcagcagaatggaccttatagagatttctttgatttttcaagacgtataccaaaaagggtgaaaaatagaaaattacttgagtctcttatcttagtaggcgcattcgacacttttggcaaaactagagcgacattattacaagcaattgatcaagtattagatttgaattctgatgttgagcaagatgaaatgcttttcgatcttttaactcctaaacaatcgtatgaagaaaaagaggaactacctgatcaattattaagtgattatgaaaaagaatacctaggattctatattagtaaacatccagttgaaaagaaatttgaaaagaaacaatatttaggcatatttcaattgtctaatggaagtcactaccaacctatacttgttcaatttgaccatatcaaacaaataagaacgaagaatggtcaaaatatggcatttgtaacgatgaatgatggaagaacgatgatggatggagtgattttcccagataagtttaaaaaatacgaaacttctatttcaaaggaacagatgtatatcgtattaggtaaatttgaaaagcgtaaccaacaaatgcaacttatcatcaatcaactttttgaagttgaagcgtatgagcaaacaaaattgtctaattcgaaaaaagttattttacgtaatgtaacacatctagaaccacaatttgaacattcaaaagtagaatctaatgaacaacatgcattaaatatttatggttttgacgaaagtgcaaataagatgacaatgttgggacaaattgaacgtcaacgtcaaaattttgatctattaatacaaacttattcgccagctgatattagatttatttaa

SEQ ID NO: 1212 - protein, 1065 aa, Artificial Sequence
  Description of Artificial Sequence: synthetic amino acid sequence
MVAHLNIHTSFDLLDSSLRIDALIDKAKKEGYRALAITDTNVLYGYPKFYDACIAAHIHPIFGMTIYLTDGLYTIETVVLAKNNQGLKSLYQLSSAIMMRNKEEVPIEWLKRYDEHLIIIFKEAELSHKQVIDAFEGKKELYLNHNSNNTLTGKRVWMQSARYLNEDDAETIPALHAIRDNTKLDLIHEKETLDEHFPSIEELQTLNLSEDMITNANEIEELCQAEIAYHQSLLPQFVTPNGETSKDYLWTILIHRLREWELNDKTYFNRLKHEYKIITDMGFEDYFLIVSDLIHFAKTHEVMVGPGRGSSAGSLVSYLLGITTIDPLKYNLLFERFLNPERVTMPDIDIDFEDTRREKVIKYVQDKYGEHHVSGIVTFGHLLARAVARDVGRIMGFDETSLNEISKLIPHKLGITLEEAYQKPEFKAFVHRNHRNERWFEVSKKLEGLPRHTSTHAAGIIINDQPLFKFAPLTTGDTGLLTQWTMTEAERIGLLKIDFLGLRNLSIIHQIILQVKKDLNINIDIEAIPYDDKKVFDLLSNGDTTGIFQLESDGVRSVLKRLQPEHFEDIVAVTSLYRPGPMEEIPTYITRRHNPNQFAYLHPDLEPILKNTYGVIIYQEQIMLIASQVAGFSYGEADILRRAMSKKNRAILESERQHFIDGAKNNGYDEQISKQIFDLILKFADYGFPRAHAVSYSKIAYIMSYLKVHYPHYFYANILSNVIGSEKKTAAMIDEAKHQRISILPPNINQSHWYYKASNKGIYLSLGTIKGIGYQSVKLIIDERQQNGPYRDFFDFSRRIPKRVKNRKLLESLILVGAFDTFGKTRATLLQAIDQVLDLNSDVEQDEMLFDLLTPKQSYEEKEELPDQLLSDYEKEYLGFYISKHPVEKKFEKKQYLGIFQLSNGSHYQPILVQFDHIKQIRTKNGQNMAFVTMNDGRTMMDGVIFPDKFKKYETSISKEQMYIVLGKFEKRNQQMQLIINQLFEVEAYEQTKLSNSKKVILRNVTHLEPQFEHSKVESNEQHALNIYGFDESANKMTMLGQIERQRQNFDLLIQTYSPADIRFI

SEQ ID NO: 1213 - DNA, 444 bp, Artificial Sequence
  Description of Artificial Sequence: synthetic nucleic acid sequence
atgtctttaagagatgacgctttagaaatgcatagagagaaccaaggtaaactagaaattacaccaaatgttaaagtgacaaataagcaacaattaagcctagcatactcacctggcgttgcagaaccttgtaaagaaatccatgaagattcaagaaaagtatatgagtacactattaaaggaaatacagttgctgttgtaacagatggaactgctgttctcggtttagggaatattggagcagaagcaagtattccagtaatggaaggaaaggcagcactgttcaaaagttttgcgggtattaatggtgtgccaatagctctagatacaactgacactcaagaaatcataaaaacagtaaaacttattgcaccaaactatggtggaattaatcttgaagatatatcagctcccattttatattggttcaaaacatggtattga

SEQ ID NO: 1214 - protein, 147 aa, Artificial Sequence
  Description of Artificial Sequence: synthetic amino acid sequence
MSLRDDALEMHRENQGKLEITPNVKVTNKQQLSLAYSPGVAEPCKEIHEDSRKVYEYTIKGNTVAVVTDGTAVLGLGNIGAEASIPVMEGKAALFKSFAGINGVPIALDTTDTQEIIKTVKLIAPNYGGINLEDISAPILYWFKTWY

SEQ ID NO: 1215 - DNA, 942 bp, Artificial Sequence
  Description of Artificial Sequence: synthetic nucleic acid sequence
atgatagagtcacaactccctgatattcaatattatccaatatcaagcggtaaattacgtcgttatctatcttttgaaaatgcaaaagatgtctttaaagttttgaaaggaattttagatgcacgtaaaatacttaaaaaacaaaaaccagacttacttttttcaaaaggtggttttgttagtgttccggtagttatagccgcacgttctttaaaaattccaactatcatacacgaatcagatttaactcctggattagctaataaaatttctttaaaatttgctaagaaaatatacacaacctttgaagatacacttacatatcttccaaaagataaagctgattttgttggggctactgtacgtgaggacttaaaacaagggaataaagaaagaggatatcaactcactgattttgataaaaataaaaaagtgttattagtcatgggaggaagtttaggtagtaaaaaacttaataatatcattcgtcaaaatattgaggcacttctccacgattatcaaattatacacttaactggaaaaggacttgttgatgactcaatcaataaaaaaggttatgttcaatttgaatttgttaaagacgacttaactgatttattagcaatcactgatactgttgtaagtcgtgcaggttctaacgcaatttatgaatttttaacgctacgtataccgatgttactcatccccttaggacttgatcaatcaagaggagatcaaattgataatgctaaaaactttgaatctaagggttatggtcgtcatattcctgaagatcaacttacagaagttaacttattgcaagaattaaatgatattgaattacatcgtgaatctattattaaacaaatggaaacatatcaagagagttacacgaaagaagatttatttgataaaattattcatgatgcattaaacaagtag

SEQ ID NO: 1216 - protein, 313 aa, Artificial Sequence
  Description of Artificial Sequence: synthetic amino acid sequence
MIESQLPDIQYYPISSGKLRRYLSFENAKDVFKVLKGILDARKILKKQKPDLLFSKGGFVSVPVVIAARSLKIPTIIHESDLTPGLANKISLKFAKKIYTTFEDTLTYLPKDKADFVGATVREDLKQGNKERGYQLTDFDKNKKVLLVMGGSLGSKKLNNIIRQNIEALLHDYQIIHLTGKGLVDDSINKKGYVQFEFVKDDLTDLLAITDTVVSRAGSNAIYEFLTLRIPMLLIPLGLDQSRGDQIDNAKNFESKGYGRHIPEDQLTEVNLLQELNDIELHRESIIKQMETYQESYTKEDLFDKIIHDALNK

SEQ ID NO: 1217 - DNA, 615 bp, Artificial Sequence; identical to SEQ ID NO: 411
  Description of Artificial Sequence: synthetic nucleic acid sequence

SEQ ID NO: 1218 - protein, 204 aa, Artificial Sequence; identical to SEQ ID NO: 412
  Description of Artificial Sequence: synthetic amino acid sequence

SEQ ID NO: 1219 - DNA, 1014 bp, Artificial Sequence
  Description of Artificial Sequence: synthetic nucleic acid sequence
atggaacgattttgttgtgtaaatcaaattaactatattcaaatgaatccgttagaagccaaatttaaaacgagcgctctaagatcatggaaaactgatcaggcagatgctcataagcttgcttgtttaggaccgacgcttaaacaaacagacaacttacctatacatgagttaatattctttgaattaagagaacgcgtccgttttcatctagaaatcgagaatgaacaaaatcgacttaaatttcagatccttgaattactccatcaaacattccctggtttagaaagattatttagtagtcgatattcaatcattgcactcaacatcgcagaaatctttactcatccagacatggttcttgatatcgacaaggaggtactgattacacatatattcaattctacagataagggaatgtcaatggataaagctacaaaatatgcacttcaattaagggtgattgctcaagaaagctatcctaatgtcgatagacattcctttctagtcgaaaaattacgcttacttattcaacaattaaaacaatctattcatcatctcaaacaattagatgatgccatgattcaattagcacaacaactcgattattttgaaaatattcattcgatacctggtattggtaagctaagcacagctatgattattggggagattggtgatattaagcgatttaaatcaaataaacaactcaatgcttttgttggcattgatatcaaacgatatcaatcaggtcatacacactgtagagataccatcaacaagcgtggtaataaaaaagcgagaaaacttttattttgggtgattatgaatataataagagggcagcatcattatgacaatcatgtcgtcgattattactacaaactaagaaagcagcctaatgagaaacctcataagactgccatcattgcttgtataaatcgattattaaaaacaattcattatcttgtaatgaatcataaattgtacgattatcaaatgtcaccacattag

SEQ ID NO: 1220 - protein, 337 aa, Artificial Sequence; identical to SEQ ID NO: 156
  Description of Artificial Sequence: synthetic amino acid sequence

SEQ ID NO: 1221 - DNA, 471 bp, Artificial Sequence
  Description of Artificial Sequence: synthetic nucleic acid sequence
gtgatatctatgcacaatatgtccgacatcatagaacaatacattaagcggttatttgaagaagcagatgaagatgttgtagaaatacaacgcgctcatattgctcaacgtttcgattgtgttccttctcaacttaactatgttattaagacacgttttactaatgaacatggttatgaaatagaaagtaaacgtggtggcggtggttacattcgaatcactaaaattgaaaataaagatgctacaggttatattaatcacttactacaattaataggtccatctatttctcaacaacaagggtattatgtcatagatggtttgttagataaaggtttgatcaatgaaagagaagctaaaatgatacagaccattattgatagagaaactttaaaaatggatgttgttgcacgcgatattattagagctaatatcttaaaacgattactaccagttattaattattactag

SEQ ID NO: 1222 - protein, 156 aa, Artificial Sequence
  Description of Artificial Sequence: synthetic amino acid sequence
VISMHNMSDIIEQYIKRLFEEADEDVVEIQRAHIAQRFDCVPSQLNYVIKTRFTNEHGYEIESKRGGGGYIRITKIENKDATGYINHLLQLIGPSISQQQGYYVIDGLLDKGLINEREAKMIQTIIDRETLKMDVVARDIIRANILKRLLPVINYY

SEQ ID NO: 1223 - DNA, 579 bp, Artificial Sequence
  Description of Artificial Sequence: synthetic nucleic acid sequence
gtgaggtgtttaaaattgctttgtgaaaattgccattttaatgaagcggaagttaaacttactgttaaaggtatagatagtacgcatgaaaaatgggtatgttcagtatgtgcccaaggagaaaacccctggttacattctaacgatgataatacgtatcatacacaccaagacgatatagaagaagcatttgtagtgaaacagatacttcaacaccttgctgcaaaacatggtattaattttcatgagatggcatttaaagaagaaaaaaaatgcccaacgtgtcagatgacacttaaggatattgcacatgttggtaagcttgggtgtgctgattgttatgctacgtttaaagaagacatcattgatatagttcaacgtgttcaaggtggtcaatttgaacatgtaggaaaaacaccacaatcatcgtataagaaacttgcaataaaaaagcaaattgaagaaaaatcaaaatatctaaataaattgatagatggtcaagagtttgaagaggcagcgattgttcgtgatgaaattaaagctttaaaaagtgagagcgaggtgtctcatgatgagtaa

SEQ ID NO: 1224 - protein, 192 aa, Artificial Sequence
  Description of Artificial Sequence: synthetic amino acid sequence
VRCLKLLCENCHFNEAEVKLTVKGIDSTHEKWVCSVCAQGENPWLHSNDDNTYHTHQDDIEEAFVVKQILQHLAAKHGINFHEMAFKEEKKCPTCQMTLKDIAHVGKLGCADCYATFKEDIIDIVQRVQGGQFEHVGKTPQSSYKKLAIKKQIEEKSKYLNKLIDGQEFEEAAIVRDEIKALKSESEVSHDE

SEQ ID NO: 1225 - DNA, 454 bp, Artificial Sequence
  Description of Artificial Sequence: synthetic nucleic acid sequence
atgtctgaggagacacctgttattatttcttccagaattcgattagctagaaatcttgaaaaccatgtccacccacttatgttcccttcagagcaagaaggatatcgagtgataaatgaagttcaagatgcgctttccaacttaactttaaatcgattagatacgatggatcaacaaagtaaaatgaaattggttgcgaaacatcttgtgagtcctgaactagtgaaacaacctgcttcagcagtaatgttaaatgatgatgaatcggtaagtgttatgataaacgaagaagatcatatacgaatacaggctctaggaactgatttatcgctaaaggatttatatcaacgcgcttctaaaattgatgatgaattagataaagcgttagacattagttatgatgagcatttaggatatttaactacctgtcctactaatattggtacaggaatgc

SEQ ID NO: 1226 - protein, 152 aa, Artificial Sequence
  Description of Artificial Sequence: synthetic amino acid sequence
  MOD_RES (152): variable amino acid
MSEETPVIISSRIRLARNLENHVHPLMFPSEQEGYRVINEVQDALSNLTLNRLDTMDQQSKMKLVAKHLVSPELVKQPASAVMLNDDESVSVMINEEDHIRIQALGTDLSLKDLYQRASKIDDELDKALDISYDEHLGYLTTCPTNIGTGMX

SEQ ID NO: 1227 - DNA, 693 bp, Artificial Sequence
  Description of Artificial Sequence: synthetic nucleic acid sequence
atgtacgacataaccaagtggaaacatatgtttaaattagatccggctaaatcaatttcggatgaaaatttagaggcactgtgtatgtctaacactgatgcaataattattggtgggacagatgatgtaacagaagataatgttattcatttaatgagtagagtaagacgttatccgttaccacttgtcttagaagtttcgaatgtagaaagtgtgatgcctggttttgatttctattttattccaacagtcatgaatagtaaggatacaaaatatcataacgaaattttactagaagcccttaaaaaatatggacatgtgattaattttgatgaagtttttttcgagggatatgtcgttctaaacgcaaatagtaaagttgcaaaaattaccaaagcttatactcaattaggtatagaagatgtcgaagcatatgcacaaatggcagaagaattatatcgatttccaatcatgtacgtagaatatagtggcacatatggagatgttgataaggttaaagcgattgcaaatatgcttcaacatactcaattattttatggcggtggtataacaaacattgacaaagctaacgaaatgtctaacattgcggataccattgttgtcggcgatattatatataacgacattaaaaaagcattaaaaactgtaaagataaaggagtctaataaatga

SEQ ID NO: 1228 - protein, 230 aa, Artificial Sequence
  Description of Artificial Sequence: synthetic amino acid sequence
MYDITKWKHMFKLDPAKSISDENLEALCMSNTDAIIIGGTDDVTEDNVIHLMSRVRRYPLPLVLEVSNVESVMPGFDFYFIPTVMNSKDTKYHNEILLEALKKYGHVINFDEVFFEGYVVLNANSKVAKITKAYTQLGIEDVEAYAQMAEELYRFPIMYVEYSGTYGDVDKVKAIANMLQHTQLFYGGGITNIDKANEMSNIADTIVVGDIIYNDIKKALKTVKIKESNK

SEQ ID NO: 1229 - DNA, 2169 bp, Artificial Sequence
  Description of Artificial Sequence: synthetic nucleic acid sequence
atgaattcagagcaaagtgaagcggttagaacaacagaaggcccattgcttattatggcaggtgctggatcaggaaagacacgtgtgttaacacatcgcattgcgtatttattagatgaaaaagatgtatcaccttataatattttagctattacgtttacaaataaagcagctaaagaaatgaaggcgcgtgtcgaacatcttgtgggagaagaagcgcaagtgatttggatgtccacttttcactctatgtgtgtaagaattctgagaagagatgctgatcgtattggcattgaaagaaatttcactatcattgatcctaccgatcaaaaatcagtgattaaagatgtattgaaaagtgaaaatatagacagtaagcgatttgagccacgtatgtttattggtgcaattagcaatttgaaaaatgaattaaaaacacctgaggatgctcaaaaagaggcgaatgattttcactctcaaatggttgcaacggtttacaaaggttatcaaagacagttatcacgtaatgaagcactcgactttgatgatttaattatgacaactattaatttatttgaacgtgtacccgaaactctagaatactatcaaaataaatttcaatatatacatgtagatgagtatcaagataccaataaagcacaatataccttagtaaaactattagcaaacaaatttaaaaatttatgtgttgttggtgattctgaccaatctatttatggttggagaggagctgatatacaaaatattttatcttttgaagaggactatcctgaggcaaagacaattttcctcgaacagaactatcgttcaactaagaatattttaaatgctgcaaatgaagttataaaacataattctgaacgtaaacctaaaggtctatggactgcaaattctggaggagacaaaattcagtattatgaagctatgactgaaagagatgaagcagaatacgttgttaaagaaataatgaagcatcaacgcagtggtaaaaaatatagtgaaatggctatattatatagaacaaatgcccaatcacgtgtacttgaggaaacatttatgaaatcaaatattccttatacaatggttgggggtcaaaagttctatgaccgtaaagaaattaaagatttacttagttatttaagagttattgctaatagcaatgatgatattagtttgcaacgtattattaacgtgcctaaacgtggtattggaccttcatctgttgaaaaaatccaaacctatgcacttcaaaataatataagtatgtttgacgcattggctgaggtagattttataggtctctctaaaaaggtaactcaagaatgtatcagtttttatgaaatgattcaaaatttaatcaaagaacaagaatttctcgaaattagtgaaatcgtagatgaagtactacaaaaatcaggctatagagacatgcttgatcgagaacaaagtattgaatcacgaagtcgattagaaaacttagatgaatttatgtctgtacctaaagattatgaggaaaatactcctttagaggaacaatcacttattaattttctaacagatttatcattagttgctgatattgacgaagcagatacacagaatggtgtaacattgatgacaatgcattcagcaaaaggtcttgaatttcctatagtttttattatgggaatggaggagtcgttgttcccacatatcagagcaataaaaagtgaagatgatcatgaaatggaagaggaacgtcgtatttgttatgtagcaattacacgagcagaagagttgctttatatcacaaatgcaacgaccagaatgttgtttggtcgttctcaatccaatatgccatctcgatttttaaaagaaatcccagaagacctacttgatagtcataccggtcaaaaaagacaaactatatctcccaaatctcaacctaaaagaggttttagtaagcgtactacatcaactaaaaaacaagtttcatcatctgattggaaagtaggagataaagttatgcataaagcatggggtgaagggatggttagtaacgtgaatgaaaaaaatggatctgtagagttggatattatatttaaatcagaaggtccaaaacgattattagctcagttcgcaccaataacaaagaaggaggactcatag

SEQ ID NO: 1230 - protein, 722 aa, Artificial Sequence
  Description of Artificial Sequence: synthetic amino acid sequence
MNSEQSEAVRTTEGPLLIMAGAGSGKTRVLTHRIAYLLDEKDVSPYNILAITFTNKAAKEMKARVEHLVGEEAQVIWMSTFHSMCVRILRRDADRIGIERNFTIIDPTDQKSVIKDVLKSENIDSKRFEPRMFIGAISNLKNELKTPEDAQKEANDFHSQMVATVYKGYQRQLSRNEALDFDDLIMTTINLFERVPETLEYYQNKFQYIHVDEYQDTNKAQYTLVKLLANKFKNLCVVGDSDQSIYGWRGADIQNILSFEEDYPEAKTIFLEQNYRSTKNILNAANEVIKHNSERKPKGLWTANSGGDKIQYYEAMTERDEAEYVVKEIMKHQRSGKKYSEMAILYRTNAQSRVLEETFMKSNIPYTMVGGQKFYDRKEIKDLLSYLRVIANSNDDISLQRIINVPKRGIGPSSVEKIQTYALQNNISMFDALAEVDFIGLSKKVTQECISFYEMIQNLIKEQEFLEISEIVDEVLQKSGYRDMLDREQSIESRSRLENLDEFMSVPKDYEENTPLEEQSLINFLTDLSLVADIDEADTQNGVTLMTMHSAKGLEFPIVFIMGMEESLFPHIRAIKSEDDHEMEEERRICYVAITRAEELLYITNATTRMLFGRSQSNMPSRFLKEIPEDLLDSHTGQKRQTISPKSQPKRGFSKRTTSTKKQVSSSDWKVGDKVMHKAWGEGMVSNVNEKNGSVELDIIFKSEGPKRLLAQFAPITKKEDS

SEQ ID NO: 1231 - DNA, 1998 bp, Artificial Sequence
  Description of Artificial Sequence: synthetic nucleic acid sequence
atgcaagatgttaaaaagcgtgtggaaaaattacatgacttattgaatcaatatagttatgaatattatgtacaagataatccctcagtgcctgacagtgagtatgataagttattacatgagctgattgaaattgaagaaaaatatccagaattcaaatcgacagactctccaacagtgcgtgtgggtggcgaagctcagtcttcttttgaaaaagtaaatcacgacacgcctatgttaagtttaggtaatgcttttaatgaagaagatttaagaaaatttgatcaacgtattcgtgatagtattggtaaggtcgaatacatgtgtgaacttaaaatagatggtttggctgtttcgctcaaatatgaaaatggtcgttttgttcaaggacttacacgtggtgatggtacgacaggtgaggatatcactgaaaatctaagaactatacatgctataccactaaaaattaaagaacctctcaattttgaggtccgtggggaagcttatatgccacgtcgttcattcattcatttgaataatgaaaaagaacaaaatggtgaacaaccttttgcaaatccacgaaacgctgctgcaggctctttaagacaacttgactctaaactagctgcgaaaagaaagttaagcgtcttcttatatagtgtgaatgacctaaccgagtttaatgcaacaacacaaagtgaagcgctagaggaattggaccaattaggttttaaaactaaccaagaacgtgaacgagtatcagatattgagggcgtacttaattatatagagaaatggacaagcaaaagaggatctttatcttacgatattgatggtattgttataaaagttaacgatttatctcaacaagaggaaatgggttatacgcaaaaatctccaagatgggcgattgcttataaatttccagctgaagaagttattacaaaattattggatattgagctaagtattgggcgtacgggtgttgtgacaccaactgcaattctagaacctgtaaaagtagctggtactacagtttcaagagcctcacttcataatgaagatttaatacatgaaagagatatacgtatcggagatagtgttgttattaaaaaagccggggacatcatccctgaagttgtaaaaagtattttagatagacgacctaacgaatcggaaatttatcatatgccaacacattgtcctagttgtggacatgaattagttcgtattgaaggagaagttgctttacgttgtattaatccaaaatgtcaggcacagcttattgaaggacttatacatttcgtttcaagacaagcgatgaatatagatggtttaggtactaaaattattcatcagctatacgaaaatcagttaatcaaagatgtcgcagatattttctatttgaaagaagaagatttattaccattagagcgaatgggaaagaagaaagttgataatcttttattagcgatagaaaaatctaaagaacagtcattagagcatttattatttggacttggtattagacatttaggtgtaaaagctagtcaagtacttgctgagcgatatgaaacgatggatcaactttttaaagtaactgaaagtgaattaattgaaattcaagatattggagataaacttgcacaatctgttgtaacatatctcgaaaatagtgatattcgttcattaattgaaaaattaagtaataaaaatgttaatatgtcttataaaggaattaaaacaactgaaatcgaaggtcatcctgattttagtgggaaaacaattgtattaacagggaaactcgagcaaatgacgagaaatgaagcatctgaatggttgaaaatgcaaggtgctaaagttacaagcagcgtgactaaaagtactgatattgtcatagctggagcagatgcagggtctaaattagccaaagctgagaagtatggtactgaaatttggactgaagcagcatttattgaaaaacaaaatggaatctaa

SEQ ID NO: 1232 - protein, 665 aa, Artificial Sequence
  Description of Artificial Sequence: synthetic amino acid sequence
MQDVKKRVEKLHDLLNQYSYEYYVQDNPSVPDSEYDKLLHELIEIEEKYPEFKSTDSPTVRVGGEAQSSFEKVNHDTPMLSLGNAFNEEDLRKFDQRIRDSIGKVEYMCELKIDGLAVSLKYENGRFVQGLTRGDGTTGEDITENLRTIHAIPLKIKEPLNFEVRGEAYMPRRSFIHLNNEKEQNGEQPFANPRNAAAGSLRQLDSKLAAKRKLSVFLYSVNDLTEFNATTQSEALEELDQLGFKTNQERERVSDIEGVLNYIEKWTSKRGSLSYDIDGIVIKVNDLSQQEEMGYTQKSPRWAIAYKFPAEEVITKLLDIELSIGRTGVVTPTAILEPVKVAGTTVSRASLHNEDLIHERDIRIGDSVVIKKAGDIIPEVVKSILDRRPNESEIYHMPTHCPSCGHELVRIEGEVALRCINPKCQAQLIEGLIHFVSRQAMNIDGLGTKIIHQLYENQLIKDVADIFYLKEEDLLPLERMGKKKVDNLLLAIEKSKEQSLEHLLFGLGIRHLGVKASQVLAERYETMDQLFKVTESELIEIQDIGDKLAQSVVTYLENSDIRSLIEKLSNKNVNMSYKGIKTTEIEGHPDFSGKTIVLTGKLEQMTRNEASEWLKMQGAKVTSSVTKSTDIVIAGADAGSKLAKAEKYGTEIWTEAAFIEKQNGI

SEQ ID NO: 1233 - DNA, 672 bp, Artificial Sequence
  Description of Artificial Sequence: synthetic nucleic acid sequence
atgagcgaaaaagaaaagaaaagcaaaaatgctaatgagaatcttggactcaatccatattctacagataagggaatgtcaatggataaagctacaaaatatgcacttcaattaagggtgattgctcaagaaagctatcctaatgtcgatagacattcctttctagtcgaaaaattacgcttacttattcaacaattaaaacaatctattcatcatctcaaacaattagatgatgccatgattcaattagcacaacaactcgattattttgaaaatattcattcgatacctggtattggtaagctaagcacagctatgattattggggagattggtgatattaagcgatttaaatcaaataaacaactcaatgcttttgttggcattgatatcaaacgatatcaatcaggtcatacacactgtagagataccatcaacaagcgtggtaataaaaaagcgagaaaacttttattttgggtgattatgaatataataagagggcagcatcattatgacaatcatgtcgtcgattattactacaaactaagaaagcagcctaatgagaaacctcataagactgccatcattgcttgtataaatcgattattaaaaacaattcattatcttgtaatgaatcataaattgtacgattatcaaatgtcaccacattag

SEQ ID NO: 1234 - protein, 223 aa, Artificial Sequence
  Description of Artificial Sequence: synthetic amino acid sequence
MSEKEKKSKNANENLGLNPYSTDKGMSMDKATKYALQLRVIAQESYPNVDRHSFLVEKLRLLIQQLKQSIHHLKQLDDAMIQLAQQLDYFENIHSIPGIGKLSTAMIIGEIGDIKRFKSNKQLNAFVGIDIKRYQSGHTHCRDTINKRGNKKARKLLFWVIMNIIRGQHHYDNHVVDYYYKLRKQPNEKPHKTAIIACINRLLKTIHYLVMNHKLYDYQMSPH

SEQ ID NO: 1235 - DNA, 1176 bp, Artificial Sequence
  Description of Artificial Sequence: synthetic nucleic acid sequence
atgaaagataataaaatgttgttcattatttttatgataggaacatttacagtaggaatggctgaatatgtagtgacaggattacttacacaaatcgctgacgatatgaaggtttctatttcgagtgcaggtttattaattagtgtttatgctattagtgttgcattgatagggcctttaatgcgaatcataacattgaaagttcacgcccaccgtctgttaccgattttagttgcgatttttataataagtaatttagtgggaatgttagcaccgaattttaatgtattgttattatcaagactcatgtctgcggcaatgcatgcgccattcttcggtgtgtgtatgagtgttgctgcgacagtcgcacctcctgctaaaaaaacacaggccattgcacttgttcaggcaggtttaactattgctgtaatgttaggtgtaccattcggatcatttttaggtggctttgcaaattggagagttgtttttggattcatgattgtgttggcaatcattactatgttaggaatgattaaatttgttccaaatgtttctttaagtgcagaagcaaatattagcaaagaattaacagtgtttaagaatccacacattttaattgtgattgcaattattgtgtttggttactctggtgtgtttactacttatacatttatggagccaatgatacgagatttttctccatttaaaattgtaggtttaactgtttgtttatttatgtttggtctaggcggtgtgatagggaatttaattactggtaatgtaccggaagataaattaacaaaaaatttataccttacatttcttttactatttgtaacaatcatactatttgttactgttattcaaaattcaatattagcattaatcatttgcttcttattcggttttggtacatttggtacaacaccgttacttaatagcaaaattatcttaagtgcaaaagaagcaccacttcttgcaagtacgttagctgcttctattttcaatgttgctaattttcttggtgcaatcattggatctatattattatcaatagggttaccttacattcaaattactttgatatctggtgggattatagtgttgggtatgcttcttaatcttgttaatcaactttatgaaaagaaacatatcacatttaatgaatattcatga

SEQ ID NO: 1236 - protein, 391 aa, Artificial Sequence
  Description of Artificial Sequence: synthetic amino acid sequence
MKDNKMLFIIFMIGTFTVGMAEYVVTGLLTQIADDMKVSISSAGLLISVYAISVALIGPLMRIITLKVHAHRLLPILVAIFIISNLVGMLAPNFNVLLLSRLMSAAMHAPFFGVCMSVAATVAPPAKKTQAIALVQAGLTIAVMLGVPFGSFLGGFANWRVVFGFMIVLAIITMLGMIKFVPNVSLSAEANISKELTVFKNPHILIVIAIIVFGYSGVFTTYTFMEPMIRDFSPFKIVGLTVCLFMFGLGGVIGNLITGNVPEDKLTKNLYLTFLLLFVTIILFVTVIQNSILALIICFLFGFGTFGTTPLLNSKIILSAKEAPLLASTLAASIFNVANFLGAIIGSILLSIGLPYIQITLISGGIIVLGMLLNLVNQLYEKKHITFNEYS

SEQ ID NO: 1237 - DNA, 345 bp, Artificial Sequence; identical to SEQ ID NO: 255
  Description of Artificial Sequence: synthetic nucleic acid sequence

SEQ ID NO: 1238 - protein, 114 aa, Artificial Sequence; identical to SEQ ID NO: 256
  Description of Artificial Sequence: synthetic amino acid sequence

SEQ ID NO: 1239 - DNA, 579 bp, Artificial Sequence
  Description of Artificial Sequence: synthetic nucleic acid sequence
atggagaacggtgcttatattttagcaagtgaaacatgtgcgattgatgttttaggtgctgaatttatacaagatattcatgcaggtgagtatgttgttattacggatgaaggtatagaagttaagacttacacacgacaaacaacaactgcaatttcagctatggaatatatttattttgcgagacctgattcaacgattgcaggaaaaaatgttcatgcggtacgaaaggcatcaggtaaacggttagcacaggaaaacccagcaaaagcagatatggtaataggcgtacctaattcatcattatctgcagcaagtggttatgctgaagaaataggcctaccatatgaaatgggactagttaaaaatcaatatgttgctcgaacttttatacaacctactcaggaattaagagagcaaggtgtacgtgtgaaactgtcggctgttaaggatattgttgatggtaaagatatcgtacttgtagatgattcgattgttcgaggtacaacgattaaacgcatagttaaaatgcttaaggattcaggagctaaccgcattcacgtaagaattgcttctccc

SEQ ID NO: 1240 - protein, 193 aa, Artificial Sequence
  Description of Artificial Sequence: synthetic amino acid sequence
MENGAYILASETCAIDVLGAEFIQDIHAGEYVVITDEGIEVKTYTRQTTTAISAMEYIYFARPDSTIAGKNVHAVRKASGKRLAQENPAKADMVIGVPNSSLSAASGYAEEIGLPYEMGLVKNQYVARTFIQPTQELREQGVRVKLSAVKDIVDGKDIVLVDDSIVRGTTIKRIVKMLKDSGANRIHVRIASP

SEQ ID NO: 1241 - DNA, 603 bp, Artificial Sequence; identical to SEQ ID NO: 393
  Description of Artificial Sequence: synthetic nucleic acid sequence

SEQ ID NO: 1242 - protein, 200 aa, Artificial Sequence; identical to SEQ ID NO: 394
  Description of Artificial Sequence: synthetic amino acid sequence

SEQ ID NO: 1243 - DNA, 1194 bp, Artificial Sequence
  Description of Artificial Sequence: synthetic nucleic acid sequence
atggaccatagttccgcttcgaaaaaattaattaaagatatagagcaaaatcagtatgtaacagtaaaacatttatctcatgatgatttttatattgatgatttggtaaaaaagaaagaagtcattgcaagccttgaaatacctaaggatttctcaaaacaccttaaagataatgatttaaataagactcttccattatatagcagagatgattttataggacatattgctatggaaataatcagtcgatcattatacgaacaacaaatccctaatattattcatgaacatcttgatgatatgaaacaaccacaatccttagataaagtgaaacaatcttattattcgcttacacctcaatctaaaataaaaagtgtagctatcaataaacatgctcatcaatccatttcaattggcattgtatttgttgtcgtcatctttgtaagtgttatccaaatcctattacatcaacgtcttaaacagaacgcacctctcgaaagattatatttggtaccttatagtcaacttaaactatacttgacttatatcagtgtacacagaatttctaactttgaaacagctggccctttatactatagagcagaaccagttggttgtagtgcaacaattttatataaaatgtataaagaacgtggatttgaaattaaaccagaaatcgctggacttatgatttcagctataatttctgatagtttattatttaaatcacctacctgcacaaaagaagatgtagatgctgctcaagcacttaaagatattgcaaatgttgatttagaagcatatggtttagaaatgttaaaagcaggtgcttcaactacagataaatctgctgaaacacttgtcaatatggatgctaaatcattcaatatgggagattatgtaacacgtattgctcaagtcaatactgtagatattgatgaagttttagatcgtaaagaggaatttgaaaaagttatgttagaaatgagtgccaatgaaaaatacgatttattcgttcttgtagttactgatattattaacagcgattctaaaatccttgtagttggtgctgaaaaagataaagttggagaagcatttaaagtacaactagatgatggtatggctttcttatctggcgttgtatcacgaaaaaaacaagttgttcctcaaatcactgaagttttaactcaataa

SEQ ID NO: 1244 - protein, 397 aa, Artificial Sequence
  Description of Artificial Sequence: synthetic amino acid sequence
MDHSSASKKLIKDIEQNQYVTVKHLSHDDFYIDDLVKKKEVIASLEIPKDFSKHLKDNDLNKTLPLYSRDDFIGHIAMEIISRSLYEQQIPNIIHEHLDDMKQPQSLDKVKQSYYSLTPQSKIKSVAINKHAHQSISIGIVFVVVIFVSVIQILLHQRLKQNAPLERLYLVPYSQLKLYLTYISVHRISNFETAGPLYYRAEPVGCSATILYKMYKERGFEIKPEIAGLMISAIISDSLLFKSPTCTKEDVDAAQALKDIANVDLEAYGLEMLKAGASTTDKSAETLVNMDAKSFNMGDYVTRIAQVNTVDIDEVLDRKEEFEKVMLEMSANEKYDLFVLVVTDIINSDSKILVVGAEKDKVGEAFKVQLDDGMAFLSGVVSRKKQVVPQITEVLTQ

SEQ ID NO: 1245 - DNA, 1380 bp, Artificial Sequence
  Description of Artificial Sequence: synthetic nucleic acid sequence
atgacaataattagagataaatttaacaatagtaaagctttttttaatacgcataaaacaaaaaaccttaaatttcgaaaacaacaacttaaattactaagtaaaaatatcaaaaatcatgaaaatgaattattagatgccttatataaagatttaggtaaaagtaaggttgaagcatacgcaactgaaattggtatgcttttgaaaagcataaagctaatgcgcaaagagttaaaaaattggtcgaaaaccaaacaaacggatacaccactctacttattccctacaaagagttatattaaaaaagaaccttacggtacggtgcttattataggaccatttaattatccggttcaattagttttcgagcctctcatcggagcaatagctgccggaaatactgctatagttaaaccttcagagttaacacctcatgttgccattgtgatcaaggacatcattgaagatacatttgatgaagcatacgtttctgttgttgaaggtggtattgaagaaacccaaacgttattaagtctaccatttgattatatgttctttactggcagtgaaaaagtcggaaaaattgtctatgaagctgcagcaagaaaattaattccagttactcttgaacttggcggtaaatcacctgtcattgtcgatgatacagccaatatcaaagtagcgagtgaacgtattagttttggtaaatttactaatgctggtcaaacatgtgtcgctccagattatatattagttcagcggaaagttaaaaatgatttaataaaagctcttaaaaaaacaattactgaattttacggagaaaatattgaaaaaagccctgatttcggacggattgttaatcaaaaacactttaatcggttgaatgacttgattcaaattcataaagataatgttgtttttggaggtaatagttctaaagaagatttatatattgaacctactttattggataacataaccaatgacaataaaatcatgaaagaagaaatattcggtcccattttgcctattattacttatgataatttcgatgaagtacttgaaatcatccaaagtaaatcaaaaccactaagtttgtatctttttagcgaagatgaaaacatgacacatagagtggttgaagaattatcatttgggggcggtgcaattaacgatacgttaatgcatttagctaatcctaacttacctttcggtggtgtaggttcttcaggcataggtcaatatcatggtaagtattcttttgatacatttagtcatatgaaatcatacacatttaaatctacacgtctagaatcgagtttatttttccctccatataaaggtaaatttaaatatattaaaaccttcttcaagaactag

SEQ ID NO: 1246 - protein, 459 aa, Artificial Sequence
  Description of Artificial Sequence: synthetic amino acid sequence
MTIIRDKFNNSKAFFNTHKTKNLKFRKQQLKLLSKNIKNHENELLDALYKDLGKSKVEAYATEIGMLLKSIKLMRKELKNWSKTKQTDTPLYLFPTKSYIKKEPYGTVLIIGPFNYPVQLVFEPLIGAIAAGNTAIVKPSELTPHVAIVIKDIIEDTFDEAYVSVVEGGIEETQTLLSLPFDYMFFTGSEKVGKIVYEAAARKLIPVTLELGGKSPVIVDDTANIKVASERISFGKFTNAGQTCVAPDYILVQRKVKNDLIKALKKTITEFYGENIEKSPDFGRIVNQKHFNRLNDLIQIHKDNVVFGGNSSKEDLYIEPTLLDNITNDNKIMKEEIFGPILPIITYDNFDEVLEIIQSKSKPLSLYLFSEDENMTHRVVEELSFGGGAINDTLMHLANPNLPFGGVGSSGIGQYHGKYSFDTFSHMKSYTFKSTRLESSLFFPPYKGKFKYIKTFFKN

SEQ ID NO: 1247 - DNA, 936 bp, Artificial Sequence
  Description of Artificial Sequence: synthetic nucleic acid sequence
atggaagagtatgttcttaaaaatttaccttctgaagaaagttattttttattttatattaacagaccttcaattattgttggaaagaatcagaatacaattgaagaagttaatcaagcgtatattgataaacatcaaatagatgtagtgagacgtatttctggtggtggggctgtttatcatgatactggaaacttaaattttagctttatcacagatgatgatggccatagctttcataattttaaaaagtttacgatgcccattgtacaggccttacaatcaatgggagttaatgctgaaatgactggaaggaatgatatacaagtagggcaagctaaaatatctggaaatgctatggttaaagtaaaaaatagaatgtttagtcatggtacattaatgctgaattgtgatttaaatgaagttcaaaaggcattaaaagtgaatccagctaaaattaaatctaaaggcgttaaatctgttagaaaaagagttgccaatattgaggaatttctagaacagccaatagatatagaagaattcaaaaaaattattcttaaaactatttttggtgaaaatgaagttgaagaatatatattaacagaagaagattggaaaaatattaagcaattaagtgatgaaaagtatcgtacgtgggaatggaactatggcagcaatccaaaatataatattgagcgtgaagagaaatttgaaaaaggttttattcaaataaaattagatgtaaaaaaaggaagaattgaacgggcaaaactatttggagatttcttcggcgaaggagatgtaaccgaacttgaacatgcgttagtaggttgcttacatgattttgaacatatagaagaggcacttcaaaattatgatttctatcactactttggggatatagataagtatgaaattataagattgatgtcctaa

SEQ ID NO: 1248 - protein, 311 aa, Artificial Sequence
  Description of Artificial Sequence: synthetic amino acid sequence
MEEYVLKNLPSEESYFLFYINRPSIIVGKNQNTIEEVNQAYIDKHQIDVVRRISGGGAVYHDTGNLNFSFITDDDGHSFHNFKKFTMPIVQALQSMGVNAEMTGRNDIQVGQAKISGNAMVKVKNRMFSHGTLMLNCDLNEVQKALKVNPAKIKSKGVKSVRKRVANIEEFLEQPIDIEEFKKIILKTIFGENEVEEYILTEEDWKNIKQLSDEKYRTWEWNYGSNPKYNIEREEKFEKGFIQIKLDVKKGRIERAKLFGDFFGEGDVTELEHALVGCLHDFEHIEEALQNYDFYHYFGDIDKYEIIRLMS

SEQ ID NO: 1249 - DNA, 531 bp, Artificial Sequence
  Description of Artificial Sequence: synthetic nucleic acid sequence
atggtaatacgacctaaatatgatgaatatcagcaaacaaatggtactgaaattatcagatttgatcaaactcgcaaagaaagtccatttaaagtacagagaattatcgaaagatcatgtaaattttatggtaataattatattagtaaaaaagcagaaacgaatcgtattactggaatctctagtaaaccacctattttacttacgcctctttttcctacttacttttttccaactcactcagaccgtcaagaagaaaatatatggattaatatgcattatattgaaaatgttaaagaacttaaaaatcgtaagagtaaaataatttttgcgaatggtgattcgttaacgctcaatgtatcatttcatagcttgtggcatcaatatacgaatgcaatcatctattattacatggtagataagcaatcacgaatgaaatctaacaaccctgaacaacccattgactataatcagtcttctctaaatattttcgaggcgctctcacgctactccctttttgaagaaaattag

SEQ ID NO: 1250 - protein, 176 aa, Artificial Sequence
  Description of Artificial Sequence: synthetic amino acid sequence
MVIRPKYDEYQQTNGTEIIRFDQTRKESPFKVQRIIERSCKFYGNNYISKKAETNRITGISSKPPILLTPLFPTYFFPTHSDRQEENIWINMHYIENVKELKNRKSKIIFANGDSLTLNVSFHSLWHQYTNAIIYYYMVDKQSRMKSNNPEQPIDYNQSSLNIFEALSRYSLFEEN

SEQ ID NO: 1251 - DNA, 342 bp, Artificial Sequence
  Description of Artificial Sequence: synthetic nucleic acid sequence
gtgattgcgttattatttgattggtttgttatttttagtagtattttaatttctgtaacttttaataacattttgatctatcttgtagctattatattaattggtagtagaatgagagcatttgataatttaatgcatgaagcttgtcatcgatctttatttacaaataagttttggaataaatggataacttgtttatttgttgcatttccagtatttactagttatacagcatatcgaaatgctcatcattgtactggattttttaaaactacattgcctggcttttatagtgtagttaaagatatttttacaccgaactatgaaaggaaagagagttag

SEQ ID NO: 1252 - protein, 113 aa, Artificial Sequence
  Description of Artificial Sequence: synthetic amino acid sequence
VIALLFDWFVIFSSILISVTFNNILIYLVAIILIGSRMRAFDNLMHEACHRSLFTNKFWNKWITCLFVAFPVFTSYTAYRNAHHCTGFFKTTLPGFYSVVKDIFTPNYERKES

SEQ ID NO: 1253 - DNA, 417 bp, Artificial Sequence
  Description of Artificial Sequence: synthetic nucleic acid sequence
atgccaactttacaactttttatttacatcatcgggtttttgtttttgatgtatatggcatggtctttatggacggaaaagccttcaaatatcgaagaaatagaacctatgtcagctaaaaagcagattttatttgctttatctgtttctttattaaatcttcatgcaataatggatactgttggtgttatcggaacgagtgcttcagtttatgatggttatgacaaagttgttttttcattggctacaatttctgtatcttggatttggtttgtctttttagctattttaggaagaattacaggaaaaattgataaaagtggtaagtatatcgttattttaaataaagtttctagcgttattgttattattgtaggattaattatattaaaaaatattgttggaattttaagttag

SEQ ID NO: 1254 - protein, 138 aa, Artificial Sequence
  Description of Artificial Sequence: synthetic amino acid sequence
MPTLQLFIYIIGFLFLMYMAWSLWTEKPSNIEEIEPMSAKKQILFALSVSLLNLHAIMDTVGVIGTSASVYDGYDKVVFSLATISVSWIWFVFLAILGRITGKIDKSGKYIVILNKVSSVIVIIVGLIILKNIVGILS

SEQ ID NO: 1255 - DNA, 423 bp, Artificial Sequence
  Description of Artificial Sequence: synthetic nucleic acid sequence
gtgaatgtgagatatcggtcgttttatgagcatatttgggtatatgagaaagacggggttgttgctggatgtgtaattgcgtatcctgggaaagaggaaatggattttgaacaacaatggcttaagttaccacttgaagaagatatccttcagttaggtacaccattacctgaaaaagaatcatacgatgatgaaatatatatagaagcagtagtaacgactccaaaatatcgaggacaaggtattgcaacacaacttttaaagtatgtaatttccactcatgcacatgaaaaatggggattgaattgtgattatgataataataaagcacgccacctatatcacaaattagggtttaaagaggatgcgacaattcgtttatatggccatcaatattttcatatgacattgaataataagtaa

SEQ ID NO: 1256 - protein, 140 aa, Artificial Sequence
  Description of Artificial Sequence: synthetic amino acid sequence
VNVRYRSFYEHIWVYEKDGVVAGCVIAYPGKEEMDFEQQWLKLPLEEDILQLGTPLPEKESYDDEIYIEAVVTTPKYRGQGIATQLLKYVISTHAHEKWGLNCDYDNNKARHLYHKLGFKEDATIRLYGHQYFHMTLNNK

SEQ ID NO: 1257 - DNA, 1995 bp, Artificial Sequence
  Description of Artificial Sequence: synthetic nucleic acid sequence
gtgtatcttgaagaaatccatgataaaatgatttcttttgatgatgaaatcgaaagacttcattatcttgttgataataatttttattttaatgttttcgaaaaatatagcgaagcagaattaattgaaattactgaatacgcaaaatcaattcacttccaatttgctagttatatgtcggcaagtaagttttataaggattacgctttaaaaacgaatgataaaactaagtttcttgaggattataatcagcacgtcgcaatcgttgcactttatttagcgaatggtaatgttaaacaagcaaaacaatttatttctgcaatggtggaacaacgttatcaaccggcgacaccaacattcttgaatgcaggtagagcaagacgtggagaacttgtttcatgtttcttattagaagtagacgatagcttaaattctatcaatttcattgattcaactgcaaaacaacttagtaaaattggtggtggtgtggccattaatttatcgaaacttcgtgcacgtggagaagcaattaaaggaattaaaggtgtagctaaaggtgttttacctgttgctaaggcacttgaaggtggatttagttatgcagatcaattaggacaacgtcctggcgctggggcagtgtacttaaatattttccattacgatgttgaagagtttttagatactaagaaagtgaatgcagatgaagatttacgtttatctactatttcgactggtcttattgtaccttctaaattctttgatttggctaaagagggtaaagatttctatatgtttgcacctcatacagttaaacaagaatacggtgtgactttagatgatattgatttagaaaagtattacgacgatatggttgcaaaccctaatatcgataaaaagaaaaaagacgcacgtgaaatgttaaatatgattgcacaaacacaattacagtctggttatccatatcttatgtttaaagataatgcaaacaaagtacatgcgaattcaaatattgggcaaattaaaatgagtaatttatgtactgaaattttccaattacaagagacatcagtaattaacgactatggaattgaagatgaaattaaaagagatatttcatgtaacttaggctcattgaatatagtgaatgttatggaatcaggtaaattcagagattctgtgttcacaggtatggatgctcttacagttgtaagtgatgaagcaaatattcaaaatgcaccaggtgtaaaaaaagcgaatagtgaactacattctgttggactaggagtaatgaacttacatggttatctagctaaaaataaaattggctatgaatctgaagaagcaaaagactttgctaatatattctttatgattatgaactattattccatcgaacgttcaatggaaattgcaaaagagcgtggagaaaagtatcaagactttgagcaatcagactatgcaaatggtaaatattttgaattctatacatctcaagaatttgaaccaaaatttgaaaaggttcgccaactttttgatggtatcgatatacctacttcaaatgattggaaagaattgcaaaataaagtagaacaatatggactttatcacgcttatagattagctattgctccgactcaaagtatttcttatgttcaaaatgcgacaagttctgttatgcctattgttgaccaaattgaacgtcgtacgtatggaaatgcggaaacattttatccaatgccatttttatcaccagaaacaatgtggtactacaaatcagcatttaatactgaccaaatgaaacttattgacttagtagctacaattcaaactcacgtagaccaaggtatttcaacgatactttatgttaattcagaaatttcaacacgtgaactttcaagattatatgtatatgcacaccataaaggccttaaatctttatactatacacgtaataaattattaagtgtggaagaatgtacaagttgtgcgatttaa

SEQ ID NO: 1258 - protein, 664 aa, Artificial Sequence
  Description of Artificial Sequence: synthetic amino acid sequence
VYLEEIHDKMISFDDEIERLHYLVDNNFYFNVFEKYSEAELIEITEYAKSIHFQFASYMSASKFYKDYALKTNDKTKFLEDYNQHVAIVALYLANGNVKQAKQFISAMVEQRYQPATPTFLNAGRARRGELVSCFLLEVDDSLNSINFIDSTAKQLSKIGGGVAINLSKLRARGEAIKGIKGVAKGVLPVAKALEGGFSYADQLGQRPGAGAVYLNIFHYDVEEFLDTKKVNADEDLRLSTISTGLIVPSKFFDLAKEGKDFYMFAPHTVKQEYGVTLDDIDLEKYYDDMVANPNIDKKKKDAREMLNMIAQTQLQSGYPYLMFKDNANKVHANSNIGQIKMSNLCTEIFQLQETSVINDYGIEDEIKRDISCNLGSLNIVNVMESGKFRDSVFTGMDALTVVSDEANIQNAPGVKKANSELHSVGLGVMNLHGYLAKNKIGYESEEAKDFANIFFMIMNYYSIERSMEIAKERGEKYQDFEQSDYANGKYFEFYTSQEFEPKFEKVRQLFDGIDIPTSNDWKELQNKVEQYGLYHAYRLAIAPTQSISYVQNATSSVMPIVDQIERRTYGNAETFYPMPFLSPETMWYYKSAFNTDQMKLIDLVATIQTHVDQGISTILYVNSEISTRELSRLYVYAHHKGLKSLYYTRNKLLSVEECTSCAI

SEQ ID NO: 1259 - DNA, 936 bp, Artificial Sequence
  Description of Artificial Sequence: synthetic nucleic acid sequence
atgactaatatgttctggcgtcaaaatatctcacaaatgtgggtggaaacagaatttaaagtatcaaaagatatagcaagttggaaaacattaacagattctgagaaaaatacttttaaaaaagcgcttgcaggtttaacaggtttagatacacatcaagctgatgatggtatgccattaatcatgcttcatactactgatttaagaaagaaagctgtttattcatttatggctatgatggaacaaatccatgcgaaaagttattctcatatcttcactacattattaccatctagtgaaaccaactatttattggatacttgggttattgaagagccacatttaaaatataaatcagataaaattgtagaaaattaccacaaactttggggtaaagaagcatcgatttacgatcaatatattgctcgtgtttctagtgtattcttagaaacatttctattctattctggcttctattatccattatatctcgcaggacaaggaaaaatgactacgtcaggtgaaattatacgtaagatacttttagatgaatctatacatggagtgttcacaggtttagatgcacaaagtctacgtaatgagttatctgaaagtgagaaacaaaaagctgatcaagaaatgtacaaattattaaatgaactttatgataatgaagtttcatatacacatttattatatgatgatattggtcttgctgaagatgtattaaattatgttcgatataatggaaataaagcattatcgaatttaggttttgaaccatatttcgaagagagagagtttaaccctattattgaaaatgcactagatacatctacaaagaaccacgatttcttctctgttaaaggtgatggctatacattggctttaaatgttgagcctctacgtgatgaagactttgtttttgataattaa

SEQ ID NO: 1260 - protein, 311 aa, Artificial Sequence
  Description of Artificial Sequence: synthetic amino acid sequence
MTNMFWRQNISQMWVETEFKVSKDIASWKTLTDSEKNTFKKALAGLTGLDTHQADDGMPLIMLHTTDLRKKAVYSFMAMMEQIHAKSYSHIFTTLLPSSETNYLLDTWVIEEPHLKYKSDKIVENYHKLWGKEASIYDQYIARVSSVFLETFLFYSGFYYPLYLAGQGKMTTSGEIIRKILLDESIHGVFTGLDAQSLRNELSESEKQKADQEMYKLLNELYDNEVSYTHLLYDDIGLAEDVLNYVRYNGNKALSNLGFEPYFEEREFNPIIENALDTSTKNHDFFSVKGDGYTLALNVEPLRDEDFVFDN

SEQ ID NO: 1261 - DNA, 975 bp, Artificial Sequence
  Description of Artificial Sequence: synthetic nucleic acid sequence
atgaaatttatttttaaaggttataccttatttattttattagtgattttaactattgtctctttatttataggggtgagtcagctctctctaatagatattttccatttaagtgatgaacaaataaatattttgttttcgagtcgaattcccagaacagttagtattctactttcgggtagttcactagctttatcaggattaattatgcaacagatgatgcaaaataaatttgtaagcccaacgactgctggtactatggagtgggcaaaattaggtattttaatgtcattgttgttctttcctaatggtcccattttaatcaaattattatttgctgttgttctaagtattgttggaacgtttttatttgtccaattaattaatcttatccgtgtaaaagatgtaatctttgttccacttttaggcattatgattggtggtattttatccagttttactacatttgtagcgttgagaaccaatgctttacaaagcattggaaactggttaactggtaactttgcagttataacgagtggtcgttttgaggtgttgtatctcacaataccattacttattttggcatttgtatttgcaaatcattttactattgcaggtatgggaaaagactttagtcataatttaggtgtaagttatgaaaaaatcattaaaatagcattattcataacagcaacgctaacagcattagttgttgttactgttggaacattaccatttttaggtttaatcgtaccgaatatcatatctatctatagaggcgatcatttgaaaaatgctttaccacacacgcttatgctcggtgcaatttttgttttaattgctgatattattggtagaataattgtttacccttacgaaattaatattggattgacgataggtgtatttggcacaattattttcctaatcttgctaatgaaaggtaggaaaaattatgcaaatgagcgctaa

SEQ ID NO: 1262 - protein, 324 aa, Artificial Sequence
  Description of Artificial Sequence: synthetic amino acid sequence
MKFIFKGYTLFILLVILTIVSLFIGVSQLSLIDIFHLSDEQINILFSSRIPRTVSILLSGSSLALSGLIMQQMMQNKFVSPTTAGTMEWAKLGILMSLLFFPNGPILIKLLFAVVLSIVGTFLFVQLINLIRVKDVIFVPLLGIMIGGILSSFTTFVALRTNALQSIGNWLTGNFAVITSGRFEVLYLTIPLLILAFVFANHFTIAGMGKDFSHNLGVSYEKIIKIALFITATLTALVVVTVGTLPFLGLIVPNIISIYRGDHLKNALPHTLMLGAIFVLIADIIGRIIVYPYEINIGLTIGVFGTIIFLILLMKGRKNYANER

SEQ ID NO: 1263 - DNA, 918 bp, Artificial Sequence
  Description of Artificial Sequence: synthetic nucleic acid sequence
atggcaatttgtatggcaattttttatttattggtaggtttagattttgatatatttgaatatcaattccaaagccgtttcaaaaaatttattcttatattattagtaggagcatcgataggaacgtccgtagttattttccaatctattactacaaatagattattaactccttctattatgggacttgattctgtgtatttatttgtcaaagtcttacctatttttattttaggtgaacaagcaactgttgttacaaatatctaccttaattttttaatcactttgatcgcaatggtgtttttttcattgctattatttcaagttatatttaaactaggtcacttttcagtctatttcatattactagttggtgtaatattaggaactttcttccgtagtattacaagttttctccaacttataatgaatcctgaatcttttttagcagttcaaaatgttatgtttgctagctttgaagcatcaaattctaaattagtaactgtttcaggcatattattagttatattaataattgttacaataatacttcgaccatatttagatgttcttttgttaggtagagcacaagcaattaatctaggtgtttcttatgagaatatgacgcgtatgtttcttattttggttgctttactcgtctctatatctactgcattaataggtcctgtaacatttcttggcttattaactgtcaacttagcacacgaatttatgaagacctatgaacacaaatttattttaccggcaacaatattattcagctggattagtttatttatagcgcaatgggtagttgaaaatctattcgaagcaacaactgaattcagtttgatagtagatttagttggtggaagttacttcatatatttgcttgtcaaaaggagaaatgcaaattga

SEQ ID NO: 1264 - protein, 305 aa, Artificial Sequence
  Description of Artificial Sequence: synthetic amino acid sequence
MAICMAIFYLLVGLDFDIFEYQFQSRFKKFILILLVGASIGTSVVIFQSITTNRLLTPSIMGLDSVYLFVKVLPIFILGEQATVVTNIYLNFLITLIAMVFFSLLLFQVIFKLGHFSVYFILLVGVILGTFFRSITSFLQLIMNPESFLAVQNVMFASFEASNSKLVTVSGILLVILIIVTIILRPYLDVLLLGRAQAINLGVSYENMTRMFLILVALLVSISTALIGPVTFLGLLTVNLAHEFMKTYEHKFILPATILFSWISLFIAQWVVENLFEATTEFSLIVDLVGGSYFIYLLVKRRNAN

SEQ ID NO: 1265 - DNA, 519 bp, Artificial Sequence
  Description of Artificial Sequence: synthetic nucleic acid sequence
atgaacataactatcgagcaactagttaaatttggtcgttttccatattcaaaaggtcgaatgaagcaagaagactatgacaaagtggaatatgctcttgacttattacagcttaatgaaattaaacatcgtaatattaaaacactatctggaggtcagcgacaacgtgcatatattgctatgactatagcacaagatactgattatatattattagacgagcctttaaataatttagatatgaaacattcagtacagattatgcaaacgttacgagatttatgtcgtcagttaaataaaacaatcattatcgtattacatgatatcaactttgcttcttgttattcagacgacatcattgcgcttaaacaaggtgagctagttaaagctgatgataaagataatgttattcagtctgacattttaaaaagtttatatgaaatggaagtacgtatagaggagataaggggacaacgtatttgtctatattatgatgaaactacttttgactcagtttaa

SEQ ID NO: 1266 - protein, 172 aa, Artificial Sequence
  Description of Artificial Sequence: synthetic amino acid sequence
MNITIEQLVKFGRFPYSKGRMKQEDYDKVEYALDLLQLNEIKHRNIKTLSGGQRQRAYIAMTIAQDTDYILLDEPLNNLDMKHSVQIMQTLRDLCRQLNKTIIIVLHDINFASCYSDDIIALKQGELVKADDKDNVIQSDILKSLYEMEVRIEEIRGQRICLYYDETTFDSV

SEQ ID NO: 1267 - DNA, 1044 bp, Artificial Sequence; identical to SEQ ID NO: 461
  Description of Artificial Sequence: synthetic nucleic acid sequence

SEQ ID NO: 1268 - protein, 347 aa, Artificial Sequence; identical to SEQ ID NO: 462
  Description of Artificial Sequence: synthetic amino acid sequence

SEQ ID NO: 1269 - DNA, 933 bp, Artificial Sequence; identical to SEQ ID NO: 477
  Description of Artificial Sequence: synthetic nucleic acid sequence

SEQ ID NO: 1270 - protein, 310 aa, Artificial Sequence; identical to SEQ ID NO: 478
  Description of Artificial Sequence: synthetic amino acid sequence

SEQ ID NO: 1271 - DNA, 486 bp, Artificial Sequence
  Description of Artificial Sequence: synthetic nucleic acid sequence
gtgagatacaacacctcaaaacgaccactcgttataactgcaaagttaccagttaaccagtttccaatgctttgtaaagcattggttctcaacgctacaaatgtagtaaaactggataaaataccaccaatcataatgcctaaaagtggaacaaagattacatcttttacacggataagattaattaattggacaaataaaaacgttccaacaatacttagaacaacagcaaataataatttgattaaaatgggaccattaggaaagaacaacaatgacattaaaatacctaattttgcccactccatagtaccagcagtcgttgggcttacaaatttattttgcatcatctgttgcataattaatcctgataaagctagtgaactacccgaaagtagaatactaactgttctgggaattcgactcgaaaacaaaatatttatttgttcatcacttaaatggaaaatatctattagagagagctga

SEQ ID NO: 1272 - protein, 161 aa, Artificial Sequence
  Description of Artificial Sequence: synthetic amino acid sequence
VRYNTSKRPLVITAKLPVNQFPMLCKALVLNATNVVKLDKIPPIIMPKSGTKITSFTRIRLINWTNKNVPTILRTTANNNLIKMGPLGKNNNDIKIPNFAHSIVPAVVGLTNLFCIICCIINPDKASELPESRILTVLGIRLENKIFICSSLKWKISIRES

SEQ ID NO: 1273 - DNA, 375 bp, Artificial Sequence
  Description of Artificial Sequence: synthetic nucleic acid sequence
atgcttaaggattcaggagctaaccgcattcacgtaagaattgcttctcccgaattcatgttccctagtttttatggtattgacgtatctacaacagctgaactcatctcagcaagtaagtctcctgaggaaattaaaaatcatattggtgcagattctcttgcttatttaagcgttgatggcttaatcgagtctataggacttgattatgatgcgccatatcatggcttgtgtgtagaaagttttacaggtgattatccagcaggactttacgattatgagaaaaattataaaaagcatttaagtgaacgtcaaaaatcatatatagctaataataaacattattttgatagtgagggaaatttacatgtctaa

SEQ ID NO: 1274 - protein, 124 aa, Artificial Sequence
  Description of Artificial Sequence: synthetic amino acid sequence
MLKDSGANRIHVRIASPEFMFPSFYGIDVSTTAELISASKSPEEIKNHIGADSLAYLSVDGLIESIGLDYDAPYHGLCVESFTGDYPAGLYDYEKNYKKHLSERQKSYIANNKHYFDSEGNLHV

SEQ ID NO: 1275 - DNA, 1479 bp, Artificial Sequence
  Description of Artificial Sequence: synthetic nucleic acid sequence
atgaaaaaagcaatattaagcgtttctaataaaagtggaattgtagagtttgcaaaagcattaactaatttagactatgaactgtattctacgggtggtacaaaacgtgtattagaagatgcgaatatcaatattaagtccgtgtcagaattaacacaatttccagagattatggatggtcgtgttaaaacactacatccagcagtccatggtggtattttagctgatcgagataaagaacatcatttagagcaattacgagaacaacatattgatttaattgatatggtagtagtcaacctatatcctttccaacagactgttgctcaacctgatgtaacagaaactgatgcaatagaaaatattgatattggtggacctacaatgttaagagcagctgctaaaaactttaaacatgttacaactatcgtacatccttccgattacaacgaggtaattgagagaattaaaaatcatcaattggacgaagcatatagaaaatcgctaatggttaaagttttccaacatacaaatgaatatgatcatgctattgttaactatttcaaagacaataaagaaacactaagatatggcgaaaatcctcaacaatctgcatattttgttagaacatctgatagcaaacatacgattgctggtgcaaaacaattacatggtaaacaattgagttttaataatattaaagacgcagatgcagcgctcagtttagtaaaaaaattcaacgagccaactgctgtagcagtaaaacatatgaacccgtgtggagtaggaattggacagtcgattgatgaagcatttcaacatgcatatgaagcggataatcaatcaatatttggcggaattatagcattgaatagaacggtagatgttaaattagctgaagcattacattctatctttttagaagtagttatcgcacctcaatttactgaggaagctttaaaaatattgacacaaaagaaaaatattcgtttattacaaatagatatgacaattgataacgctgaacaagaatttgtttccgtttcaggtggttacttagtacaagataaagataataaagatgtgactcgaaatgacatgactgttgctaccgacattcaacctacagaagcacagtgggaagctatgctcctaggttggaaagttgtaagtgccgttaagagtaatgcagtgatattgagtaacaacaaacaaacagttggtataggtgcagggcaaatgaatcgtgtaggttccgctaaaattgcaatcgaaagagcaatagaaattaacgataatgttgcgcttgtttcagatggtttcttcccaatgggagatacagttgaatatgctgccgaacatggtattaaggcaattattcaaccaggtggttcaattaaagatcaagattccattgatatggctaataaatatggcattacaatggttatgacaggtatgcgtcattttaaacattaa

SEQ ID NO: 1276 - protein, 492 aa, Artificial Sequence
  Description of Artificial Sequence: synthetic amino acid sequence
MKKAILSVSNKSGIVEFAKALTNLDYELYSTGGTKRVLEDANINIKSVSELTQFPEIMDGRVKTLHPAVHGGILADRDKEHHLEQLREQHIDLIDMVVVNLYPFQQTVAQPDVTETDAIENIDIGGPTMLRAAAKNFKHVTTIVHPSDYNEVIERIKNHQLDEAYRKSLMVKVFQHTNEYDHAIVNYFKDNKETLRYGENPQQSAYFVRTSDSKHTIAGAKQLHGKQLSFNNIKDADAALSLVKKFNEPTAVAVKHMNPCGVGIGQSIDEAFQHAYEADNQSIFGGIIALNRTVDVKLAEALHSIFLEVVIAPQFTEEALKILTQKKNIRLLQIDMTIDNAEQEFVSVSGGYLVQDKDNKDVTRNDMTVATDIQPTEAQWEAMLLGWKVVSAVKSNAVILSNNKQTVGIGAGQMNRVGSAKIAIERAIEINDNVALVSDGFFPMGDTVEYAAEHGIKAIIQPGGSIKDQDSIDMANKYGITMVMTGMRHFKH

SEQ ID NO: 1277 - DNA, 1026 bp, Artificial Sequence
  Description of Artificial Sequence: synthetic nucleic acid sequence
atgaatattgcagctgttctacaaacaattccatcactggcactacttggtttgatgataccaattttcggaattgggagacttccggcaattatcgccttagttgtatatgcgttacttcagcaagatggttccagtattattgacttagctcaccgtatgaaattaaatgaacctatcgatattactaaacgttatcatgatcgtagttttattcgttgtggtacgaatcaaattccagacgttgttgataaagtagttaaaagcgctgtagctaaaggctatgatatgagtgatatacaagttttggctcctatgtataaaggtaacgctggtattaagagacttaaccaagttctacaatctattcttaatccgaagcaacaagatgatcgtgaaatagaatttggtgaagctgtgtttagaaaaggggataaagtacttcagttagttaatcgacctaatgataatatatttaatggggatataggtataatagtaggtatattttgggccaaagaaaatgctctaaataaggatgtgttagttgtagattttgaaggtaatgaaattacatttactaaacaagatttaatggaactaacacatgcatattgtacatctatccataaatcacaaggttcagaatttcctattgtaattatgcctattgttagacaatattataggatgttacaacgtcccattctttatacaggattaactagagctaaacaatcacttgttttgcttggtgaacaagaagcatttgatataggtttaaaaacaaatggacaaatacgattaacgcaattaaatgatttgttaaaatcgtattttggacaaaacaaagataatttaactacaaataaacaaacgattaacgaacaaaaagaaaataacaatcatctggatttgaaaaatgaaaaagaaaatgatatccaattaaacgagtcgacaattttccaaatcgatccaatgattaatatgggggaaatgacgccatatgacttcgttgaacgttga

SEQ ID NO: 1278 - protein, 341 aa, Artificial Sequence
  Description of Artificial Sequence: synthetic amino acid sequence
MNIAAVLQTIPSLALLGLMIPIFGIGRLPAIIALVVYALLQQDGSSIIDLAHRMKLNEPIDITKRYHDRSFIRCGTNQIPDVVDKVVKSAVAKGYDMSDIQVLAPMYKGNAGIKRLNQVLQSILNPKQQDDREIEFGEAVFRKGDKVLQLVNRPNDNIFNGDIGIIVGIFWAKENALNKDVLVVDFEGNEITFTKQDLMELTHAYCTSIHKSQGSEFPIVIMPIVRQYYRMLQRPILYTGLTRAKQSLVLLGEQEAFDIGLKTNGQIRLTQLNDLLKSYFGQNKDNLTTNKQTINEQKENNNHLDLKNEKENDIQLNESTIFQIDPMINMGEMTPYDFVER

SEQ ID NO: 1279 - DNA, 309 bp, Artificial Sequence
  Description of Artificial Sequence: synthetic nucleic acid sequence
atgacagaacataatcacgatgctgagttaacaataaataatgaagaggaattacttacgttatatgatgaaaacggaaatgaagttttataccgtaaaatgttagaattttatcatccagaattcaaaaaagaatatgtcgttcttgcagaagaaggtgcacaatcagatgacgaagatatgattgaacttgtaccaatgataaatgaacctgatgagtctggtgatggtgggaaattagtccctattgaaacagatgaagaatgggatatgattgaagaagttgtaaatactgagattaacgaataa

SEQ ID NO: 1280 - protein, 102 aa, Artificial Sequence
  Description of Artificial Sequence: synthetic amino acid sequence
MTEHNHDAELTINNEEELLTLYDENGNEVLYRKMLEFYHPEFKKEYVVLAEEGAQSDDEDMIELVPMINEPDESGDGGKLVPIETDEEWDMIEEVVNTEINE

SEQ ID NO: 1281 - DNA, 924 bp, Artificial Sequence
  Description of Artificial Sequence: synthetic nucleic acid sequence
atggttgaattattagttactcctaagtcaataactcatatggaaacactaatagataaaggtgcagacgcatttgttattggtgaacaaaaatttggtttaagactgccgggagaatttaatcgtgatgctatgcaagaagctgtagcattagcccataaaaataacaaaaaagtatacgctgctgtgaatggtattttccataattaccacttagatgccttggaagactatattaactttttacatgatattcaagtagatcgcattatatttggtgatccagctgtcgttatgtatgttaaacaacacgagcatccaattccattaaattgggatgctgaaactcttgtaacgaattattttcagtgtaattactgggggaaaaaaggtgcaaatagagcagttttagctcgagaacttagtttagatgaaataattcatattaaagagcatgctgatgtagagatagaagttcaagttcatggtatgacttgtatgtttcaatccaaaagaatgctattaggaaattattatactttccaagagcgacaaatgaagatagaacgccaacatgattatggagacttattattatatgatgaagaaagagataataaatatccagtttttgaagattataatggtactcacatcatgtctccaaatgatatctgtttaatagaagaattagagcctttttttgaggcaggaatagatgcgtttaagatagatggtattttacaaagtgaagaatatataaatgtagtcacagagcaatatcgagaagctatagatttatttaatgaagatccggatgcatatgaagatgaaaaattcatgctcgttgatcctatagaagaaatacaacctgaacatcgtccattcgacgaaggtttcttgtataaacaaacagtatattaa

SEQ ID NO: 1282 - protein, 307 aa, Artificial Sequence
  Description of Artificial Sequence: synthetic amino acid sequence
MVELLVTPKSITHMETLIDKGADAFVIGEQKFGLRLPGEFNRDAMQEAVALAHKNNKKVYAAVNGIFHNYHLDALEDYINFLHDIQVDRIIFGDPAVVMYVKQHEHPIPLNWDAETLVTNYFQCNYWGKKGANRAVLARELSLDEIIHIKEHADVEIEVQVHGMTCMFQSKRMLLGNYYTFQERQMKIERQHDYGDLLLYDEERDNKYPVFEDYNGTHIMSPNDICLIEELEPFFEAGIDAFKIDGILQSEEYINVVTEQYREAIDLFNEDPDAYEDEKFMLVDPIEEIQPEHRPFDEGFLYKQTVY

SEQ ID NO: 1283 - DNA, 741 bp, Artificial Sequence
  Description of Artificial Sequence: synthetic nucleic acid sequence
atgaaaactttagaagaagttaaatccaaaacccaaaagataatgaaaaagcctgaactacttgcaccagctggtaacttagagaaacttaagattgctgttcattatggtgcagatgcagtgtttttaggtggccaagaatatggattacgttctaatgctgataattttactatggaagaaattgctgaaggtgtagactttgctaatcgttatggcgctaaaatttatgttacaacgaatattattgcacatgatgaaaatatggagggactagaagagtacttacaaaaccttgaatctacaggtgctactggtatcatagtagcggatcctcttatcatagaaacttgtaaaaaagttgcgcccagattagaaattcatttatcaacacaacaatcactttcaaattataaagctgttgaattttggaaacaagaaggattagaccgtgttgtacttgcacgtgaaactggtgcaatggaaatgagtgaaatgaaagaaaaagttgatattgaaatagaagcgtttatacatggcgcaatgtgtatcgcatattctggtcgttgtactttaagtaatcatatgacagctcgagattctaatcgaggtggttgttgtcagagttgtcgttgggactatgatttacttgaagttgatagtgatggagaattagatttatattacgacaatagtgatgttactccttttgcaatgagtcctaaagatttaaaattaata

SEQ ID NO: 1284 - protein, 247 aa, Artificial Sequence
  Description of Artificial Sequence: synthetic amino acid sequence
MKTLEEVKSKTQKIMKKPELLAPAGNLEKLKIAVHYGADAVFLGGQEYGLRSNADNFTMEEIAEGVDFANRYGAKIYVTTNIIAHDENMEGLEEYLQNLESTGATGIIVADPLIIETCKKVAPRLEIHLSTQQSLSNYKAVEFWKQEGLDRVVLARETGAMEMSEMKEKVDIEIEAFIHGAMCIAYSGRCTLSNHMTARDSNRGGCCQSCRWDYDLLEVDSDGELDLYYDNSDVTPFAMSPKDLKLI

SEQ ID NO: 1285 - DNA, 975 bp, Artificial Sequence
  Description of Artificial Sequence: synthetic nucleic acid sequence
atgaaatttgatagacatagaagattgcgttcatctaagacaatgcgtgatttagtaagagaaactcatgttagaaaagaagatttaatatatccaatatttgtagttgagcaagatgatataaaaagtgaaattaaatcactaccaggcatataccaaattagtttaaatttattgcatgaagagattaaagaggcatatgatttaggtattagagcaatcatgttcttcggtgtgccaaatgacaaagacgacattggatctggtgcatatgatcataatggagttgttcaagaagcgacacgaatatctaagaatttatataaggatttacttattgttgcagatacttgtctttgtgaatacacagaccacggacactgtggcgttattgacgatcatacgcatgatgtagacaatgataaatcacttccattacttgtaaaaacagctatttctcaagttgaagctggagctgacatcattgctccaagtaatatgatggatggttttgttgctgaaattcgtgaaggccttgatcaagcgggatatcaaaatattcctatcatgagttatggtattaaatatgcatcaagctttttcggtccattcagagatgctgcagattcagcaccttcttttggggatagaaaaacctatcaaatggatcctgcaaaccgtttagaggcattaagagaattggaaagtgatcttaaagaaggttgcgatatgatgatagttaaaccatctttaagttatctagatattattagagatgtaaaaaataatacgaacgtgccagtcgtagcatacaacgttagtggagaatatagtatgacaaaagcagcagcgttaaatggttggatagatgaagagaaaattgttatggaacaaatgatatctatgaaacgtgcaggtgctgatttaataattacttattttgcaaaagatatctgtcgttatttagataaatag

SEQ ID NO: 1286 - protein, 324 aa, Artificial Sequence
  Description of Artificial Sequence: synthetic amino acid sequence
MKFDRHRRLRSSKTMRDLVRETHVRKEDLIYPIFVVEQDDIKSEIKSLPGIYQISLNLLHEEIKEAYDLGIRAIMFFGVPNDKDDIGSGAYDHNGVVQEATRISKNLYKDLLIVADTCLCEYTDHGHCGVIDDHTHDVDNDKSLPLLVKTAISQVEAGADIIAPSNMMDGFVAEIREGLDQAGYQNIPIMSYGIKYASSFFGPFRDAADSAPSFGDRKTYQMDPANRLEALRELESDLKEGCDMMIVKPSLSYLDIIRDVKNNTNVPVVAYNVSGEYSMTKAAALNGWIDEEKIVMEQMISMKRAGADLIITYFAKDICRYLDK

SEQ ID NO: 1287 - DNA, 1257 bp, Artificial Sequence
  Description of Artificial Sequence: synthetic nucleic acid sequence
atggagcaagctgagaaattaatgcctggcggtgttaacagtcccgtaagagcatttaaatcagtagacacaccagctatttttatggatcatggtgaaggatctaaaatatatgatattgatggaaatgaatacattgattatgtgctaagttggggcccattaattctgggacataaaaatcaacaagttatatccaaattacatgaagcagtagataaaggtacaagcttcggcgcttcaacacttcaagaaaataaacttgctgaacttgtgattgaccgtgtaccttcaattgaaaaagtaagaatggtttcctcaggaactgaagctactttagacacacttcgtttagctaggggttatacaggacgtaataaaattataaaatttgaagggtgttatcatggacacagtgattctttattgattaaagcaggatcaggtgttgcaacactaggtttacctgattcaccaggcgtccctgaaggtattgctaaaaacactatcacggtgccatataatgatttagattcacttaaattagcgttcgaaaaatatggcgatgatattgctggtgttattgttgaaccggttgctggaaatatgggtgtagtgcctccagtgaatggatttctacaaggtttaagagatattactaatgaatatggagcattacttatatttgatgaagtgatgactggtttccgtgtaggttataattgtgcgcaaggatactttggtgtaacacctgatttaacttgcttaggaaaagtgataggtggaggtttacccgttggagcttttggtggtaaaaaagaaattatggattacattgctcctgttgggactatttatcaagctggcacactttcaggtaatcctttagcaatgactagtggttatgaaacattgagtcaacttactcctgaatcttatgagtattttaattctctaggagatatacttgaaaaaggattaaaagaggtatttgctaagcataatgttccaatcacagtaaatcgcgctggttcaatgattggttacttcttaaatgaggggcctgtaacaaattttgaggaagcaaataaaagtgatttaaaattatttagtaatatgtatagagaaatggctaaggaaggtgttttcctaccaccttcacaatttgaaggaacatttttatcaactgcacatactaaagatgatattgagaaaactatccaagcatttgataatgcattaagtcgtattgtgtga

SEQ ID NO: 1288 - protein, 418 aa, Artificial Sequence
  Description of Artificial Sequence: synthetic amino acid sequence
MEQAEKLMPGGVNSPVRAFKSVDTPAIFMDHGEGSKIYDIDGNEYIDYVLSWGPLILGHKNQQVISKLHEAVDKGTSFGASTLQENKLAELVIDRVPSIEKVRMVSSGTEATLDTLRLARGYTGRNKIIKFEGCYHGHSDSLLIKAGSGVATLGLPDSPGVPEGIAKNTITVPYNDLDSLKLAFEKYGDDIAGVIVEPVAGNMGVVPPVNGFLQGLRDITNEYGALLIFDEVMTGFRVGYNCAQGYFGVTPDLTCLGKVIGGGLPVGAFGGKKEIMDYIAPVGTIYQAGTLSGNPLAMTSGYETLSQLTPESYEYFNSLGDILEKGLKEVFAKHNVPITVNRAGSMIGYFLNEGPVTNFEEANKSDLKLFSNMYREMAKEGVFLPPSQFEGTFLSTAHTKDDIEKTIQAFDNALSRIV

SEQ ID NO: 1289 - DNA, 1020 bp, Artificial Sequence
  Description of Artificial Sequence: synthetic nucleic acid sequence
atgttaagtctgttattaaaaatgttacatgtgattttgccatttatgtttggaccaatattagcggcgttattatgtgtaaaagtattaaaattaaaaatacgatggccattttggttgagtcaaattggtttaatactacttggagttcaaattggctctaccttcacacaacaagtgattaaagacataagtaaaaattggctaactatcgtttttgtcactatcctactaattttattagctttgataattgcattcttttttaagaaaattgcacaagtaaatttagaaactgcaattttaagtgttataccaggtgcgctaagccaaatgttagtgatggcagaagaaaataagaaagcaaatatattagttgtgagtttaacacagacatcacgtgtaatatttgttgttattttagtaccacttatttcgtatttttttcaggataaccatcatgaaatgaatcatactacaatggaagtacccacactttctcagactttaaatatatggcaaataatcatcttattctcaatggtgggaatcatctatataggaatgtcaaaaattaacttccccactaaacaattattagcacctataatagttttaattatatggaatatgacaacacatttaacattttcactagatcattggttgttagccacagcgcaacttatttatatgatacgtattggattacagattgccaacttaatgagtgatttaaagggaagaattgcaatagcaatagcctttcaaaatataatgctcatagtcacaacgtttataatgataataggaatacatttgattactaatgaatccatcaatgaattgtttttaggagcagcaccaggaggtatgagtcaaatagttttagtggctatggctactggagctgatgtagcgatgatttcaagctatcacatttttagaatattttttatattatttgtcattgcgccactaattggttattttattaatgttaaattaaataataaatga

SEQ ID NO: 1290 - protein, 339 aa, Artificial Sequence
  Description of Artificial Sequence: synthetic amino acid sequence
MLSLLLKMLHVILPFMFGPILAALLCVKVLKLKIRWPFWLSQIGLILLGVQIGSTFTQQVIKDISKNWLTIVFVTILLILLALIIAFFFKKIAQVNLETAILSVIPGALSQMLVMAEENKKANILVVSLTQTSRVIFVVILVPLISYFFQDNHHEMNHTTMEVPTLSQTLNIWQIIILFSMVGIIYIGMSKINFPTKQLLAPIIVLIIWNMTTHLTFSLDHWLLATAQLIYMIRIGLQIANLMSDLKGRIAIAIAFQNIMLIVTTFIMIIGIHLITNESINELFLGAAPGGMSQIVLVAMATGADVAMISSYHIFRIFFILFVIAPLIGYFINVKLNNK

SEQ ID NO: 1291 - DNA, 1578 bp, Artificial Sequence
  Description of Artificial Sequence: synthetic nucleic acid sequence
gtgattcaaaatgaacggcaaatgcttaagtgtttaaaaaatgtacatgttgctgcaaacgagtatcaaggtgaactgatatttttgcataaagtcaaagatggcgctgtggatgatagctatggtattcaagtggcaaaattagcggatttacctaatgaagtcattgatagagcgcaagttatattaaatgcatttgagcaaaaaccttcgtatcaactctctcatgagaatactgacgatcaacaaacggttccgtcgtataacgattttggtcgaacagaagaagagcaatcagttatagaaacacatacatcaaatcataattatatttttgatggtgagattgtgcttatagatagaataactggtcgtatgctacctggaacaaagcttcagtctggtttacatcaagctatagaggctctggaaaatgttgaaatttctcaagatatgagtgtgatggcaaccataacattccaaaacttatttaagcaatttgatgaattttcaggtatgactggaacaggtaaattaggggaaaaagaattctttgatttatattcaaaagttgttatagagattccgactcacagtccgattgaacgagatgatagacctgatagagtatttgctaatggtgacaaaaagaacgatgcaattttaaagacagtgattggtatacatgaaactcaacaacctgtgttactaattacacgtactgcagaagcggcagaatatttttcagctgagttatttaaacgtgatatacccaacaatttattaatcgctcaaaatgtagctaaagaggcacaaatgattgctgaggcgggacaattatctgcagttactgttgctacaagtatggcagggcgtggaactgatataaagttatcaaaagaggttcatgatatcggtggcttagcagtgattattaatgaacatatggataatagccgtgttgatcgtcaattaagaggacgctcaggtcgccaaggagatcctggatattcacagatttttgtatcacttgatgatgatttagtaaaacgttggagtaactctaacttggcagaaaataaaaacctccaaacgatggatgcatctaaactagaaagtagtgcactctttaaaaaacgtgtaaagtcaattgttaataaagcgcaacgtgtatctgaagagactgctatgaaaaatagagaaatggcaaatgaattcgaaaaaagtattagtgttcaacgagataaaatttatgctgaacgtaatcacatacttgaagcaagcgattttgatgattttaattttgaacagcttgcacgagatgtgtttacaaaagacgttaaaaatcttgacttaagtagtgaacgtgcacttgtgaattatatatacgaaaacttaagttttgtcttcgatgaagatgtatcaaatattaatatgcaaaatgatgaagaaatcatacaattcttaatacaacaatttactcaacaatttaacaatcgtttagaagttgctgctgattcatatttaaaacttgttattgaaaatcttaataaagttaaacacatcgttaaagaataa

SEQ ID NO: 1292 - protein, 525 aa, Artificial Sequence
  Description of Artificial Sequence: synthetic amino acid sequence
VIQNERQMLKCLKNVHVAANEYQGELIFLHKVKDGAVDDSYGIQVAKLADLPNEVIDRAQVILNAFEQKPSYQLSHENTDDQQTVPSYNDFGRTEEEQSVIETHTSNHNYIFDGEIVLIDRITGRMLPGTKLQSGLHQAIEALENVEISQDMSVMATITFQNLFKQFDEFSGMTGTGKLGEKEFFDLYSKVVIEIPTHSPIERDDRPDRVFANGDKKNDAILKTVIGIHETQQPVLLITRTAEAAEYFSAELFKRDIPNNLLIAQNVAKEAQMIAEAGQLSAVTVATSMAGRGTDIKLSKEVHDIGGLAVIINEHMDNSRVDRQLRGRSGRQGDPGYSQIFVSLDDDLVKRWSNSNLAENKNLQTMDASKLESSALFKKRVKSIVNKAQRVSEETAMKNREMANEFEKSISVQRDKIYAERNHILEASDFDDFNFEQLARDVFTKDVKNLDLSSERALVNYIYENLSFVFDEDVSNINMQNDEEIIQFLIQQFTQQFNNRLEVAADSYLKLVIENLNKVKHIVKE

SEQ ID NO: 1293 - DNA, 1338 bp, Artificial Sequence
  Description of Artificial Sequence: synthetic nucleic acid sequence
atgaaagtcaaaagtatttcacggttcttttcaatgaagaaagtgacgctaagtttcgttactttatttattggagtagggacaataggttcatacaatcagtttgctgatgcaagtacgaaaacgcaacaaacacatgtaactaagacatctccaactcaaaagacgacgtccaattttaaacgttcagttaaagatacgtctgttaaatctagagctacatcaacaaaaagagctacatcaaccaaacgagctatatcacccaaaacatcatcaactaaaaaaactacaatagcaaaaaaatctaccacagtaaataaaacgcgcacaacaaccaggactcagcctaccattcgtaagagttcaacaacttcaacacgttcaaaaacaatacctacttctgtgaaacgcacaacttctcataaagcaactactgtgtcgccaacttctaaagctaaaatatcaacaaagacacaacaatcaactaaaagtcatacaacttcagttaagaaaaacactacacaactaagtaaaacaaaatctccgtcaacgtcaacaaaatctaaaacagttcaatcctctacgacaaaggcacaacctactttatcgactcaagttagtacaactactaaagcaaagcaactttcaacgccaactacttctaaaactgatagcagtaaagctttagtaagtttagcatctacagaacgtaaaatagataaataccaatcgatgactcagttagaaaaagaaacaactgaaggtgtagattggagaaaagatacaaaaaacacagggaatcaagtactcattgtggctccacatggcggaagtattgaacaaggtacaacagaattaactaaagcattagcagataaaggtaattatgattattattcatttgaaggtattcgacctaaaaataactctgaattacatgtgacgtctacacattatgatgatccgacattaaatcaaatgattaaaaaccgtactgcaactatttcgattcatggcgcatcaggtactgaggagattatctatcttggtgggccccgttcagatttaagaaatgctatagagaagcaacttgtaggacgtggatttacagttaaagttccaccagagtatctaggtggtcaaaataataaaaacttcattaataaagaagacaataacactggcgttcagttagaattaacgactgctttaagaaaagcattctttaaaaatggagatactagtacaaaaaatcgtaccaataaagaaaattggacaccaacaatggaagcatttattaatgcattatatgaaggtatcaatcaaacgtattcataa

SEQ ID NO: 1294 - protein, 445 aa, Artificial Sequence
  Description of Artificial Sequence: synthetic amino acid sequence
MKVKSISRFFSMKKVTLSFVTLFIGVGTIGSYNQFADASTKTQQTHVTKTSPTQKTTSNFKRSVKDTSVKSRATSTKRATSTKRAISPKTSSTKKTTIAKKSTTVNKTRTTTRTQPTIRKSSTTSTRSKTIPTSVKRTTSHKATTVSPTSKAKISTKTQQSTKSHTTSVKKNTTQLSKTKSPSTSTKSKTVQSSTTKAQPTLSTQVSTTTKAKQLSTPTTSKTDSSKALVSLASTERKIDKYQSMTQLEKETTEGVDWRKDTKNTGNQVLIVAPHGGSIEQGTTELTKALADKGNYDYYSFEGIRPKNNSELHVTSTHYDDPTLNQMIKNRTATISIHGASGTEEIIYLGGPRSDLRNAIEKQLVGRGFTVKVPPEYLGGQNNKNFINKEDNNTGVQLELTTALRKAFFKNGDTSTKNRTNKENWTPTMEAFINALYEGINQTYS

SEQ ID NO: 1295 - DNA, 2265 bp, Artificial Sequence
  Description of Artificial Sequence: synthetic nucleic acid sequence
gtgaaaagcttattagaaattggacatgaggtacactactttaattatcaggactataataaaagtgatatcacaaaactaattatttacgaaggtttgagcacaaagcatcttcatattcatcaatttaatagtggaaaagaacttgctcatggagacctacttataattactagagaaaccttttttaatcatgcatatctagttaaaaaattaaatagcaagattaagattgttggtgaaatacatggtccattggaatatattaatgagaatatagatttagcattagactgtattgattgtgttcgagtgagtacagctagaattaaaaatgaatttatagctaaatatgactatcatcgggtttttaatcaatacgtaaatgcacaacatatcgatttaaaatcagagccgataaatactaaacgaaattttttaattaaagcacgttttgaggatgaagttaaagatatttcatatattattaaattgtttaattacatcattaaaaaccaaattgttgatgatgctcaactttatttaataggatatggtccttcagaaatgctttacaaaaatttgataaattactatcatcttaatgattatattcatattaatgaaaaagaaccacagagttatatttatgtatctagttcgccatatgaaacgctcggctattctatattagaaacgattgcacagggtaataaagctctagtttactatggtgatgataacgtgttaaaggatatctatgcaccatatgaagcgatacgttttttaaccaaagatatgattaaagatagtaaaataattaaagactttctaaactataaatatagtcactgtgatcgacaaaaagattatcgacagttgaaaagtacgtttaaatgcattaattatggacaggaatttttaaataatgttgaaactttctcttcatctcaacatgtaaaagtgaagaaaattcatcgacatctcggtagtgaaaaacaaatagatatagcaagtcgtttaaaagagagtcgttggatgaatttaattagaaaaaataaatatttatttaataaatgtaaaacgtactatgaaaaaagaacgcatatgagctatatcaaaaatttaaatcaaatacctgtagacgacgattcaatatttatagagtctttccatggcaagaattttagtggagatcctaaatatattgctcttgctattaagagacagtatgatcataaaaaaatatatgtgagttcaaccaattcacttgttgatatggaaatcaaacgttacggttttacacctgttcgatttggaagcgagaaatatattaaaacgtttagaaagtgtaagtatgtttttatcaatggtaactcgtgggataaagtgtacaagtcttcagatcagatatttattcaaacatggcacggttttccattaaagaaaatggttaatgatttaaatgaacaacatgaaagacaacaacaactagaggcattcataccacgcatgaaaaaatgggattacattttgacatcatcagatattaatacgacgttgttggaatctgcttttatgctaaataaaaatccaaatcttaaagttctagaatacggcgcacctaagaatgaatatttaataaataataataatttacaagagcgccagcagttacagcttaaatatatgtataagatagatgatgataaaaaatatatattatattgtcccacttggagggaaaatcaaagaaaagaagtcactcagattaatttaaaagatttacttaaatatttaccagagaattatgagattattgtgaaacttcatcctaatgaaagtcatttaagaaccagatataatcaaatagataatcgaattcactgttatttcaatgaacttgttgatattcaagaactgtatattctgagtgaatgtatgattacagattactcgtcgaccatttttgactatatacatttaaacaagccagtctttattcttcaagaagacgagcaacaatataaacaaagtgttggtttttattttgatttgtttgaagtgggtgattttcttaaagcctctttaaatgaacgcatgttagctaaacaaatttgtagcactgattatataaattattcaaaagtggttcatcgtttgatgaaacaagatagttcgaaaagcagtgaaaagttaatggccgaaattcttggggaaccagaatatccaagttcatcaaactgcaaacaacagatttcttaa

SEQ ID NO: 1296 - protein, 754 aa, Artificial Sequence
  Description of Artificial Sequence: synthetic amino acid sequence
VKSLLEIGHEVHYFNYQDYNKSDITKLIIYEGLSTKHLHIHQFNSGKELAHGDLLIITRETFFNHAYLVKKLNSKIKIVGEIHGPLEYINENIDLALDCIDCVRVSTARIKNEFIAKYDYHRVFNQYVNAQHIDLKSEPINTKRNFLIKARFEDEVKDISYIIKLFNYIIKNQIVDDAQLYLIGYGPSEMLYKNLINYYHLNDYIHINEKEPQSYIYVSSSPYETLGYSILETIAQGNKALVYYGDDNVLKDIYAPYEAIRFLTKDMIKDSKIIKDFLNYKYSHCDRQKDYRQLKSTFKCINYGQEFLNNVETFSSSQHVKVKKIHRHLGSEKQIDIASRLKESRWMNLIRKNKYLFNKCKTYYEKRTHMSYIKNLNQIPVDDDSIFIESFHGKNFSGDPKYIALAIKRQYDHKKIYVSSTNSLVDMEIKRYGFTPVRFGSEKYIKTFRKCKYVFINGNSWDKVYKSSDQIFIQTWHGFPLKKMVNDLNEQHERQQQLEAFIPRMKKWDYILTSSDINTTLLESAFMLNKNPNLKVLEYGAPKNEYLINNNNLQERQQLQLKYMYKIDDDKKYILYCPTWRENQRKEVTQINLKDLLKYLPENYEIIVKLHPNESHLRTRYNQIDNRIHCYFNELVDIQELYILSECMITDYSSTIFDYIHLNKPVFILQEDEQQYKQSVGFYFDLFEVGDFLKASLNERMLAKQICSTDYINYSKVVHRLMKQDSSKSSEKLMAEILGEPEYPSSSNCKQQIS

SEQ ID NO: 1297 - DNA, 897 bp, Artificial Sequence
  Description of Artificial Sequence: synthetic nucleic acid sequence
atgaagtttgcatatattcaatcgattcgtaatgagatttcaattattttaataattctattattttttgcgcttatattttatgtgttttctttaccttttgatgcatacgtactagcaatcagtataatattactattgatgtgtgtacgttggtggataaagtatttaagttttaaaaagaatgaacatcttaaagataaagtagcatatttagaacatgagttagcacatgttaagaatcagcaaattgaatatcgtaacgatgttgaaagttattttttaacatgggtacatcaaattaaaacacctatcactgcctcacaattacttttggagagaaacgaggagaatgtagttaatcgtgttcgacaagaaattgtgcacattgataattatacaagtctcgcattaagttatttaaaattattaaatgaagagtcagatatgacaattaccaaagtgacagttgatgatttgattcgcccgttgattttaaaatatagaattcagtttattgaacaaaagacgcaaatccattatgaaaaaagtgaggacattattttaaccgatgcacaatgggcttctataatgatagagcaacttttaaataatgctttaaaatatgctaaaggtaaagatatttggatagattttgatgttgccaatcaaactctacagattaaagataatggtattgggattagtaaagcagatattcctaaaatttttgataaaggatactcaggatttaacggtagattgaatgaacaatcaactggtataggtctatttatagtgcaacacattgcaaatcatttaaatatacaagtaactgtacaatcagagttgaatcatgggacagtattttttatacattttactaaagaaaaataa

SEQ ID NO: 1298 - protein, 298 aa, Artificial Sequence
  Description of Artificial Sequence: synthetic amino acid sequence
MKFAYIQSIRNEISIILIILLFFALIFYVFSLPFDAYVLAISIILLLMCVRWWIKYLSFKKNEHLKDKVAYLEHELAHVKNQQIEYRNDVESYFLTWVHQIKTPITASQLLLERNEENVVNRVRQEIVHIDNYTSLALSYLKLLNEESDMTITKVTVDDLIRPLILKYRIQFIEQKTQIHYEKSEDIILTDAQWASIMIEQLLNNALKYAKGKDIWIDFDVANQTLQIKDNGIGISKADIPKIFDKGYSGFNGRLNEQSTGIGLFIVQHIANHLNIQVTVQSELNHGTVFFIHFTKEK

SEQ ID NO: 1299 - DNA, 572 bp, Artificial Sequence
  Description of Artificial Sequence: synthetic nucleic acid sequence
atggctttaaatcaaatgaaccttgaaattgatgaaaatgaatttgtagcaatcatgggcgagtcaggttcaggtaaatctacattactcaatttaattgctacttttgatcgtacaactgaaggattaataaagttagacgagttgccgcttaatcaattgaagaataaagacattgcacgctttcgcagagaaatgatgggatttgtgtttcaagattttaatgtgttgaatacgatgtcgaacaaagataatattttgatgcctcttgtacttgcaaatgaacgtccgaaaataatgcaaaaacgcttaatggaaataagtgaacaattaggaattgaagacttgcttgaaaaatatccgtctgaaatatctgggggacaaaaacaacggatagctatagcccgtgcgttgatagcacgacctaaattattattagctgatgaacccactggtgcacttgattcaaaaacctctaaaaaccttatgtgtttatttcgaaaaattaatcaaaagcatcaaactatattaatggtgacacattcaaatattgacgcgtcatatgcgaaccg

SEQ ID NO: 1300 - protein, 191 aa, Artificial Sequence
  Description of Artificial Sequence: synthetic amino acid sequence
MALNQMNLEIDENEFVAIMGESGSGKSTLLNLIATFDRTTEGLIKLDELPLNQLKNKDIARFRREMMGFVFQDFNVLNTMSNKDNILMPLVLANERPKIMQKRLMEISEQLGIEDLLEKYPSEISGGQKQRIAIARALIARPKLLLADEPTGALDSKTSKNLMCLFRKINQKHQTILMVTHSNIDASYANR

SEQ ID NO: 1301 - DNA, 1470 bp, Artificial Sequence
  Description of Artificial Sequence: synthetic nucleic acid sequence
atgaaatttatgaacaaaatgggtaagacgacgcttgcttcatcaatcgtagcagcatccgttttaagtacggtaaacgtatcatatgcttcaggtagctcagaacaaagtgctcaaactaagcaaacacaaaacgatgccattgctttcggcaacacaaaaaatccaaaaaatgtcatcttcatggttggcgatggtatgggaccttcttttaacactgcatatcgttattataaaaataagcctggtgctaagaaaatgactccaactgcattcgataaatatctaaaaggaacaaatcgtacttattctaatgatcctaaagaaaatgttacagactctgctgctggaggaacagcttttagtaccggtcacaaaacatataacggtgcgattagtgttgatacaaataaaaaaccaattaaatctgtgctagaacaagctaaagaacaaggaaaatcaactggtttagtaactactgctgaacttactgatgcaacacctgctgtatatgctgctcatgtagattcacgcgacaaaaaagatgaaattgcacagcaattttataatgataaaataaatggtaaacataaagtcgatgtgatgttaggtggcggtgcaaaatacttcggtaaagaaaataaaaatttagcgaaaaaattcaaaaaagatggttatgatatcgtttctaataaagatgaattaaatcaatcacaaagcaagcaagttttaggtactttctcagaaaaagatatgccattacaaatagatgcacctcaatctaatccgttgctagtagacatgcaaaacagtgcactaaataaattaagtaaaaataataaaggattctttttaatggttgagggtgcttcaattgataaagctgcccaccctaatgatatcactggtgtgatgtctgaaatgtctggtttcgaaactgcttttgataatgctattaattatgcaaagacacataaagatacacttgttgtagcaactgcagaccactcaactggcggtctatcaaccgcaaaaggtaaagattataaatggaatccagaggctattcacaagatgaaacattctggaatgtatatgacaaaacaaatcgctgatggaaaagatcctgaaaaagtaattaaagatggatacggtattgatttcccaaataaacaactcgataaagtcaaaaaagcagcagacgagcttcacaaattacaaaaagaaggtaaagatgacaaagacgaaaaagttgtagaacaaacaacaaaattacaaaatgcaattcaaaaaccaattaacgatgcttcacacacaggttggacaaccaatggccatacaggtgtagatgttaacacatatgcatatgggccaggttctaacaaattcaaagggaatatggaaaatacccaaagcgctaaaaacttatttgactttttcggaaacaatgtaacatcaaatcaaaattaa

SEQ ID NO: 1302 - protein, 489 aa, Artificial Sequence
  Description of Artificial Sequence: synthetic amino acid sequence
MKFMNKMGKTTLASSIVAASVLSTVNVSYASGSSEQSAQTKQTQNDAIAFGNTKNPKNVIFMVGDGMGPSFNTAYRYYKNKPGAKKMTPTAFDKYLKGTNRTYSNDPKENVTDSAAGGTAFSTGHKTYNGAISVDTNKKPIKSVLEQAKEQGKSTGLVTTAELTDATPAVYAAHVDSRDKKDEIAQQFYNDKINGKHKVDVMLGGGAKYFGKENKNLAKKFKKDGYDIVSNKDELNQSQSKQVLGTFSEKDMPLQIDAPQSNPLLVDMQNSALNKLSKNNKGFFLMVEGASIDKAAHPNDITGVMSEMSGFETAFDNAINYAKTHKDTLVVATADHSTGGLSTAKGKDYKWNPEAIHKMKHSGMYMTKQIADGKDPEKVIKDGYGIDFPNKQLDKVKKAADELHKLQKEGKDDKDEKVVEQTTKLQNAIQKPINDASHTGWTTNGHTGVDVNTYAYGPGSNKFKGNMENTQSAKNLFDFFGNNVTSNQN

SEQ ID NO: 1303 - DNA, 768 bp, Artificial Sequence
  Description of Artificial Sequence: synthetic nucleic acid sequence
atgttatacaggatgatagatatcatcaatgatacactagtatccattaggttcagtgtaaatcaaagtgttcattttgaagtgttgctagttaaacttgcagaaatgattaagacacagcctcaaactgtacaaaatgtagcaacagcatcggtagctaatgaaccagataatgagatgttattacaacgtttagaacaacttgaaaatgagcttaaaaccttaaaagaacaagggatcaaaactaataaagttagtcaacaacctaagaaaccaacacgtacgattcaacgatctaaaaatacgttttctatgcaacaaatagcgaaagtattagacaaagcaaacaaagatgatatcaaattgttgaagaaccattggcaagaagtgattgatcatgcaaaaagtaatgataaaaagtctttagtaagtttgctactgaattcagaaccagtagcagctagtgaagatcatgtgttagttaaatttgatgaagaaattcattgtgaaatagtaaataaagatgatgaaaagagaaacaatattgaaagtgtagtttgtaatatagttaataaaactgtcaaagtagttggagtgccggctgaccaatggctgagagtgagagcagagtacttacaaaatcgtaacaccaatgaaacacatcaaagcgaaaaacaaagcacacaacagtctcaacaaatagatattgctcaaaaagctaaagacttatttggtgaggaaactgtacacttagttgatgaagactga

SEQ ID NO: 1304 - protein, 255 aa, Artificial Sequence
  Description of Artificial Sequence: synthetic amino acid sequence
MLYRMIDIINDTLVSIRFSVNQSVHFEVLLVKLAEMIKTQPQTVQNVATASVANEPDNEMLLQRLEQLENELKTLKEQGIKTNKVSQQPKKPTRTIQRSKNTFSMQQIAKVLDKANKDDIKLLKNHWQEVIDHAKSNDKKSLVSLLLNSEPVAASEDHVLVKFDEEIHCEIVNKDDEKRNNIESVVCNIVNKTVKVVGVPADQWLRVRAEYLQNRNTNETHQSEKQSTQQSQQIDIAQKAKDLFGEETVHLVDED

SEQ ID NO: 1305 - DNA, 381 bp, Artificial Sequence
  Description of Artificial Sequence: synthetic nucleic acid sequence
atgcattatccagaacctatatcaaagcttatcgatagttttatgaaactgccaggcattggaccaaagacggctcaacgtctggcttttcatactttagatatgaaagaagacgatgttgttaagtttgctaaagcactagttgatgttaaaagagaacttacctattgtagtgtttgtgggcatattacagaaaatgatccttgttatatatgtgaagataaacagcgagatcgttctgtcatatgtgtagttgaagatgacaaggatgtcatagcaatgaaaaaatgcgtgaatataaaggtttatatcacgtgcttcatggttcgatttcaccaatggatggtattgggcctgaagacatcaatatacctgcattag

SEQ ID NO: 1306 - protein, 126 aa, Artificial Sequence
  Description of Artificial Sequence: synthetic amino acid sequence
MHYPEPISKLIDSFMKLPGIGPKTAQRLAFHTLDMKEDDVVKFAKALVDVKRELTYCSVCGHITENDPCYICEDKQRDRSVICVVEDDKDVIAMKKCVNIKVYITCFMVRFHQWMVLGLKTSIYLH

SEQ ID NO: 1307 - DNA, 819 bp, Artificial Sequence
  Description of Artificial Sequence: synthetic nucleic acid sequence
atgaaaataaatgttttatgcgagaagagggacaatatggatattaaacaatcttcagagaaacaaggtcgaccgcatcatttatcagacagtaggacagttttaaaaagaaattttatattaataccagcttatattttattacaaagtatcgtaccaatcattgttgttttcggctcattagggatcactgccatgataacacaacaggcaccaccacaatggttgtatcatttttcattaagtttaagttttgtgattgctcaaggtctaatattagttatcttttataaaatgcatcaatctgtaataaatgatgtgatgaagcaacaatggatagttgcaaagaataaaataattaaaattgtaatagttgcgattgtcgtatatttattattacttataatgcgggtgattggaacatcattacctaatcatttaagttatcatctcacgcaatacgaacaacgtacgctagggctatttaaatcaccatatgtgttgttagttacttttatatccatggtattcttacgtccaatggtagaacaaatcatttatagatatctcatcatccatgaattaggaaaagtatggaatagacaatttgtaattggtttgtctattcttattgaaacgatcgtacatgtttacgacatgtcatcgatttttgaaatttttccatatatcgttattgctacggcagctacaatactatatattaaatcgcgggataatttaattgtcgcttatatatttcaagtgattttgcagtgtatcctttttatagaaattttatgtaagtataccaacttttaa

SEQ ID NO: 1308 - protein, 272 aa, Artificial Sequence
  Description of Artificial Sequence: synthetic amino acid sequence
MKINVLCEKRDNMDIKQSSEKQGRPHHLSDSRTVLKRNFILIPAYILLQSIVPIIVVFGSLGITAMITQQAPPQWLYHFSLSLSFVIAQGLILVIFYKMHQSVINDVMKQQWIVAKNKIIKIVIVAIVVYLLLLIMRVIGTSLPNHLSYHLTQYEQRTLGLFKSPYVLLVTFISMVFLRPMVEQIIYRYLIIHELGKVWNRQFVIGLSILIETIVHVYDMSSIFEIFPYIVIATAATILYIKSRDNLIVAYIFQVILQCILFIEILCKYTNF

SEQ ID NO: 1309 - DNA, 420 bp, Artificial Sequence
  Description of Artificial Sequence: synthetic nucleic acid sequence
atgaatacttacgaagttactgacaagcatcaacatggagaagagattgcacaactcgtaggtgctaaaatagaagaagtctttaaaacacttgtactagagaattccaatcatgaacactatgtttttgtcattccagttaatgaaaccttagatatgaagaaggcggctcatgttgttaatgaaaagaaattgaatttaatgcctctcgatcaattaaaacaagtaacagggtatgttagaggaggatgttcacctatcggtatgaaacattcctttaaaacgacgattgatgcttccgctaaaaatttagaaaaagtttatattagcggaggtcaaagaggaatgcaaattatcattcatgtgaatgatttaattgacatgacaaaggctcaggtagaatctattacacagaattaa

SEQ ID NO: 1310 - protein, 139 aa, Artificial Sequence
  Description of Artificial Sequence: synthetic amino acid sequence
MNTYEVTDKHQHGEEIAQLVGAKIEEVFKTLVLENSNHEHYVFVIPVNETLDMKKAAHVVNEKKLNLMPLDQLKQVTGYVRGGCSPIGMKHSFKTTIDASAKNLEKVYISGGQRGMQIIIHVNDLIDMTKAQVESITQN

SEQ ID NO: 1311 - DNA, 929 bp, Artificial Sequence
  Description of Artificial Sequence: synthetic nucleic acid sequence
atggcaaaagaaaaatttgatcgctcaaaagaacatgccaatattggtactatcggtcacgttgaccatggtaaaacaactttaacagctgctatcgcaactgtattagctaaaaatggtgacactgttgcacaatcatacgatatgattgacaacgctccagaagaaaaagaacgtggtattacaatcaatactgcacatatcgaataccaaactgacaaacgtcactatgctcacgttgactgcccaggacacgctgactatgttaaaaacatgatcactggtgcagctcaaatggacggcggtatcttagttgtatctgctgctgacggtccaatgccacaaactcgtgaacacatcttattatcacgtaacgttggtgtaccagcattagttgtattcttaaacaaagttgacatggtagacgacgaagaattattagaattagttgaaatggaagttcgtgacttattaagcgaatatgacttcccaggtgacgatgtacctgtaatcgctggttctgcattaaaagcattagaaggcgatgctgaatacgaacaaaaaatcttagacttaatgcaagcagttgatgattacattccaactccagaacgtgattctgacaaaccattcatgatgccagttgaggacgtattctcaatcactggtcgtggtactgttgctacaggccgtgttgaacgtggtcaaatcaaagttggtgaagaagttgaaatcatcggtatgcacgaaacttctaaaacaactgttactggtgtagaaatgttccgtaaattattagactacgctgaagctggtgacaacatcggtgctttattacgtggtgttgcacgtgaagacgtacaacgtggtcaagtattagctgctcctggttctattacaccacacacaaaattcaaagctgaagtata

SEQ ID NO: 1312 - protein, 310 aa, Artificial Sequence
  Description of Artificial Sequence: synthetic amino acid sequence
  MOD_RES (310): variable amino acid
MAKEKFDRSKEHANIGTIGHVDHGKTTLTAAIATVLAKNGDTVAQSYDMIDNAPEEKERGITINTAHIEYQTDKRHYAHVDCPGHADYVKNMITGAAQMDGGILVVSAADGPMPQTREHILLSRNVGVPALVVFLNKVDMVDDEELLELVEMEVRDLLSEYDFPGDDVPVIAGSALKALEGDAEYEQKILDLMQAVDDYIPTPERDSDKPFMMPVEDVFSITGRGTVATGRVERGQIKVGEEVEIIGMHETSKTTVTGVEMFRKLLDYAEAGDNIGALLRGVAREDVQRGQVLAAPGSITPHTKFKAEVX

SEQ ID NO: 1313 - DNA, 1449 bp, Artificial Sequence
  Description of Artificial Sequence: synthetic nucleic acid sequence
atggcgtattttaataaatttttaagcaattctgaaaggaagcgtggaaaagtgagtaagaaagtggcaattattggagcgggaatcactggtttatctagcgcatatttcattaaaaaacaagacccttctattgaagtaactatcttcgaagcctcaaatagagtaggtggaaagattcaaacatatagatcagatggttacacaattgagttaggccctgagtcttatttaggtcgtaagacaattatgactgatgtggcaaaagatattggattagaaaatgaccttataacaaatactactggccaatcttatatttttgctaaaaataaattatatcctattcctggtggctcaattatgggaattcctacagatattaaaccatttattaaaacaagactcatttcacctattggtaaattaagagcggggcttgatttgtttaaaaaaccgatagaaattgaagatgatatttctgttggtagtttctttagacaacgattaggtaatgaagtattagagaacttaattgaaccactaatgggtggtatttatggcactgatattgatcaattgagcttaatgagtacatttcctaactttaaggaaaaagaggaacaatttggtagtttgattaaaggaatgaaagacgaaaaagaacaacgtattaagaaacgtcaattatatccaggtgctcctaaaggacaattcaaacagtttagacacggattgagttcttttatagaggctcttgttaaagatattgaaagtaaaggtgtccacatacgatataacacgccagtcaaagatatattgatttcgcaaaaagattatgaaattttattagaagatgacagtaaagagaaatttaatggcttacttgtaacaacaccacatcaagtatttctgaactggtttagtcacgatccagcatttgattactttaaaaacatggattctactactgtcgcaacagttgttttggcctttgatgagaaaaatattaccaatacgtacgatggaactggctttgttattgcaagaacaagtcaaacggatattactgcatgtacttggacatcaaagaaatggccatttactactccagaaggtaaagttttaattcgagcatatataggaaaaccaggtgatactgtagtagatgatcacaccgatgaagaaatagtatcaattgttagaaaagacttaagccaaatgatgaccatctcagggaatcctgattttacaattgtaaatcggttacctaagagtatgccccaataccacgtgggtcatattaaaatgattaaagaaattcaacaacatattaaaacaacttatcctagattacgtgttacaggggcaccgtttgaagctgtcggtttaccagactgcatacaacaaggtaagaatgcagttgatgaaatattagaagagttataa

SEQ ID NO: 1314 - protein, 482 aa, Artificial Sequence
  Description of Artificial Sequence: synthetic amino acid sequence
MAYFNKFLSNSERKRGKVSKKVAIIGAGITGLSSAYFIKKQDPSIEVTIFEASNRVGGKIQTYRSDGYTIELGPESYLGRKTIMTDVAKDIGLENDLITNTTGQSYIFAKNKLYPIPGGSIMGIPTDIKPFIKTRLISPIGKLRAGLDLFKKPIEIEDDISVGSFFRQRLGNEVLENLIEPLMGGIYGTDIDQLSLMSTFPNFKEKEEQFGSLIKGMKDEKEQRIKKRQLYPGAPKGQFKQFRHGLSSFIEALVKDIESKGVHIRYNTPVKDILISQKDYEILLEDDSKEKFNGLLVTTPHQVFLNWFSHDPAFDYFKNMDSTTVATVVLAFDEKNITNTYDGTGFVIARTSQTDITACTWTSKKWPFTTPEGKVLIRAYIGKPGDTVVDDHTDEEIVSIVRKDLSQMMTISGNPDFTIVNRLPKSMPQYHVGHIKMIKEIQQHIKTTYPRLRVTGAPFEAVGLPDCIQQGKNAVDEILEEL

SEQ ID NO: 1315 - DNA, 417 bp, Artificial Sequence
  Description of Artificial Sequence: synthetic nucleic acid sequence
atgacagacattataattgtacactcaaaacatggtaattctaaaaatcattggtatgaatggttaaggcataatttaactttggaagggtatgatgtttctttattcaatcttgaagcaaatgatcatgctcaaattgatgagtgggttaatgaaatgaaacaacaactacatatccgtaaaaaagatacatattttgtgacccacggatttggctcaatcgctgctttaaaatttcttgcagaaacgcatcatcacattgaaggtttctttagtatcgcaggatttaaagaagatgcacaagatatagacgaagatgtagatttaaaaggggtaaccatcgattacgataaaataaaagagcaagtagataaattttatggactcacgtctaaagatgatcaatatgtttcataa

SEQ ID NO: 1316 - protein, 138 aa, Artificial Sequence
  Description of Artificial Sequence: synthetic amino acid sequence
MTDIIIVHSKHGNSKNHWYEWLRHNLTLEGYDVSLFNLEANDHAQIDEWVNEMKQQLHIRKKDTYFVTHGFGSIAALKFLAETHHHIEGFFSIAGFKEDAQDIDEDVDLKGVTIDYDKIKEQVDKFYGLTSKDDQYVS

SEQ ID NO: 1317 - DNA, 1578 bp, Artificial Sequence
  Description of Artificial Sequence: synthetic nucleic acid sequence
atgtcagttttaactgtcatgcaattcatagtcaatattatcatcatgattgtgttattaacgattatgattcttggggttatttggttatttaaagacaaaggtcaaaatcaacacagtgtactaagaaattttcctgttttgggtcgaatacgttatatttctgaaaaaatcggtcccgaattaagacaatatttcttcgctaacgataatgaaggtaaacctttttcacgaagtgattataaaaatattgttttagctggaaaatataaatcaagaatgactagtttcggtacaggtaaggattatgaagaagggttttatattcaaaatacgatgttcccacttcaagcaactgaattacatatcgatcatactgaattcatttctacatttttatatcatattgagaatgagcgcctatttagtagagaagaatacagaaaaagcgctcaggttgatccgtttttcttaactgatgaacatgcagtagtattgggctctaaccttaagcatccctttaaaatcaaacgcttagttggtcaatctgggatgagttatggcgctttaggtaaaaatgcaattactgcactgtcaatggggttagctaaagctggtacatggatgaatacaggtgaaggtggattatctgaatatcatttgaaaggtaatggtgacatcatctatcaaattggtccaggactctttggggtaagagatcatgatggcaattttaatagagacatgtttatcaatcttgccgaacacaataatgtacgcgcatttgaaattaagttagctcaaggtgctaaaacacgtggtggacatatggagggaaacaaagtcacagaagagattgcacgcattagaaatgtgaaaccatatgaaactattaattcacctaatcgttttgattttattaaaaatccaacagatttactgaatttcgttaatcatttacaatcgataggtcaaaaacctgtcggcttcaaaattgttgtcagtaaagttgaagaaatagaggcgttagttaaaacaatggtagagatagacacctatccaagctttattactgttgatggtggtgaaggtggtacaggcgctaccttccaagagcttgaagatggtgttggtttaccgttatttacagcacttcctatcgtttcaagtatgttagaaaagtatggcataagaaacaaggttaaaatttttgcgtccggtaaattagtgactccagataaaatcgcaattgcattaggattaggtgcggatctcgtcaatattgctagaggtatgatgataagtgtaggatgcatcatgagtcaacaatgtcatttaaatacatgtccagttggagtagcaacaaccgatcctaaaaaagaaaagggacttattgttgatgaaaaacaataccgtgttacaaattatgttacaagtttgcatgaaggtttatttaacatcgctgcagctgtaggtgttcatagtccaacggagattacttccgaccatattatctatagacaattagatggcactacaacgtccattcaggattataaacttaaattaatttcttaa

SEQ ID NO: 1318 - protein, 525 aa, Artificial Sequence
  Description of Artificial Sequence: synthetic amino acid sequence
MSVLTVMQFIVNIIIMIVLLTIMILGVIWLFKDKGQNQHSVLRNFPVLGRIRYISEKIGPELRQYFFANDNEGKPFSRSDYKNIVLAGKYKSRMTSFGTGKDYEEGFYIQNTMFPLQATELHIDHTEFISTFLYHIENERLFSREEYRKSAQVDPFFLTDEHAVVLGSNLKHPFKIKRLVGQSGMSYGALGKNAITALSMGLAKAGTWMNTGEGGLSEYHLKGNGDIIYQIGPGLFGVRDHDGNFNRDMFINLAEHNNVRAFEIKLAQGAKTRGGHMEGNKVTEEIARIRNVKPYETINSPNRFDFIKNPTDLLNFVNHLQSIGQKPVGFKIVVSKVEEIEALVKTMVEIDTYPSFITVDGGEGGTGATFQELEDGVGLPLFTALPIVSSMLEKYGIRNKVKIFASGKLVTPDKIAIALGLGADLVNIARGMMISVGCIMSQQCHLNTCPVGVATTDPKKEKGLIVDEKQYRVTNYVTSLHEGLFNIAAAVGVHSPTEITSDHIIYRQLDGTTTSIQDYKLKLIS

SEQ ID NO: 1319 - DNA, 552 bp, Artificial Sequence
  Description of Artificial Sequence: synthetic nucleic acid sequence
gtgtatgcagaaacagtacgtaaagtaagagaaagaaatccatttacaacaatagaaattttaccatctgacatgggtggcgattatgaagcccttgaaacattaatggcttctagaccagacattcttaatcacaacattgaaacggttcgtcgcttaacaccaagagttcgagctcgagcaacttacgatagaactttacaatttttacgtcgttctaaagaattacaacctgatattccaacaaaatcaagtttgatggttgggttaggtgaaacgatggaagaaatttatgaaacgatggatgatttacgcgctaatgatgttgatatcttaactataggtcaatatttacaaccgtctcgaaaacatttgaaagttgagaaatattatacgccattagaatttggtaaaatgagaaagattgcaatggaaaaaggatttaaacattgtcaagcaggacctttagtaagaagctcatatcatgctgatgagcaagtgaatgaagcagctaaagagaaacaacgccaaggtgaagaacaactcaattaa

SEQ ID NO: 1320 - protein, 183 aa, Artificial Sequence
  Description of Artificial Sequence: synthetic amino acid sequence
VYAETVRKVRERNPFTTIEILPSDMGGDYEALETLMASRPDILNHNIETVRRLTPRVRARATYDRTLQFLRRSKELQPDIPTKSSLMVGLGETMEEIYETMDDLRANDVDILTIGQYLQPSRKHLKVEKYYTPLEFGKMRKIAMEKGFKHCQAGPLVRSSYHADEQVNEAAKEKQRQGEEQLN

SEQ ID NO: 1321 - DNA, 390 bp, Artificial Sequence
  Description of Artificial Sequence: synthetic nucleic acid sequence
atgattaaagtcgaccaacaatattttgaattgatagaagaatatagagaatgttttgatgaggaaatattttcagctaggtattcggatatattagacaaatatgattatgtcgtaggtgactatggttacgatcaattacgcttaaaaggattttataaagatagtaataaaaaggcagaaataagtaaacgattttcaagtatacaagattatatactagaatattgtaattttggttgtccttattttgtagtcagacgattgtcaccaaatgaatttattgaagaaatagatgataaagaagatatcattgataaattacatgatgttaagattcaacctactattcaagacacagaaaaacatacccaagctatagatcaatag

SEQ ID NO: 1322 - protein, 129 aa, Artificial Sequence
  Description of Artificial Sequence: synthetic amino acid sequence
MIKVDQQYFELIEEYRECFDEEIFSARYSDILDKYDYVVGDYGYDQLRLKGFYKDSNKKAEISKRFSSIQDYILEYCNFGCPYFVVRRLSPNEFIEEIDDKEDIIDKLHDVKIQPTIQDTEKHTQAIDQ

SEQ ID NO: 1323 - DNA, 897 bp, Artificial Sequence
  Description of Artificial Sequence: synthetic nucleic acid sequence
atgtgggaacacgatttaacgcccatgtctagagaatcatttcttgctaacgttgaagatgcaacagcatgtgtgatcacattgagtgagcatattgatgaagaagtatttctcagggcacaacaacttaaagtgattgctaatatggcagtaggttttgacaatattgatatttcattagcaaagaaacatggtgtagttgttaccaatacacctcacgtactgacagagacaactgccgaactagggtttacattgatgcttactgtagctcgtagaatcattgaagcgacatcatatattcaagagggtaagtggaaaagttggggaccctacttattatcaggaaaagatgtatacggtgcaactgttggtatttttggaatgggtgatataggaaaagcgtttgcacgtcgcttacaagggtttgatgcacggataatatatcacaatcgcaaacgtgacttaaatgctgaaagagatttaaatgctacatatgtaacgtttaaatctttacttgaacaaagtgattttattatttgcacagcacctttaactaaggaaactgagaatcaatttgatgctcgagcttttaataaaatgaaaaatgatgctgtcttcattaatattggaagaggtgaaattgtagatgaagaagcacttttagaagcattaaaaaatcatgagatacaagcctgtggtttagatgttacgcgtcaagaacctattcaacctaatcatccaatactgaaattacctaacgctgtggtgttacctcacataggaagtgcatcccaagtcactagaaatcgaatggtacaactttgtatagataatattaaagcagtattaaataatgatgcaccaataaccccaataacctctttacacttttaa

SEQ ID NO: 1324 - protein, 298 aa, Artificial Sequence
  Description of Artificial Sequence: synthetic amino acid sequence
MWEHDLTPMSRESFLANVEDATACVITLSEHIDEEVFLRAQQLKVIANMAVGFDNIDISLAKKHGVVVTNTPHVLTETTAELGFTLMLTVARRIIEATSYIQEGKWKSWGPYLLSGKDVYGATVGIFGMGDIGKAFARRLQGFDARIIYHNRKRDLNAERDLNATYVTFKSLLEQSDFIICTAPLTKETENQFDARAFNKMKNDAVFINIGRGEIVDEEALLEALKNHEIQACGLDVTRQEPIQPNHPILKLPNAVVLPHIGSASQVTRNRMVQLCIDNIKAVLNNDAPITPITSLHF

SEQ ID NO: 1325 - DNA, 627 bp, Artificial Sequence; identical to SEQ ID NO: 693
  Description of Artificial Sequence: synthetic nucleic acid sequence

SEQ ID NO: 1326 - protein, 208 aa, Artificial Sequence; identical to SEQ ID NO: 694
  Description of Artificial Sequence: synthetic amino acid sequence

SEQ ID NO: 1327 - DNA, 1113 bp, Artificial Sequence; identical to SEQ ID NO: 695
  Description of Artificial Sequence: synthetic nucleic acid sequence

SEQ ID NO: 1328 - protein, 370 aa, Artificial Sequence; identical to SEQ ID NO: 696
  Description of Artificial Sequence: synthetic amino acid sequence

SEQ ID NO: 1329 - DNA, 978 bp, Artificial Sequence; identical to SEQ ID NO: 697
  Description of Artificial Sequence: synthetic nucleic acid sequence

SEQ ID NO: 1330 - protein, 325 aa, Artificial Sequence; identical to SEQ ID NO: 698
  Description of Artificial Sequence: synthetic amino acid sequence

SEQ ID NO: 1331 - DNA, 1302 bp, Artificial Sequence
  Description of Artificial Sequence: synthetic nucleic acid sequence
gtggcatttgaatttagattacccgatatcggggaaggtatccacgaaggtgaaattgttaaatggtttattaaagccggcgatacaattgaagaagatgatgtattagcagaagttcaaaatgataaatctgtagtagaaattccttctccagtaagtggtactgttgaagaagtgttagtagatgaaggaacagtggcagtagtaggagatgtcatcgttaaaattgatgcacctgatgcagaagaaatgcaatttaaaggtcatggcgatgatgaggattctaagaaagaagaaaaagaacaagaatcaccagtgcaagaagaagcttcatcaactcaatcacaagaaaagacagaagtagatgaaagtaaaactgttaaagcgatgccgtcagtgcgtaagtatgcacgtgaaaatggtgtcaatattaaagctgtaaatggttctggtaaaaatggacgaatcacaaaagaagacatcgatgcatacttaaatggtggtagttccgaagaaggttcaaacactagcgcagcatctgaatcaacttctagtgatgtcgttaatgcttctgcaacacaagcattaccagaaggcgacttccctgaaactacagaaaaaatacctgcaatgcgcaaagcaattgctaaagcaatggttaattctaaacacactgcacctcatgttacattaatggatgaaattgatgtgcaagaattatgggatcaccgtaagaaatttaaagaaattgctgctgaacaaggtacaaaacttactttcttaccatatgttgttaaagcattagtttctgcacttaaaaaatatccagcacttaatacttctttcaatgaagaagctggagaggttgtacacaaacattactggaatattggtattgctgcagatacggataaaggattattagtaccagtagttaaacatgccgatcgtaaatcaatattcgaaatttctgatgaaattaatgaactagctgtaaaagcacgtgatggtaaattaacttcagaagaaatgaaaggtgcaacatgcacaattagtaatatcggttccgctggtggacaatggttcactccagttatcaatcacccagaagtagctatcttaggaattggccgtatcgctcaaaaacctatcgttaaagatggagaaattgtagctgcaccagtgttagctttatcattaagctttgaccatagacaaatcgatggtgctactggacaaaatgctatgaatcacattaaacgcttattaaataatccagaattattattaatggaggggtaa

SEQ ID NO: 1332 - protein, 433 aa, Artificial Sequence
  Description of Artificial Sequence: synthetic amino acid sequence
VAFEFRLPDIGEGIHEGEIVKWFIKAGDTIEEDDVLAEVQNDKSVVEIPSPVSGTVEEVLVDEGTVAVVGDVIVKIDAPDAEEMQFKGHGDDEDSKKEEKEQESPVQEEASSTQSQEKTEVDESKTVKAMPSVRKYARENGVNIKAVNGSGKNGRITKEDIDAYLNGGSSEEGSNTSAASESTSSDVVNASATQALPEGDFPETTEKIPAMRKAIAKAMVNSKHTAPHVTLMDEIDVQELWDHRKKFKEIAAEQGTKLTFLPYVVKALVSALKKYPALNTSFNEEAGEVVHKHYWNIGIAADTDKGLLVPVVKHADRKSIFEISDEINELAVKARDGKLTSEEMKGATCTISNIGSAGGQWFTPVINHPEVAILGIGRIAQKPIVKDGEIVAAPVLALSLSFDHRQIDGATGQNAMNHIKRLLNNPELLLMEG

SEQ ID NO: 1333 - DNA, 1268 bp, Artificial Sequence
  Description of Artificial Sequence: synthetic nucleic acid sequence
atggtagttggagatttcccaattgaaacagatactattgtaataggagcaggtccaggtggatatgtcgcagccattcgcgcggctcaattaggacaaaaggtaacaatcgttgagaaaggtaatttaggtggtgtatgcttaaacgttggttgtataccttcaaaagcattactacatgcttctcatcgctttgttgaagcgcaaaattcagaaaacttaggggtaattgctgaaagcgtttcgttaaactatcaaaaagttcaagaattcaagacttctgtagttaataaattaactggcggtgttgaaggacttttaaaaggtaacaaagtagagattgttagaggtgaagcttatttcgttgataacaatagtttacgtgtcatggacgaaaagagtgctcaaacttacaatttcaaacatgcgattatagctacaggttcaagaccaattgaaattccaaattttgaatttggtaaacgtgttatcgattcaacaggagctttaaatctacaagaagtacctaacaaactagttgtagttggtggcggatatatcggttctgaattaggtactgcttttgcaaactttggctctgaagttactatccttgaaggtgcaaaagatattttaggcggatttgaaaagcaaatgacacaacctgttaaaaaaggtatgaaagaaaaaggtatcgaaatcgttactgaagcaatggcaaaatctgcagaagaaactgaaaatggtgtcaaagtaacttatgaggcaaaaggtgaggaacaaactatcgaagctgattatgtattagttacagttggccgtcgccctaatactgatgaattaggattagaagaacttggtctgaaatttgctgatcgtggattactagaagtggacaaacaaagtcgtacttctattgaaaatatctttgcgattggagatattgtacctggattaccattagctcacaaagctagttatgaaggtaaagttgctgctgaagcgatagatggtcaagccgcagaggtagactatattggtatgccagcagtttgctttacagaaccagaattagcacaagttggttatactgaagctcaagcaaaagaagaaggtttatcaattaaagcttctaaattcccttatgcagctaatggacgagctttatcattagatgatacaaatggttttgttaagttaattacacttaaagaagatgatacgcttattggagcacaagttgtaggtactggcgcatctgatattat

SEQ ID NO: 1334 - protein, 423 aa, Artificial Sequence
  Description of Artificial Sequence: synthetic amino acid sequence
  MOD_RES (423): variable amino acid
MVVGDFPIETDTIVIGAGPGGYVAAIRAAQLGQKVTIVEKGNLGGVCLNVGCIPSKALLHASHRFVEAQNSENLGVIAESVSLNYQKVQEFKTSVVNKLTGGVEGLLKGNKVEIVRGEAYFVDNNSLRVMDEKSAQTYNFKHAIIATGSRPIEIPNFEFGKRVIDSTGALNLQEVPNKLVVVGGGYIGSELGTAFANFGSEVTILEGAKDILGGFEKQMTQPVKKGMKEKGIEIVTEAMAKSAEETENGVKVTYEAKGEEQTIEADYVLVTVGRRPNTDELGLEELGLKFADRGLLEVDKQSRTSIENIFAIGDIVPGLPLAHKASYEGKVAAEAIDGQAAEVDYIGMPAVCFTEPELAQVGYTEAQAKEEGLSIKASKFPYAANGRALSLDDTNGFVKLITLKEDDTLIGAQVVGTGASDIX

SEQ ID NO: 1335 - DNA, 528 bp, Artificial Sequence
  Description of Artificial Sequence: synthetic nucleic acid sequence
atgattagtgtgcattatcgtagcccaataaactacaatttagaattagtaggtgcggcgcgaagtggtcttgaacgtatacgtaatagctacaagttaattgaggaaagagaacaaattgcctcagatttggaagaacaatcagaatatatacaacaaatagataaaatactaaatcaatttgaaacggtaatggatgatgactttaatactgctaatgcagtaactgcatggtatgacttagctaaacttgcaaataaatatgtattagaaaatacaacttcaacaaaagttttaaatagatttaaagaagtgtacagcatttttagtgacgtccttggtgtaccacttaagagtaaagaaactgaagagttactagatgaagacattgaacaattgattgaggagcgtaatgaagcacgtaaaaataaagatttcgctcgagcagatgaaattagagatatgttaaaagcacgtcatatcattttagaagataccccccaaggtgtaagatttaaacgtggctaa

SEQ ID NO: 1336 - protein, 175 aa, Artificial Sequence
  Description of Artificial Sequence: synthetic amino acid sequence
MISVHYRSPINYNLELVGAARSGLERIRNSYKLIEEREQIASDLEEQSEYIQQIDKILNQFETVMDDDFNTANAVTAWYDLAKLANKYVLENTTSTKVLNRFKEVYSIFSDVLGVPLKSKETEELLDEDIEQLIEERNEARKNKDFARADEIRDMLKARHIILEDTPQGVRFKRG

SEQ ID NO: 1337 - DNA, 387 bp, Artificial Sequence
  Description of Artificial Sequence: synthetic nucleic acid sequence
atgaacgtaaaacttcttaatcctttaacattggcatatatgggtgatgcagtacttgatcaacatgtgcgtgaatatatcgtgctaaaattacaaagtaaacctcctcgtttgcaccaagtatcgaaaagttacgtttcagcgaaaagtcaagctaagactttagagtatttgttagatattgactggtttacagaggaagagctaagtgttttaaaacgaggacgtaacgctaaaagttatacaaaagctaaaaatactgacattcaaacttatcgtaaaagttcagcgttagaagctgttatcggatttttatatttagaccatcaatcagaacgattagaaaacttattagaaacaattgttaggatagtggatgaaaggtag

SEQ ID NO: 1338 - protein, 128 aa, Artificial Sequence
  Description of Artificial Sequence: synthetic amino acid sequence
MNVKLLNPLTLAYMGDAVLDQHVREYIVLKLQSKPPRLHQVSKSYVSAKSQAKTLEYLLDIDWFTEEELSVLKRGRNAKSYTKAKNTDIQTYRKSSALEAVIGFLYLDHQSERLENLLETIVRIVDER

SEQ ID NO: 1339 - DNA, 576 bp, Artificial Sequence
  Description of Artificial Sequence: synthetic nucleic acid sequence
atgaatctgaataaacagcaacatgaatatacagcactgtgtctatcgcaaacagaaaataaatcttctgaagaactatttgagtctttaatagaagagctaaagccactgatttacaataaaataaggtatatctcccataataagtatgacattgaagacatgtatcaagagattgttattaaattctaccgtgccttgcaaaaattcgactatcaacaaggtgtaccaatagaacactatatttattttttaattcgttcggttaaatatgactatcttagaaaagtaaaagcgaattataaacgtcaacctctacttgttaatgaatacattgttgaatataacgctactttggcattaaacgatatagaaagatcgataattagaaaagaattaacattagcttttaaaagaagcgaagtcaaactcagtcgaatggaaagacgtatcattcgattactacttaatgattacaagccaaaggagattgctatggttttaaatttggaatccaaagttgtttataatgcgattcaacgtagtaaatgtaaacttaaaagaagttttgaataa

SEQ ID NO: 1340 - protein, 191 aa, Artificial Sequence
  Description of Artificial Sequence: synthetic amino acid sequence
MNLNKQQHEYTALCLSQTENKSSEELFESLIEELKPLIYNKIRYISHNKYDIEDMYQEIVIKFYRALQKFDYQQGVPIEHYIYFLIRSVKYDYLRKVKANYKRQPLLVNEYIVEYNATLALNDIERSIIRKELTLAFKRSEVKLSRMERRIIRLLLNDYKPKEIAMVLNLESKVVYNAIQRSKCKLKRSFE

SEQ ID NO: 1341 - DNA, 600 bp, Artificial Sequence
  Description of Artificial Sequence: synthetic nucleic acid sequence
gtgaatgtggaagatatagtgatagtaggtagacacgcagttaaagaagcaattatatcaggtcacgccataaataagattttgattcaagacggtataaaaaagcaacaaattaacgacattttaaaaaatgcaaaatcacaaaaattaattgtacaaacggtaccaaaatctaaattagattttttagcaaatgcacctcaccagggtgtggctgctttagtagccccatatgaatatgcaaacttcgatgaatttttacaaaaacaaaagaaaaaagcccgttattcaactgttatcattttagatggtttagaagacccgcataatcttggctctatattaagaacagcagatgcttctggtgttgatgcggttattatacctaaaagacgatcagttgcgctaacacagaccgttgcaaaagcttctacaggagcgattcagcatgttccggttataagggttactaatctttcgaaaactatcgacgaattaaaagacaacggcttttggattgcggggacagaagctaataatgcaacggattatagactaagaagaatatcactgttgatacaactattattgtatatttaa

SEQ ID NO: 1342 - protein, 199 aa, Artificial Sequence
  Description of Artificial Sequence: synthetic amino acid sequence
VNVEDIVIVGRHAVKEAIISGHAINKILIQDGIKKQQINDILKNAKSQKLIVQTVPKSKLDFLANAPHQGVAALVAPYEYANFDEFLQKQKKKARYSTVIILDGLEDPHNLGSILRTADASGVDAVIIPKRRSVALTQTVAKASTGAIQHVPVIRVTNLSKTIDELKDNGFWIAGTEANNATDYRLRRISLLIQLLLYI

SEQ ID NO: 1343 - DNA, 303 bp, Artificial Sequence
  Description of Artificial Sequence: synthetic nucleic acid sequence
atgactaaagtaacacgtgaagaagttgaacatattgctaatttagctagacttcaaatttctcctgaagaaacagaagaaatggctaatactttagaaagtattttagattttgcgaaacaaaatgatagtgccgatacagaaggtattgagccaacttatcacgtattagatttacaaaacgtattacgtgacgataaagcaatcgagggcattcctcaagaattagcattgaaaaatgcgaaagaaactgaagatggtcaatttaaagtgccatccatcatgaatggggaggacgcttaa

SEQ ID NO: 1344 - protein, 100 aa, Artificial Sequence
  Description of Artificial Sequence: synthetic amino acid sequence
MTKVTREEVEHIANLARLQISPEETEEMANTLESILDFAKQNDSADTEGIEPTYHVLDLQNVLRDDKAIEGIPQELALKNAKETEDGQFKVPSIMNGEDA

SEQ ID NO: 1345 - DNA, 1458 bp, Artificial Sequence
  Description of Artificial Sequence: synthetic nucleic acid sequence
atgagtattcgttttgaatctatcgaaaaattaactgaattaatcaaaaataaagaaattaaaccttctgatgtagtaaaagatatatacgcagctattgaagaaactgatccaacaatcaagtcattcttagctttagataaagaaaatgcaataaaaaaagccgaagaattagatgaattacaagctaaagatcaaatggatggtaaactatttggaattcctatgggaatcaaagataatatcatcacaaaagatgtagaaactacatgtgcaagtaaaatgttagaaggatttgtacctatttatgaatcaactgtaatgaacaaactacatgatgaaaacgcggttttaattggtaaattaaacatggatgagtttgcaatgggtggctctacagagacttcatattttaagaaaacattaaatcctttcgatcacacagcagtaccaggaggatcttcaggtggttctgcagcagcggttgcagcaggtttagttccttttagtttagggtcagacactggtggttctattagacaacctgcatcttattgtggcgttgttggtatgaaaccaacttatggccgtgtatcacgtttcggtttagttgcatttgcttcttctttagatcaaattggaccaatcacgcgtaatgttaaagataacgcattagtacttgaggcaatttccggtgttgatgcgaatgattctacaagcgcacctgttgatgatgtagattttacttctgatattggtaaagatattaaaggtcttaaaattgcattacctaaagaatatttaggtgagggtgtaagtgaagaagttaagacttctgtaaaagaagcggttgaaacgttaaaatcacttggtgctgaagttgacgaagtctcattaccaaatacaaaatatggtattccatcatattatgttattgcgtcatcagaggcttcagcaaatttagcgcgatttgatggtattagatatggatatcattctaaagaagcacaatcgttagaagaattatataaaatgtctagatcggaaggctttggtgaagaagtcaaaagacgtatcttcttaggtacttttgctttaagctcaggttattacgatgcatactataaaaaatctcaaaaagttagaacgttaattaaaaatgattttgacaaagtatttgaatcttatgatgttgtggttggaccgacagcacctacaacagcatttaatattggcgaagaaattgatgatcctttaacaatgtatgcgaatgacttattaactacaccagttaatcttgccggtttacctggtatttcagttccttgtggacaatcaaacggacgcccaattggtttacaattaattggtaaaccttttgacgaaaaaacgttatatcgtgtcgcttatcaatttgaaacacaatacaacttacatgacgcatacgaaaatttataa

SEQ ID NO: 1346 - protein, 485 aa, Artificial Sequence
  Description of Artificial Sequence: synthetic amino acid sequence
MSIRFESIEKLTELIKNKEIKPSDVVKDIYAAIEETDPTIKSFLALDKENAIKKAEELDELQAKDQMDGKLFGIPMGIKDNIITKDVETTCASKMLEGFVPIYESTVMNKLHDENAVLIGKLNMDEFAMGGSTETSYFKKTLNPFDHTAVPGGSSGGSAAAVAAGLVPFSLGSDTGGSIRQPASYCGVVGMKPTYGRVSRFGLVAFASSLDQIGPITRNVKDNALVLEAISGVDANDSTSAPVDDVDFTSDIGKDIKGLKIALPKEYLGEGVSEEVKTSVKEAVETLKSLGAEVDEVSLPNTKYGIPSYYVIASSEASANLARFDGIRYGYHSKEAQSLEELYKMSRSEGFGEEVKRRIFLGTFALSSGYYDAYYKKSQKVRTLIKNDFDKVFESYDVVVGPTAPTTAFNIGEEIDDPLTMYANDLLTTPVNLAGLPGISVPCGQSNGRPIGLQLIGKPFDEKTLYRVAYQFETQYNLHDAYENL

SEQ ID NO: 1347 - DNA, 1437 bp, Artificial Sequence
  Description of Artificial Sequence: synthetic nucleic acid sequence
gtggaaatcatgcattttgaaacagtaatcggacttgaagttcatgttgagttaaaaacggactcaaaaatgttctctccatcacccgcacattttggagctgaaccaaattcaaatacaaatgttatcgacttagcttatccaggtgtattaccagtagttaatagacgtgcagtagattgggcaatgagagcttcaatggcattaaatatggatattgctacaaattcaaaatttgatcgtaaaaactatttctatccagataatccaaaagcatatcaaatttctcagtttgatcaacctattggagaaaatggctatattgatattgaagttgatggagaaacaaaacgtatcggtattacacgtcttcatatggaagaagatgcaggtaaatcaacacataaagatggttattctctagtagacttaaaccgtcaaggtacgccattaattgaaattgtatctgaacccgatattcgttcacctaaagaagcatatgcttatctagaaaaactacgttcaatcattcaatatacaggtgtatctgattgtaaaatggaagagggatccctacgttgtgatgctaatatttcacttcgtccatatggtcaaaaggaatttggtacaaaaactgaattgaaaaaccttaactcatttaactacgttaaaaaaggtttagaatatgaagagaaacgtcaagaagaagaattattaaatggtggagagattggtcaagaaacacgtcgatttgatgaatctactggtaaaacaattttaatgcgtgtgaaagaaggttcagatgattatagatatttccctgaaccagatattgtaccattatatgtagatgaagattggaaagcacgtgtaagagaaacaattccagaattgccagatgaacgtaaagctaaatacgtaaatgatcttggactaccagaatatgatgcgcatgtattaacattaactaaagaaatgtctgatttctttgaaggcgcaattgaccatggtgcagatgttaaacttacttccaactggttaatgggaggtgttaacgagtatcttaataaaaatcaagttgaattaaaagatacgcaactaacacctgaaaatttagctggtatgattaaattaatagaagacggaacaatgagtagtaaaatcgctaaaaaagtttttccagaactagcagaaaatggtggagatgctaaacaaattatggaagataaaggtttagtacaaatttctgatgaagcaacactacttaaatttgtaacagatgcattagataataatccacaatcaatagaagattataaaaatggtaaaggtaaagctatgggattcttagtgggccaaattatgaaagcttctaaaggtcaagctaacccacaaaaagttaatagcctattaaaacaagaattagataaccgttaa

SEQ ID NO: 1348 - protein, 478 aa, Artificial Sequence
  Description of Artificial Sequence: synthetic amino acid sequence
VEIMHFETVIGLEVHVELKTDSKMFSPSPAHFGAEPNSNTNVIDLAYPGVLPVVNRRAVDWAMRASMALNMDIATNSKFDRKNYFYPDNPKAYQISQFDQPIGENGYIDIEVDGETKRIGITRLHMEEDAGKSTHKDGYSLVDLNRQGTPLIEIVSEPDIRSPKEAYAYLEKLRSIIQYTGVSDCKMEEGSLRCDANISLRPYGQKEFGTKTELKNLNSFNYVKKGLEYEEKRQEEELLNGGEIGQETRRFDESTGKTILMRVKEGSDDYRYFPEPDIVPLYVDEDWKARVRETIPELPDERKAKYVNDLGLPEYDAHVLTLTKEMSDFFEGAIDHGADVKLTSNWLMGGVNEYLNKNQVELKDTQLTPENLAGMIKLIEDGTMSSKIAKKVFPELAENGGDAKQIMEDKGLVQISDEATLLKFVTDALDNNPQSIEDYKNGKGKAMGFLVGQIMKASKGQANPQKVNSLLKQELDNR

SEQ ID NO: 1349 - DNA, 951 bp, Artificial Sequence
  Description of Artificial Sequence: synthetic nucleic acid sequence
atgagaaaacgtgcaagaattatatataatccaacatcaggaaaagaactttttaaacgtgtattaccagatgcactgattaaacttgagaaggcaggttatgaaacgagtgcatatgcaactgaaaaaattggtgatgctacttttgaagctgaaagagcactagaaagtgaatatgatttactcattgcagctggaggtgacggtacgttaaatgaggtggtcaacggaatcgccgaacaacccaatcggcctaaattaggtgtaataccaatgggcaccgttaatgactttggaagagcacttcatttaccaagcgatataatgggggcgattgatgtaatcattgatggtcacacaaccaaggtagatattggaaagatgaataatcgttatttcattaacctagctgcaggggggaaactaacacaagtatcttatgaaacaccaagtaagttgaaatcaattgtaggaccgttcgcgtattacattaaaggattcgaaatgttacctcaaatgaaagcagtagatgtacgtatcgaatatgatgataacatcttccaaggagaagctttactattccttttaggtttaacgaattcaatggctggctttgaaaaattagttccagatgcgaagcttgacgacggttatttcacgttaattattgtagaaaaagcaaatcttgctgaattgggtcatattatgacactagcgtctcgaggtgagcatacaaaacatcctaaagtcatttatgctaaagcgaagtctattaatatttcatcatttactgatatgcaacttaatgttgatggtgaatacggtgggaaattacctgcaaatttccttaatttagaacagcacatagaaatttttacacctaaagatgtatttaacgaagaactattagaaaatgatacgataactgatattacgcctgataagcaataa

SEQ ID NO: 1350 - protein, 316 aa, Artificial Sequence
  Description of Artificial Sequence: synthetic amino acid sequence
MRKRARIIYNPTSGKELFKRVLPDALIKLEKAGYETSAYATEKIGDATFEAERALESEYDLLIAAGGDGTLNEVVNGIAEQPNRPKLGVIPMGTVNDFGRALHLPSDIMGAIDVIIDGHTTKVDIGKMNNRYFINLAAGGKLTQVSYETPSKLKSIVGPFAYYIKGFEMLPQMKAVDVRIEYDDNIFQGEALLFLLGLTNSMAGFEKLVPDAKLDDGYFTLIIVEKANLAELGHIMTLASRGEHTKHPKVIYAKAKSINISSFTDMQLNVDGEYGGKLPANFLNLEQHIEIFTPKDVFNEELLENDTITDITPDKQ

SEQ ID NO: 1351 - DNA, 1419 bp, Artificial Sequence
  Description of Artificial Sequence: synthetic nucleic acid sequence
atgccacacattatattcctaacctttttgtatgtgggagggaaaaaattggaaacaattaagaaaaacgaagttaaaacgggaaaggttattgatttaactcatgagggacacggagttgttaaagttgatcgatatccaatttttattcctaatgctttaattgatgaagaaattaaatttaaattaattaaagtgaaaaagaattttgctataggaaaattgatagaggtcataagtgaaagtgatgatagagtgacaccaccttgtatttattatgcaaagtgtggtggttgtcaattacaacatatgacatatagagcgcaattggatatgaaaagagaacaagtagttaatctttttcatagaaaaggcccttttgagaatacggttataaaggaaactattggcatggtcaatccctggcgataccgtaataaatctcaaattcctgtaggtcaaagtaactcgaatcaagttataatgggattctatagacaacgtagccatgacattatagatatggatagttgtcttatacaagatagacaacatcaagaagtaatgaatcgagtgaagtactggctcaatgaattaaatatatctatatataacgaaaaaacaaaaacaggtttaatacgtcatttagtagtaaggactggttatcataccgatgaaatgatggttatctttgttacaaatggagcaacatttaaacaatcagaactattagtaaacaagctaaaaaaagaatttccaaatataacaagtattaaacagaatataaacaatagccattctaatgttataatggggcgtcaatcaatgactttatatggtaaagataaaattgaagaccaattaagtgaagtaacttatcatatttctgatttatcattttaccaaattaactcatcacaaactgaaaaactttatcagcaagctctgaattatgctcaattaacaggaaaagaaatagtattggatacgtattgtggtataggaacgattggtctatatatggcaccactagcaaaacatgtttatggtgtagaagttgttccgcaagccataaaagatgcggaagacaatgcgactaaaaaccaacttaaaaatacgactttcgaatgtggaaaagcagaagatgttatcttaacatggaaatcacaagggattaaaccaggcgtagtcatggtagatccacctagaaaaggatgcgatgaaactttcttaactactcttttaaaattaaatccgaaaaggattgtttatatatcatgtaacccttcaacgcaacaaagagatgcgcaaatattggctgaacaatacgagttagtagaaattacaccagttgatatgttcccacaaacaactcatattgagactgtagcattatttgtacgtaaagacgaagaatga

SEQ ID NO: 1352 - protein, 472 aa, Artificial Sequence
  Description of Artificial Sequence: synthetic amino acid sequence
MPHIIFLTFLYVGGKKLETIKKNEVKTGKVIDLTHEGHGVVKVDRYPIFIPNALIDEEIKFKLIKVKKNFAIGKLIEVISESDDRVTPPCIYYAKCGGCQLQHMTYRAQLDMKREQVVNLFHRKGPFENTVIKETIGMVNPWRYRNKSQIPVGQSNSNQVIMGFYRQRSHDIIDMDSCLIQDRQHQEVMNRVKYWLNELNISIYNEKTKTGLIRHLVVRTGYHTDEMMVIFVTNGATFKQSELLVNKLKKEFPNITSIKQNINNSHSNVIMGRQSMTLYGKDKIEDQLSEVTYHISDLSFYQINSSQTEKLYQQALNYAQLTGKEIVLDTYCGIGTIGLYMAPLAKHVYGVEVVPQAIKDAEDNATKNQLKNTTFECGKAEDVILTWKSQGIKPGVVMVDPPRKGCDETFLTTLLKLNPKRIVYISCNPSTQQRDAQILAEQYELVEITPVDMFPQTTHIETVALFVRKDEE

SEQ ID NO: 1353 - DNA, 549 bp, Artificial Sequence
  Description of Artificial Sequence: synthetic nucleic acid sequence
gtgaatgtgcataaaatagatttatcaggcaacaaatttcaaatccaacgatttgttctgttgcaaattgtattggcgctatttacaatactatttacttataaatgggcttatcaaacaacgcatatcattgaacaaaatcttgtcatgaatcttatttttggatttgtaggtttcgcagtactagttattttgcacgagtttattcatcgtattttgttcattatattttctaaaggtgaaaaaccatctttaaaatatgataaaaacaaaattattgtacagttctctcagacttgttttcatcggtggcaatttacaattatcatgatagcaccacttgttatcataagtgcgaccttactagcacttattcaaatatattccttctcatctttaatctttatgtttagtatacatacaagttattgtatgatagatgtgtttttagtagcattggcattacaaagcaaattcaaatacatacaaacctatggagaaggtttgtatctttatcatcaaaagcctactcaaacctattatgaataa

SEQ ID NO: 1354 - protein, 182 aa, Artificial Sequence
  Description of Artificial Sequence: synthetic amino acid sequence
VNVHKIDLSGNKFQIQRFVLLQIVLALFTILFTYKWAYQTTHIIEQNLVMNLIFGFVGFAVLVILHEFIHRILFIIFSKGEKPSLKYDKNKIIVQFSQTCFHRWQFTIIMIAPLVIISATLLALIQIYSFSSLIFMFSIHTSYCMIDVFLVALALQSKFKYIQTYGEGLYLYHQKPTQTYYE

SEQ ID NO: 1355 - DNA, 1125 bp, Artificial Sequence
  Description of Artificial Sequence: synthetic nucleic acid sequence
atgaaaattgtacataccgctgattggcatctgggtaaaattttaaatggaaaacaattgcttgaagatcaaaaatatattttaactcagtttaaacaacatatggagaaagaacagccagatttaatagtaattgcaggtgatttgtatgatacctcatatccaagtaaagaagcgataggtttacttgaagagactattgaatacctaaatatagaacttaaaattccaataatcatgataagcggtaaccatgatggtagggagagattgaattatggctctaaatggtttgagaataatcaactttacataagaactcaactagaaaatattgatgatccaatagaattgagtggtgttcaatttttcactttacctttcgcaactgtgagtgaagtacaaaattattttaaggataagcaaatagaaacatatcaacaagcattaaacgaatgcttagagcaaatgtctagttccatagataataataaggtgaatatattaattggtcatttaactattgagggcggtaaaacttcagattcggaaagaccattaactattggaacagtagaatcagttgatatgcattcttttcggttgtttgattatgtaatgctcgggcacctacatcatccatttagtataaataactcttttatcaaatatagcggttcgattttgcaatactctttctctgaagtaaatcaatctaaaggatatagagttcttgatattgaaaacaaccaactattaaatgaaaccttcgttcctttaaaacctctaagagaactagaagttattgaaggtgattatgaggatattattcaagaaagaattaaagtaaaaaataaaaataattattttcattttaagttaacgaatgtttctcatattactgatccaatgatgaaactgaaacaaatttatcccaatatattagcactatcgaatgtagtatttgatcatagtgagaattttagccatgttgaaatcaaaaaacaagatgatcagacaattatagaaaatttttataaaaatatgacagatcaacatctgagtcaagttcaatcagacaaaataaagcacttgttaagttttatattggatagggaggggtaa

SEQ ID NO: 1356 - protein, 374 aa, Artificial Sequence
  Description of Artificial Sequence: synthetic amino acid sequence
MKIVHTADWHLGKILNGKQLLEDQKYILTQFKQHMEKEQPDLIVIAGDLYDTSYPSKEAIGLLEETIEYLNIELKIPIIMISGNHDGRERLNYGSKWFENNQLYIRTQLENIDDPIELSGVQFFTLPFATVSEVQNYFKDKQIETYQQALNECLEQMSSSIDNNKVNILIGHLTIEGGKTSDSERPLTIGTVESVDMHSFRLFDYVMLGHLHHPFSINNSFIKYSGSILQYSFSEVNQSKGYRVLDIENNQLLNETFVPLKPLRELEVIEGDYEDIIQERIKVKNKNNYFHFKLTNVSHITDPMMKLKQIYPNILALSNVVFDHSENFSHVEIKKQDDQTIIENFYKNMTDQHLSQVQSDKIKHLLSFILDREG

SEQ ID NO: 1357 - DNA, 1752 bp, Artificial Sequence
  Description of Artificial Sequence: synthetic nucleic acid sequence
atggagaactttggcccttttattaaagaaactattgattttgagcaagttgaaactgatcaactctttttaattagtggtaaaactggatctggtaaaacaatgatttttgatgctatagtatacgcattatacggtatggcttcgaccaaaactagaaaagaaggagatttaagaagtcattttgcagacggtaaatcgccaatgtctgtaatttatcaatttaaagttaataatcaaacttttaaaattcatagagaagcgccatttattaaagaggggaatataactaaaacacaagccaagttaaatatatatgaattagttgataatcaatttgaattaagagaaagtaaagtgaatcaaggtaatcaatttatcgtacaattattaggcgttaatgctgaacaatttcgtcaattatttattttgcctcaaggagaatttaaaaagtttcttcagtcaaatagtaaagacaaacaatcgattcttagaacactttttaatagtgagcgatttgatgagattagacatctacttgtagaaaatgtaaagcaagaaaaagtacaaattgaaaatagatacactcaaattgaaaatttatggaatgatatagatacatttaataatgatgaattggccttatataaagaattagagagttctcagacagataaaatgattgaaaaattcccacaatttaatgattatggatgcaaaattctcaagtcatttgaagaagctaagaataaaataactaaggaattagatgatttaaatcataaatataaagtgaatgttgaattaagtgagaatactaaaaaattaaaagcggaaaaaatcaaatttgacgatttgaaaaaagaacaaaattatattgataaattaaagcaagaattaaaaatgattcaggaatctaaagtattaatcacttattttactaggttacaaagtttaaaaaaagataaagatgaattagtgtcacttcatgagcaatcaaaattaaacgaaacaaactatcacaatgaaattaaaggttttcaaaaacaactcgaacatttatcaacacgagaaaatgaaataactcaatttaatcagtatctagaaaaaaaccaagttttcttcaatcaattagataagattattagtagttatcaacaaaaaccggtaattgaagaagaaataaaaagattatacagtgaatataatgatttaataaccaaaaaagaagaattgacgaaagaaatgaacaacaagaacaaagattttgcaattattgaacattacactgaagagatttataagctgaaaaagattatagatgaatctgaaagacaaaaaaaggatgagaaattatttgataaattacaactagataaatcatcttatcttagcaaattaaaagagaagaaagaacagttaaatgaaattgaatcatcaatcaccaatatagatgcgactttaattgatttgaatgacaaaaaggattttgtaaatgaaataaagtccgctatgtcaattggagatacctgtccaatttgtggtaatgaaatacattcattgggagaacatattgattttgaatcaattgctcaaaaaaataataaaataaaacggttagaaagtaagaaggtaaaaattcgtgatgaaataatcaaaatagaaactcgaattgaatctaacgctttacctccgcctaaaccaataacaacgtcaatgtttttttctttatattgtttaactatacgttga

SEQ ID NO: 1358 - protein, 583 aa, Artificial Sequence
  Description of Artificial Sequence: synthetic amino acid sequence
MENFGPFIKETIDFEQVETDQLFLISGKTGSGKTMIFDAIVYALYGMASTKTRKEGDLRSHFADGKSPMSVIYQFKVNNQTFKIHREAPFIKEGNITKTQAKLNIYELVDNQFELRESKVNQGNQFIVQLLGVNAEQFRQLFILPQGEFKKFLQSNSKDKQSILRTLFNSERFDEIRHLLVENVKQEKVQIENRYTQIENLWNDIDTFNNDELALYKELESSQTDKMIEKFPQFNDYGCKILKSFEEAKNKITKELDDLNHKYKVNVELSENTKKLKAEKIKFDDLKKEQNYIDKLKQELKMIQESKVLITYFTRLQSLKKDKDELVSLHEQSKLNETNYHNEIKGFQKQLEHLSTRENEITQFNQYLEKNQVFFNQLDKIISSYQQKPVIEEEIKRLYSEYNDLITKKEELTKEMNNKNKDFAIIEHYTEEIYKLKKIIDESERQKKDEKLFDKLQLDKSSYLSKLKEKKEQLNEIESSITNIDATLIDLNDKKDFVNEIKSAMSIGDTCPICGNEIHSLGEHIDFESIAQKNNKIKRLESKKVKIRDEIIKIETRIESNALPPPKPITTSMFFSLYCLTIR

SEQ ID NO: 1359 - DNA, 1074 bp, Artificial Sequence
  Description of Artificial Sequence: synthetic nucleic acid sequence
atgattacaattactttcatatttttgagaatagtgccaaaaggtaataccaacttctccattattatagatttatctcaagcagaagcggttatggattttatacgttccaaaactgatcgagcttctaaggttgcgatgaatcaaatagaaggacgtttaagtgacttaatcaagaaacaacgtcaatccatattagagatactcgcccaagttgaagttaacattgattatccagagtatgatgatgtagaagacgcaacgacggacttcttactagaacagtctaagcgtattaaagaagaaatcaatcagttacttgaaacaggagcacaaggtaaaataatgagagaagggttatctacagttattgtaggacgtcctaatgttgggaagtcttcgatgctaaataaccttattcaagataataaagcaattgtgactgaggtcgctggtacaacaagagacgtgttagaagaatatgtcaatgttagaggtgtcccgttacgacttgtagatactgcgggtattagggatactgaagatatcgtagagaagattggtgtagaacgttctaggaaagctttaagtgaagcagatttaattttatttgtgcttaataacaatgaacctctgacggaagatgatcaaactttattcgaagtcattaaaaatgaggatgttattgtaatcattaataaaacagatttagaacagcgattagatgttagcgaactaagagagatgattggtgatatgccacttatacaaacatcgatgcttaaacaagaaggtattgatgaattagaaatacaaattaaagatttattctttggtggcgaagtacaaaatcaagatatgacttatgtatctaattcacgtcacatttcattgttgaaacaagcgagacaatcaattcaagatgcgattgatgctgctgagtctggtatcccaatggatatggtacagattgatttaacacgtacttgggaaattctaggagaaattattggagaatcagcgagtgatgaattaatagatcaactatttagtcaattttgtttaggaaaataa

SEQ ID NO: 1360 - protein, 357 aa, Artificial Sequence
  Description of Artificial Sequence: synthetic amino acid sequence
MITITFIFLRIVPKGNTNFSIIIDLSQAEAVMDFIRSKTDRASKVAMNQIEGRLSDLIKKQRQSILEILAQVEVNIDYPEYDDVEDATTDFLLEQSKRIKEEINQLLETGAQGKIMREGLSTVIVGRPNVGKSSMLNNLIQDNKAIVTEVAGTTRDVLEEYVNVRGVPLRLVDTAGIRDTEDIVEKIGVERSRKALSEADLILFVLNNNEPLTEDDQTLFEVIKNEDVIVIINKTDLEQRLDVSELREMIGDMPLIQTSMLKQEGIDELEIQIKDLFFGGEVQNQDMTYVSNSRHISLLKQARQSIQDAIDAAESGIPMDMVQIDLTRTWEILGEIIGESASDELIDQLFSQFCLGK

SEQ ID NO: 1361 - DNA, 914 bp, Artificial Sequence
  Description of Artificial Sequence: synthetic nucleic acid sequence
gtggttcaagaatatgatgtagtagtcattggtgctggtcacgccggtattgaagcaggtctagcttcagctcgccggggtgctaaaacactgatgttaacaattaatttagataatattgctttcatgccatgtaatccatctgtaggtggtcctgcgaaaggaatcgttgtacgtgaaatagacgctttaggtggacaaatggcaaaaactattgataaaactcacattcaaatgcgtatgcttaatacaggtaaaggtccagctgttagagctttacgtgctcaagcagataaagtattatatcaacaagaaatgaagcgtgtacttgagaatgaggataatttagacatcatgcaaggtatggttgatgaactcattatagaagataatgaagttaaaggtgttcgtactaatattggtacagaatatcgttctaaagctgtcattattacaacaggtacattcttacgtggagaaattatactaggaaacttaaaatattctagtggccctaaccatcaattaccatctgtaactctagcggataatttaagaaaattaggatttgatatcgttagatttaaaacgggtacaccaccacgtgtaaatgcgagaaccatcgattattctaaaactgaaatccaaccaggtgatgatataggtcgagcgtttagttttgaaacaaccgaatttattttagatcaattaccttgttggttaacttatacaaatggagatacacatcaagtcattgatgataacttacatttatctgctatgtattccggtatgattaaaggtacaggtcctagatattgtccatcaattgaggataaatttgtccgctttaacgataaaccaagacatcaacttttcttagaacctgaaggacgtaatacgaatgaggtata

SEQ ID NO: 1362 - protein, 305 aa, Artificial Sequence
  Description of Artificial Sequence: synthetic amino acid sequence
  MOD_RES (305): variable amino acid
VVQEYDVVVIGAGHAGIEAGLASARRGAKTLMLTINLDNIAFMPCNPSVGGPAKGIVVREIDALGGQMAKTIDKTHIQMRMLNTGKGPAVRALRAQADKVLYQQEMKRVLENEDNLDIMQGMVDELIIEDNEVKGVRTNIGTEYRSKAVIITTGTFLRGEIILGNLKYSSGPNHQLPSVTLADNLRKLGFDIVRFKTGTPPRVNARTIDYSKTEIQPGDDIGRAFSFETTEFILDQLPCWLTYTNGDTHQVIDDNLHLSAMYSGMIKGTGPRYCPSIEDKFVRFNDKPRHQLFLEPEGRNTNEVX

SEQ ID NO: 1363 - DNA, 405 bp, Artificial Sequence; identical to SEQ ID NO: 493
  Description of Artificial Sequence: synthetic nucleic acid sequence

SEQ ID NO: 1364 - protein, 134 aa, Artificial Sequence; identical to SEQ ID NO: 494
  Description of Artificial Sequence: synthetic amino acid sequence

SEQ ID NO: 1365 - DNA, 675 bp, Artificial Sequence; identical to SEQ ID NO: 495
  Description of Artificial Sequence: synthetic nucleic acid sequence

SEQ ID NO: 1366 - protein, 224 aa, Artificial Sequence; identical to SEQ ID NO: 496
  Description of Artificial Sequence: synthetic amino acid sequence

SEQ ID NO: 1367 - DNA, 759 bp, Artificial Sequence; identical to SEQ ID NO: 497
  Description of Artificial Sequence: synthetic nucleic acid sequence

SEQ ID NO: 1368 - protein, 252 aa, Artificial Sequence; identical to SEQ ID NO: 498
  Description of Artificial Sequence: synthetic amino acid sequence

SEQ ID NO: 1369 - DNA, 354 bp, Artificial Sequence; identical to SEQ ID NO: 499
  Description of Artificial Sequence: synthetic nucleic acid sequence

SEQ ID NO: 1370 - protein, 117 aa, Artificial Sequence; identical to SEQ ID NO: 500
  Description of Artificial Sequence: synthetic amino acid sequence

SEQ ID NO: 1371 - DNA, 360 bp, Artificial Sequence
  Description of Artificial Sequence: synthetic nucleic acid sequence
atggaagcaacaaaaatgagagttaaaaataaatacttctctattacaccagatgtagtagagaaaatgaaagaagcagatatcaatcccgatatcttaagacaaagattagcttctggttggaagtttgaagatgcaatagaagcacctattggagtaagacgtagtgagtgggatagtttgaaacctaaagaggacgaaattgctagttataaagagagaatggagcaacgcagattacaagagttgaaacgtaagaaaccacatttattcacagtaaatcaaaaacactctcgtggtaaatggtgcacgtatcttatggagaatgacatctttcctagaaaggtggttagatcatga

SEQ ID NO: 1372 - protein, 119 aa, Artificial Sequence
  Description of Artificial Sequence: synthetic amino acid sequence
MEATKMRVKNKYFSITPDVVEKMKEADINPDILRQRLASGWKFEDAIEAPIGVRRSEWDSLKPKEDEIASYKERMEQRRLQELKRKKPHLFTVNQKHSRGKWCTYLMENDIFPRKVVRS

SEQ ID NO: 1373 - DNA, 405 bp, Artificial Sequence
  Description of Artificial Sequence: synthetic nucleic acid sequence
atgcatggacttaacggtgtggaagttacagcaaaggttaaaaatgtatatcgtttagttcattcaagacgtggtgcggctaaatgggttgctgatgtaaaagcgattgatgggaaaacttggactattgatgataattacgatttttactcattaccagatgaaaatgaagaaaacaaaaagacgttatatgacaagattaaccacccgtcacattacacatatggagaaatagaagtaattgaattcatagaacaggtcactaaagattataaaccagagttagcatttgcgattggtaatgcaattaaatatatcagtcgagctaatcgtaagaacggaaaagaagatttagacaaagcgcgttggtatctaaacagagcattcgaaaagtgggaaaattaa

SEQ ID NO: 1374 - protein, 134 aa, Artificial Sequence
  Description of Artificial Sequence: synthetic amino acid sequence
MHGLNGVEVTAKVKNVYRLVHSRRGAAKWVADVKAIDGKTWTIDDNYDFYSLPDENEENKKTLYDKINHPSHYTYGEIEVIEFIEQVTKDYKPELAFAIGNAIKYISRANRKNGKEDLDKARWYLNRAFEKWEN

SEQ ID NO: 1375 - DNA, 1680 bp, Artificial Sequence
  Description of Artificial Sequence: synthetic nucleic acid sequence
atgaaaaaagtacaaaataaatattcaatcagaaagtttaacacagcagtaggtagtgtcattgtagggacagcaattttctttggaggacaagcacacgctgcagaaaacgaagttcaaagagaacaacctaatgtagaacaagcagaaacaacacaagaagtacacacagacacactacaagcaagtaatgaagaagtggtacaaaacaaccaagaaaaagaaacggcccaaaatgatgtgtctacacaagcgacagagcaacctcgatttatcactaacacagatttcaaaacacaaacagacgaaaacggacaaacacctatttggagtaaacaacaagtcaattacgaatggaacgctacaggttataaaaagggtgatgaaattaactttaatcttcctgaacagttaagacttgctaatgaacaaaactttgacttaaacacacctgataatgtcaatattggcagagttaatgcgacaagagatggattagtgaatgtaagcttaactgatccgacagattacttagcgacacatgaaaatactaaaggttggatgtattttgagactatgttcaacagagataaagtcaaagccggcgagagttacgacatcaaacttggtgacaagggatacacagtagacgttgcacaaaatgaaattaacaaaagtccgttacaaaaatggggatatgtagatgatgacaacaaagtacgttgggatgtaagaataaaccaggatgaacaaactattaataatggacgtttagaagatacattgggtgacggtttaacattcgatgaagattcattaactgtcactgaattcgatgtagataatcaagagttaggaagtcctttctatgattataaattaacaccaaccactaatggatttacaatcgatttcttaaaacaaattaataaagcgtatgaaattgaatacacaacaacacctttattaggtacaaatcaccaatacacaaacagtgttgaattgactggtgacggatacaaagaaacattagaaaatgttgaatctgaagtatctaacgctggtggaggtggtgagggtgacaacattccacctgtagagcctgaacaacctacagaaccagagcaacctaaggaacctgaaactccggaagaaccaacaacaccaaacgttccggaagaaccaaacacacctgaacaaccgaacaatcctgaaacacctgaagaacctaacaaaccagaacaacctactaagtcagaagaaccaaaacaaccacgacctgaaacaccacaaactcctgaacaatcagaagttaaagaaaaacaccaagaacctaaaacaccaacagagaaaaaagaaacacctattacacctcaaaaaccaagtaaaattgttgaggtagaaaataaagaagaagtgtcaccaaaagaaatacaagatgacacgactttcgttgtaacacgatcaaaagaacaaccaaaacatattgataaaccagttgaaagagttacgggtaacgtggctaatgaacaagaattagaaaaagagtcgaaagaagctgaaaaagtacaggaaaaagagcttccgaaaacaggacaagttgaaaatgtaggtgtctttggattgttagcactagtcactggtatcgcacttgtaagacgacgtaataaggaggattaa

SEQ ID NO: 1376 - protein, 559 aa, Artificial Sequence
  Description of Artificial Sequence: synthetic amino acid sequence
MKKVQNKYSIRKFNTAVGSVIVGTAIFFGGQAHAAENEVQREQPNVEQAETTQEVHTDTLQASNEEVVQNNQEKETAQNDVSTQATEQPRFITNTDFKTQTDENGQTPIWSKQQVNYEWNATGYKKGDEINFNLPEQLRLANEQNFDLNTPDNVNIGRVNATRDGLVNVSLTDPTDYLATHENTKGWMYFETMFNRDKVKAGESYDIKLGDKGYTVDVAQNEINKSPLQKWGYVDDDNKVRWDVRINQDEQTINNGRLEDTLGDGLTFDEDSLTVTEFDVDNQELGSPFYDYKLTPTTNGFTIDFLKQINKAYEIEYTTTPLLGTNHQYTNSVELTGDGYKETLENVESEVSNAGGGGEGDNIPPVEPEQPTEPEQPKEPETPEEPTTPNVPEEPNTPEQPNNPETPEEPNKPEQPTKSEEPKQPRPETPQTPEQSEVKEKHQEPKTPTEKKETPITPQKPSKIVEVENKEEVSPKEIQDDTTFVVTRSKEQPKHIDKPVERVTGNVANEQELEKESKEAEKVQEKELPKTGQVENVGVFGLLALVTGIALVRRRNKED

SEQ ID NO: 1377 - DNA, 342 bp, Artificial Sequence
  Description of Artificial Sequence: synthetic nucleic acid sequence
atgagtggatatcatattaacgttgaaagcaatcaggatacattgattaaagtcactcatattttcaaagctttaagtgattttaatcgtgtgagaataatggagtttcttgaaaacggtgaagcaagtgttggacatatttcacattctttaaatatgactcaatcaaatgtatcacatcaattgaaactacttaaaagcactcatcttgttaaatctaaaagacaagggcaatcaatgatttattctatagatgatatacacgtttcaactttacttaaacaagccattcaccacgccaaacatcctagtgaaggtggaatttctaatgacaaatcataa

SEQ ID NO: 1378 - protein, 113 aa, Artificial Sequence
  Description of Artificial Sequence: synthetic amino acid sequence
MSGYHINVESNQDTLIKVTHIFKALSDFNRVRIMEFLENGEASVGHISHSLNMTQSNVSHQLKLLKSTHLVKSKRQGQSMIYSIDDIHVSTLLKQAIHHAKHPSEGGISNDKS

SEQ ID NO: 1379 - DNA, 705 bp, Artificial Sequence
  Description of Artificial Sequence: synthetic nucleic acid sequence
atggcattagtattttcgctcatatcaggtgcaggatgggcatttggtcaaattattacttttaaagcgttcgaattagtaggttcatcaagagcgatgccaattactactgcatttcaattacttggtgcatctttatggggcgtttttgcgcttggcaactggcccggtataacaaacaaaatcattggatttctagctttactcgtaatccttataggtgcacgtatgactgtatggactgaaacaaagcaacaagaatatagtaaaaatctacgaagtgcagtgatcttattacttgtaggtgaaattggctattggatatattctgctgcacctcaagcaacggatattggtggatttaaagcttttttacctcaagctataggaatggtcattgtggctgtcatctatgcgttgatgaatatgtctaaaggtaatgcttttaaagagaaagtaagttggcaacaaacaatatccggatttttctttgcgtttgctgctttaacttatttaatttcagcacaacctaatatgaatggtttagcaacaggatttgttctatctcaaacatctgtagtattagcaacgctaacaggcatttttttcttaaatcagaaaaaaacatcaaaagaattaatgattacaattgtgggattagttcttattttagttgcagcatcaatcacagtgtttattaaataa

SEQ ID NO: 1380 - protein, 234 aa, Artificial Sequence
  Description of Artificial Sequence: synthetic amino acid sequence
MALVFSLISGAGWAFGQIITFKAFELVGSSRAMPITTAFQLLGASLWGVFALGNWPGITNKIIGFLALLVILIGARMTVWTETKQQEYSKNLRSAVILLLVGEIGYWIYSAAPQATDIGGFKAFLPQAIGMVIVAVIYALMNMSKGNAFKEKVSWQQTISGFFFAFAALTYLISAQPNMNGLATGFVLSQTSVVLATLTGIFFLNQKKTSKELMITIVGLVLILVAASITVFIK

SEQ ID NO: 1381 - DNA, 405 bp, Artificial Sequence
  Description of Artificial Sequence: synthetic nucleic acid sequence
atgaagaaaacagcagtattaaatagtcacatttcaagcgcaatctccacactaggtcactatgatttattaacgattaatgatgcgggtatgcctatacctaatgatgacaaacgtatagatttagcagtgactaagtcattgccatgtttcattgatgtgttggagacagtgttaactgaaatggaaatacaaaaaatatatttagcagaagaaattaaaactgcgaatgcacagcaattaaaagcaattaagaaattaatcaatgatgatgtagaaattaaatttattgcgcattctgagatgaaagaaatgttaaaatctcctttaaataaaggaaatatacgtactggtgaaatcacccctttttctaacattatcctagaatctaatgtgactttttaa

SEQ ID NO: 1382 - protein, 134 aa, Artificial Sequence
  Description of Artificial Sequence: synthetic amino acid sequence
MKKTAVLNSHISSAISTLGHYDLLTINDAGMPIPNDDKRIDLAVTKSLPCFIDVLETVLTEMEIQKIYLAEEIKTANAQQLKAIKKLINDDVEIKFIAHSEMKEMLKSPLNKGNIRTGEITPFSNIILESNVTF

SEQ ID NO: 1383 - DNA, 1014 bp, Artificial Sequence; identical to SEQ ID NO: 1219
  Description of Artificial Sequence: synthetic nucleic acid sequence

SEQ ID NO: 1384 - protein, 337 aa, Artificial Sequence; identical to SEQ ID NO: 156
  Description of Artificial Sequence: synthetic amino acid sequence

SEQ ID NO: 1385 - DNA, 1491 bp, Artificial Sequence
  Description of Artificial Sequence: synthetic nucleic acid sequence
atggtgaaagaagtagttctaggaattgatttaggcacaagcgcaataaaaattattgctgttgatcaactaggaaatgtcattgaatcagtaagcgaaacattaaagttataccaagagcatcctggttatagcgaacaagaccctaatgaatggtttgaggctactaagaaagggataaaagaattaattcaatcaacagaaatgtcagataagatagtaaaggggatttctttttcaggtcaaatgcatgggttggtcatagttgatgataatggcattcctttgagaaaagcgattttatggaatgatactagaaattcaatacaatgtagacaaattgaagatatatatggtgaaagattgaattacaatccgatattagaaggatttacacttcctaaaatgttatgggtacaacaacatgaacctgaaatttggaatcgagttgatgtttttatgttgcctaaagattatttacgttattgcttaacgcagacaattcatatggaatatagtgatgcatgtagtacattattattcaatcctgagaattatgaatggacaaaagatgttggagatacatttaacattggtgatatctatccacccttagtaaaatcacattcgtatgttggaaatgtaacttcatcactggctaaagaattaggattatctagtgatgttgctgtatatgctgggggtggtgataatgcatgtggtgcaattggtgctggtgtcatccatgataaaagtgcattatgtagcataggtacttcaggtgttgtattaaatgttgaataccaacgtgtgacctcatatgatagtaatttacacttattcaatcatagtgttccagatacttattacgcaatgggagtaacgttggcagcaggctatagtttaaactggttaaaacaaactttttttgaaaatgaatcttttgaagagattttaaatttagctgcatcttcaaagataggtgccaatggactactatttacaccttacttagctggagaacgtacgccacatggtgatgctcaaatacgtggaagttttataggtatcagtgggcaacatactaaagctgactttgcgagagcagtaatcgaaggcataacgtattctttatatgattctataaagattatgagacgagctggtcatgaaatgaactctatcacttcaatcggtggtggtgctaagagtagattttggttacaacttcaagctgatatttttaatgtgcaaataaaaagattgaagcatgaagaaggcccaagcatgggagcggcaattttagcggcatacggtctaggatggtttaaaacaattgagtcttgtgtagaggcatttattaaagtagacgaggtgtttgagccgaataatgaaaatcatgacctttatgaacaatactattcagtttatgaagctatatataaacaaacgaaacagcttactgctgatttgttaacgataacgaattaa

SEQ ID NO: 1386 - protein, 496 aa, Artificial Sequence
  Description of Artificial Sequence: synthetic amino acid sequence
MVKEVVLGIDLGTSAIKIIAVDQLGNVIESVSETLKLYQEHPGYSEQDPNEWFEATKKGIKELIQSTEMSDKIVKGISFSGQMHGLVIVDDNGIPLRKAILWNDTRNSIQCRQIEDIYGERLNYNPILEGFTLPKMLWVQQHEPEIWNRVDVFMLPKDYLRYCLTQTIHMEYSDACSTLLFNPENYEWTKDVGDTFNIGDIYPPLVKSHSYVGNVTSSLAKELGLSSDVAVYAGGGDNACGAIGAGVIHDKSALCSIGTSGVVLNVEYQRVTSYDSNLHLFNHSVPDTYYAMGVTLAAGYSLNWLKQTFFENESFEEILNLAASSKIGANGLLFTPYLAGERTPHGDAQIRGSFIGISGQHTKADFARAVIEGITYSLYDSIKIMRRAGHEMNSITSIGGGAKSRFWLQLQADIFNVQIKRLKHEEGPSMGAAILAAYGLGWFKTIESCVEAFIKVDEVFEPNNENHDLYEQYYSVYEAIYKQTKQLTADLLTITN

SEQ ID NO: 1387 - DNA, 318 bp, Artificial Sequence
  Description of Artificial Sequence: synthetic nucleic acid sequence
atgttagaaaaaggggtgatttcaccagtacgtatatttcctttatttaaaggagattttaacatttctttcatctcagaatgcgcaataaatttaatttctacatcatcattgattaatttcttaattgcttttaattgctgtgcattcgcagttttaatttcttctgctaaatatattttttgtatttccatttcagttaacactgtctccaacacatcaatgaaacatggcaatgacttagtcactgctaaatctatacgtttgtcatcattaggtataggcatacccgcatcattaatcgttaataaatcatag

SEQ ID NO: 1388 - protein, 105 aa, Artificial Sequence
  Description of Artificial Sequence: synthetic amino acid sequence
MLEKGVISPVRIFPLFKGDFNISFISECAINLISTSSLINFLIAFNCCAFAVLISSAKYIFCISISVNTVSNTSMKHGNDLVTAKSIRLSSLGIGIPASLIVNKS

SEQ ID NO: 1389 - DNA, 1110 bp, Artificial Sequence
  Description of Artificial Sequence: synthetic nucleic acid sequence
atggtaaacagtaatgatattgtttctattgttattagtgatattacacgtccaacgcccaaccatattcttgtacctttactaattgaggaattaaatcatgttcctcgtgagaatttcgtaattattaatggtacagggactcatcgagatcaaacgcgagatgaattgattcaaatgttaggtgaagatattgtaaattcagtaaaaatcgttcacaatcattgctcagaaaaagaaagtctagctaaagtgggacacagtcaatatggatgtgatgtttatttaaacaaagcatatgtagaatccgattttaaaattgtaacaggttttattgaaccacactttttcgccggattttcaggtggacctaaagggataatgcctggaattgcaggtttagaaacaattcaaacatttcataatgcaaaaatgattggcgatccgagatcaacgtggggaaatttagaagacaatccagttcaagatatggcacgggaagttaaccgtatgtgtaaacctgactttttacttaatgttgcattgaataaaagtaaagaaattactgcagcatttgctggtgaaatcttagatacacacaaagaaggatgcgcatatgtaaaagatcatgcaatgtttaaatgtgagcaacgctttgatattgttatcgcatcaaattctggctatcctttagatcaaaatttatatcaaacagttaaagggatgagtgcagcgagtaaagttgttaaaaaagacggtcatattattatggtatctgagtgtgcagatggctttcctgatcatggtaagtttgccgaaattttcaaaatggcagacacacctcaaggtattttagaacttattcacaatccaaactttaaggaagttgaccaatggcaagtacaaaaacaagcaagtattcaaacttttgccaatgtgcatgtttattcagaacttactgaccaacaacttaaagactcgatgttaatcccaacctctaacattgaacatacaatacaagaattagaacatcgatatggccgtaaattaaccattggtgttatgccacaaggtcctttaacaataccgtacgtagaagataaagaataa

SEQ ID NO: 1390 - protein, 369 aa, Artificial Sequence
  Description of Artificial Sequence: synthetic amino acid sequence
MVNSNDIVSIVISDITRPTPNHILVPLLIEELNHVPRENFVIINGTGTHRDQTRDELIQMLGEDIVNSVKIVHNHCSEKESLAKVGHSQYGCDVYLNKAYVESDFKIVTGFIEPHFFAGFSGGPKGIMPGIAGLETIQTFHNAKMIGDPRSTWGNLEDNPVQDMAREVNRMCKPDFLLNVALNKSKEITAAFAGEILDTHKEGCAYVKDHAMFKCEQRFDIVIASNSGYPLDQNLYQTVKGMSAASKVVKKDGHIIMVSECADGFPDHGKFAEIFKMADTPQGILELIHNPNFKEVDQWQVQKQASIQTFANVHVYSELTDQQLKDSMLIPTSNIEHTIQELEHRYGRKLTIGVMPQGPLTIPYVEDKE

SEQ ID NO: 1391 - DNA, 462 bp, Artificial Sequence
  Description of Artificial Sequence: synthetic nucleic acid sequence
atgaaattagacgcactattgaaagacatgcagagtgtagtaattgccttctcaggtggagtagatagtagcttgttactgaaaaaagcgattgatattttaggtgttaactatgttaaacctgttgtagtaaaatcagaattatttagaaatgaagagtttgaactagcgcttaaacttggacaaagtctaggtgttgaagtattagaaactgaaatgtctgaacttcaagatgcgaatatcgttaaaaatacgcctgaaagttggtactatagcaagcgcttgatgtatagtcaacttgagaatattaagaataaactaggatttaattatgtgctagatggtatgattatggatgacttagatgattttcgtcccggattaaaagcaagagacgactttggtgttcgtagcgttttacaagaagcaaaactatctttagagcacagtggcgatgatatc

SEQ ID NO: 1392 - protein, 154 aa, Artificial Sequence
  Description of Artificial Sequence: synthetic amino acid sequence
MKLDALLKDMQSVVIAFSGGVDSSLLLKKAIDILGVNYVKPVVVKSELFRNEEFELALKLGQSLGVEVLETEMSELQDANIVKNTPESWYYSKRLMYSQLENIKNKLGFNYVLDGMIMDDLDDFRPGLKARDDFGVRSVLQEAKLSLEHSGDDI

SEQ ID NO: 1393 - DNA, 429 bp, Artificial Sequence
  Description of Artificial Sequence: synthetic nucleic acid sequence
gtgagtagtaaattgaataaaaatattaacattcaaacccgtcaagttttgaaacagaatggtgaaaagcagagatttgagtttactacaaaaggttcttggcaacaaaaatttgcagattttatacgttacgaagaacaaattgaagatgctaaagttaatgttacgattaaaattgaagatagcggtgtaaagttaattcgtaaaggcgacattaatatgaacttacatttcgtcgaaggacatgagacgacaacactctatgatgtacctaccggaaaaatacctttaactgttaaaacactaagccttatgcatttcgttactcataatggcggtaaacttaaaatacattatgagttatatcaagatgaacaaaagatgggttcttatcaatatgaaataaattataaggagataagcgaatga

SEQ ID NO: 1394 - protein, 142 aa, Artificial Sequence
  Description of Artificial Sequence: synthetic amino acid sequence
VSSKLNKNINIQTRQVLKQNGEKQRFEFTTKGSWQQKFADFIRYEEQIEDAKVNVTIKIEDSGVKLIRKGDINMNLHFVEGHETTTLYDVPTGKIPLTVKTLSLMHFVTHNGGKLKIHYELYQDEQKMGSYQYEINYKEISE

SEQ ID NO: 1395 - DNA, 906 bp, Artificial Sequence
  Description of Artificial Sequence: synthetic nucleic acid sequence
gtgcactttgataattggtttagcgaaacatctttatatgaaaatggcgcgattaaaaatacattatctaaaatgaaagagctaggctatacgtatgaagcagatggcgcgacttggttacgtacaagtgactttaaagacgataaagatcgtgtattaataaaaaaagacggtaattacacttatttcacaccagatacggcctatcactacaataagattaatagaggaaatgatattttaattgatttaatgggtgctgatcaccacggttatattaaccgtctcaaagctagcttagaaacatttggtgtagacagcgatcgtcttgaaattcaaattatgcaaatggttcgccttatgcaaaacggagaagaagtgaagatgagtaagcgtacaggcaatgcgattactttacgtgaaattatggatgaagtcggtatcgatgctgcacgttatttcttaacaatgcgtagtcctgattctcattttgactttgatttagagttagctaaagagcaatctcaagacaatccaatttattacgcacaatatgcacatgcacgaatttgttctattctaaagcaagctaaagaacaaggtattgaagtgtctactgatgcagacttttctaaaataaataatgataaagcaatagacttattaaaaaaagtagcagaattcgaatcgacgatagagagtgcagccgaacatcgtgcacctcatcgtctaactaattatattcaggatctagctgcagcattccataaattttataatgctgaaaaagtgcttacagatgatacggaaaaaactaaagcacatgtagctatgattgaagcggtgcgtattaccttgcacaatgcattagcattagtaggtgttacagcaccagaatctatgtaa

SEQ ID NO: 1396 - protein, 301 aa, Artificial Sequence
  Description of Artificial Sequence: synthetic amino acid sequence
VHFDNWFSETSLYENGAIKNTLSKMKELGYTYEADGATWLRTSDFKDDKDRVLIKKDGNYTYFTPDTAYHYNKINRGNDILIDLMGADHHGYINRLKASLETFGVDSDRLEIQIMQMVRLMQNGEEVKMSKRTGNAITLREIMDEVGIDAARYFLTMRSPDSHFDFDLELAKEQSQDNPIYYAQYAHARICSILKQAKEQGIEVSTDADFSKINNDKAIDLLKKVAEFESTIESAAEHRAPHRLTNYIQDLAAAFHKFYNAEKVLTDDTEKTKAHVAMIEAVRITLHNALALVGVTAPESM

SEQ ID NO: 1397 - DNA, 681 bp, Artificial Sequence
  Description of Artificial Sequence: synthetic nucleic acid sequence
atgcgagatataacaatcatgcgaagatttgtagggggagaaatcatgttatcaatagaaaaattatatcaaattctatatcaaaatatgggccctcaatattggtggccagcagaaacgccaatagaaatgatgcttggggcaattctagtccaaaatactaattggaacaatgcagatatagcgttatcaagattaaaagaagaaacttcttttaatgcacagacgatattgaaaatgcctttagaatcgttgcagcaagtgatacgttcgagtggtttctataaaaataaagctaaggctatacaggcattgttactatggttaaatcaacatcattttgattatagtagtatagctaagttatacggtgatagcttaagaaaagaattactcaccatccgtggtataggtgaagagaccgccgatgtcttaatagtatatatttttaaaggtaaagaattcatacctgatagttatactagacgtatttttagaaaattgggatatcaacatacagaaagttatcataaattgaaacaggaattaacacttcctgaatcattttcaaatcaagatgcaaatgagtttcacgctttattagataattttgggaaaaattattttaatggtaaggggaaacaacgctatacctttttagatacctattttaaaaaataa

SEQ ID NO: 1398 - protein, 226 aa, Artificial Sequence
  Description of Artificial Sequence: synthetic amino acid sequence
MRDITIMRRFVGGEIMLSIEKLYQILYQNMGPQYWWPAETPIEMMLGAILVQNTNWNNADIALSRLKEETSFNAQTILKMPLESLQQVIRSSGFYKNKAKAIQALLLWLNQHHFDYSSIAKLYGDSLRKELLTIRGIGEETADVLIVYIFKGKEFIPDSYTRRIFRKLGYQHTESYHKLKQELTLPESFSNQDANEFHALLDNFGKNYFNGKGKQRYTFLDTYFKK

SEQ ID NO: 1399 - DNA, 1968 bp, Artificial Sequence; identical to SEQ ID NO: 1051
  Description of Artificial Sequence: synthetic nucleic acid sequence

SEQ ID NO: 1400 - protein, 655 aa, Artificial Sequence; identical to SEQ ID NO: 1052
  Description of Artificial Sequence: synthetic amino acid sequence

SEQ ID NO: 1401 - DNA, 1143 bp, Artificial Sequence
  Description of Artificial Sequence: synthetic nucleic acid sequence
atgaaaaacgcactaaaactttttatcacggatttaaaaagagttgctaaaacaccaggtgtatgggtcatcttagctggtttagcaattcttccttcattctatgcatggtttaacctctgggctatgtgggatccgtatggtcatacaggacatatcaaagttgccgtagtgaatgaagaccaaggtgaaaaagttcgtggtaagaatattaatgtaggaaataaaatggtcaaaactttaaaaaagaatgatagttttgactggcaatttgtgagtagagaaaaagccgaccatgaaattaagatgggaaaatattatgcaggtatttatataccgaagaaattcacacatgaaatcactggtactttaagaaaacatcctcaaaaggcggatatagattttaaagtaaatcagaagattaatgctgtagcagctaagttaaccgatacgggatcgtcgtttgtgattgataaagcaaataaacaatttaacaaaaccgtagcaaccgctttactttctgaagctaataaagtcggactatcaattgaagataatgtacctacaatcaataaaattaagagtgctgtatatcaagctaataattcattgcctaaaattaatcaatttgcagacaagattattgaactaaataaacatcaagacgatttggatgcttatgctaatcaatttagaagtttaggaaagtataaagggaatgtattagacgctcaagaaaaacttaatgctgttaattcgtctattccggcgcttaatgaaagggctaaattgatacttgcacttgatagctacatgcctaatattgaaagaattttaaatgttgctgctaatgatgttccagcacaatttcctagaattaataggggtgtcgatattgcaagtgaaggtattgatgcagcgagtggtcagttaaatgatgcaaaaggttatttgactcaagctaaagcgagagtgggagactatcaagaagcagctggccgcgctcaagatgtgaacaaccaagcaaatcaaaatctaagaaatcaaacatcaactacaccccaaagcgctataaaatcatcgcattcggaagggaagagtcattcaagcattaaaacagtacctgtgagtcaatcttgctaa

SEQ ID NO: 1402 - protein, 380 aa, Artificial Sequence
  Description of Artificial Sequence: synthetic amino acid sequence
MKNALKLFITDLKRVAKTPGVWVILAGLAILPSFYAWFNLWAMWDPYGHTGHIKVAVVNEDQGEKVRGKNINVGNKMVKTLKKNDSFDWQFVSREKADHEIKMGKYYAGIYIPKKFTHEITGTLRKHPQKADIDFKVNQKINAVAAKLTDTGSSFVIDKANKQFNKTVATALLSEANKVGLSIEDNVPTINKIKSAVYQANNSLPKINQFADKIIELNKHQDDLDAYANQFRSLGKYKGNVLDAQEKLNAVNSSIPALNERAKLILALDSYMPNIERILNVAANDVPAQFPRINRGVDIASEGIDAASGQLNDAKGYLTQAKARVGDYQEAAGRAQDVNNQANQNLRNQTSTTPQSAIKSSHSEGKSHSSIKTVPVSQSC

SEQ ID NO: 1403 - DNA, 627 bp, Artificial Sequence
  Description of Artificial Sequence: synthetic nucleic acid sequence
atgtcagcaattgctcaaaatccatggttaatggtcttagcaatttttataattaatgtatgttatgtcacatttttaacaatgagaacgatattgactttgaaaggttatcgttatgttgcagcagtagttagttttatggaagtcttagtttatgttgttggtttagggttagtaatgtctagcctagaccaaatccaaaatatttttgcttatgcattaggattctcagtcggtattatagtaggaatgaaaatcgaggaaaaacttgcgttaggttatacagttgtcaatgttacttcatcggaatatgagttagatttaccaaatgaattaagaaatttagggtatggtgtaacccactacgaagcatttggtagagatggaagtcgaatggtaatgcaaatattaacaccaagaaaatatgaattaaagttaatggatactgtcaagaacttagatctcaaggcatttattatagcgtatgaaccaagaaatattcacggaggattctgggttaagggtgtacgtaaacgtaaactgaaagcttatgaaccagaacaactggaagttgtagtagatcacgaagaaatagtaggtggtagctcaaatgagcaaaaagtttag

SEQ ID NO: 1404 - protein, 208 aa, Artificial Sequence
  Description of Artificial Sequence: synthetic amino acid sequence
MSAIAQNPWLMVLAIFIINVCYVTFLTMRTILTLKGYRYVAAVVSFMEVLVYVVGLGLVMSSLDQIQNIFAYALGFSVGIIVGMKIEEKLALGYTVVNVTSSEYELDLPNELRNLGYGVTHYEAFGRDGSRMVMQILTPRKYELKLMDTVKNLDLKAFIIAYEPRNIHGGFWVKGVRKRKLKAYEPEQLEVVVDHEEIVGGSSNEQKV

SEQ ID NO: 1405 - DNA, 1243 bp, Artificial Sequence
  Description of Artificial Sequence: synthetic nucleic acid sequence
atgtacagtttttgtaggagctataatacatacgataggagtttacaaagaatgatagaacgttattcaagagatgaaatgtctagtatttggacggatcaaaatcgctatgaagcatggttagaagtagagattctagcgtgtgaagcatggagtgagttaggttatattcctaaagaagatgtaaaaaaaattcgtgaaaatgccaaggtaaatgttgaacgcgctaaagaaattgaacaagaaacacgacacgatgtagttgcatttacacgccaagtttctgaaactttaggtgatgaacgtaagtgggtacattatggattaacttccactgatgtagttgacactgccttaagttatgtaattaaacaggcaaacgaaatccttgaaaaagatttagaaagatttatagatgtattagctgccaaagctaaaaaatatcaatatacattgatgatggggcgtacacatggagttcatgctgagcctacaacttttggcgtaaaaatggctctttggtatactgaaatgaaacgtaatcttaagcgttttaaagaagtgcgtaaagaaatagaagtagggaaaatgagtggagcagtaggaacatttgccaatattccacccgaaattgaggcttacgtatgtgaacatttaggaatagacactgcagctgtttctactcaaacattacaaagagatcgtcatgcttattacattgctacattagcactaattgctacatcaatggaaaaatttgcagtagaaattcgtaatttacaaaaaactgaaactagagaagtcgaagaggcatttgcaaaaggacaaaaaggatcatcagcaatgccacataaaagaaatccaatcggttctgaaaatattacaggtatatctcgtgtgattcgaggatatattactactgcatacgagaatatacctttatggcatgaaagagatatctctcattcttctgcagaacgtatcatgttaccagatgttacaattgctctagattatgcacttaatcgatttacgaatattgttgatcgactaacagtttatgaagataatatgagaaataatattgataaaacgtatggtttaatcttctcacaacgcgtactactagcattaattaataaaggcatggtacgtgaagaagcttatgataaagttcaacctaaagcaatggaatcttgggaaacaaaaacaccatttagagagctaattgaacaagattcat

SEQ ID NO: 1406 - protein, 415 aa, Artificial Sequence
  Description of Artificial Sequence: synthetic amino acid sequence
  MOD_RES (415): variable amino acid
MYSFCRSYNTYDRSLQRMIERYSRDEMSSIWTDQNRYEAWLEVEILACEAWSELGYIPKEDVKKIRENAKVNVERAKEIEQETRHDVVAFTRQVSETLGDERKWVHYGLTSTDVVDTALSYVIKQANEILEKDLERFIDVLAAKAKKYQYTLMMGRTHGVHAEPTTFGVKMALWYTEMKRNLKRFKEVRKEIEVGKMSGAVGTFANIPPEIEAYVCEHLGIDTAAVSTQTLQRDRHAYYIATLALIATSMEKFAVEIRNLQKTETREVEEAFAKGQKGSSAMPHKRNPIGSENITGISRVIRGYITTAYENIPLWHERDISHSSAERIMLPDVTIALDYALNRFTNIVDRLTVYEDNMRNNIDKTYGLIFSQRVLLALINKGMVREEAYDKVQPKAMESWETKTPFRELIEQDSX

SEQ ID NO: 1407 - DNA, 309 bp, Artificial Sequence; identical to SEQ ID NO: 357
  Description of Artificial Sequence: synthetic nucleic acid sequence

SEQ ID NO: 1408 - protein, 102 aa, Artificial Sequence; identical to SEQ ID NO: 358
  Description of Artificial Sequence: synthetic amino acid sequence

SEQ ID NO: 1409 - DNA, 639 bp, Artificial Sequence
  Description of Artificial Sequence: synthetic nucleic acid sequence
atgaatgacattgtgaacgttcaaaaaggtcatattaaaataggcttatcaccaatgatgaatgttcaaatgtttacaaatgcattgaatcagtttcacagactctatcctaatgtgacatatgaagtgattgagggtggtggtaaaattgttgagaacttaacatctaatgatgatgtggatattggtattactacattacctgtagatcacactgaatttcattcaacttctttatataatgaagaattattattagtagtaagtaatgaccatcatttagcacatttaaataaagtagacatggcagatttgaaagatgaagagtttgttttatttcatgatgattattatttaaaagatcaaattatagagaactgtaaaaggctaggctattaccctaaaactgttgctaatatttctcaaattagttttatcgctaatatgattcaacaaggaataggaattagtatcgttccagaaagtttagttaatttaatggggaataacgtaacgtccattcaattagagaatgttgaattatcatggcatcttggcgtgatatggagaaaagatgcttatctcaatcatgtaactcgcaaatggattgaatttatttctgagatgaaaccaacatag

SEQ ID NO: 1410 - protein, 212 aa, Artificial Sequence
  Description of Artificial Sequence: synthetic amino acid sequence
MNDIVNVQKGHIKIGLSPMMNVQMFTNALNQFHRLYPNVTYEVIEGGGKIVENLTSNDDVDIGITTLPVDHTEFHSTSLYNEELLLVVSNDHHLAHLNKVDMADLKDEEFVLFHDDYYLKDQIIENCKRLGYYPKTVANISQISFIANMIQQGIGISIVPESLVNLMGNNVTSIQLENVELSWHLGVIWRKDAYLNHVTRKWIEFISEMKPT

SEQ ID NO: 1411 - DNA, 969 bp, Artificial Sequence
  Description of Artificial Sequence: synthetic nucleic acid sequence
atgaaggagttcgttaaaatgaaaaaatttgggaaaaaagttgttttagtaggagacggttccgtaggttcaagttatgcatttgctatggtgactcaaggaattgcagatgaatttgtaattattgatattgcaaaagataaagtggaagcagacgttaaagatttaaaccatggtgcactttacagttcttcaccagtgactgtaaaagctggagaatatgaagattgtaaagatgcagatttagttgttattacagcaggtgcacctcaaaaaccgggtgaaactcgtttacaacttgttgagaaaaatactaaaatcatgaaaagtatcgtaactagtgtcatggatagtggctttgatggtttcttcctaattgctgcaaacccagttgatatcttaacacgttatgttaaagaagttacaggtttaccagctgaacgtgttattggttctggtacagtgcttgatagtgcaagattcagatatttaataagtaaagaattaggtgttacatcaagtagtgttcacgctagcattataggtgaacatggtgactctgaacttgcagtttggtctcaagcaaacgttggaggtatttcagtgtatgatacattgaaagaagaaactggtagcgatgctaaagcgaatgaaatttatattaatacaagagatgctgcttacgatatcattcaagctaaaggatctacgtattatggtatagctctagcactattacgtatttctaaagctttactaaataatgaaaatagtattttgacagtttctagtcaacttaatggtcaatatggatttaacgatgtttatcttggcttaccaacacttatcaatcaaaatggtgcagttaaaatttatgaaacaccattaaatgataacgaactacaattactagaaaaatcagtgaaaactttagaagacacttatgattctataaaacatttagtttaa

SEQ ID NO: 1412 - protein, 322 aa, Artificial Sequence
  Description of Artificial Sequence: synthetic amino acid sequence
MKEFVKMKKFGKKVVLVGDGSVGSSYAFAMVTQGIADEFVIIDIAKDKVEADVKDLNHGALYSSSPVTVKAGEYEDCKDADLVVITAGAPQKPGETRLQLVEKNTKIMKSIVTSVMDSGFDGFFLIAANPVDILTRYVKEVTGLPAERVIGSGTVLDSARFRYLISKELGVTSSSVHASIIGEHGDSELAVWSQANVGGISVYDTLKEETGSDAKANEIYINTRDAAYDIIQAKGSTYYGIALALLRISKALLNNENSILTVSSQLNGQYGFNDVYLGLPTLINQNGAVKIYETPLNDNELQLLEKSVKTLEDTYDSIKHLV

SEQ ID NO: 1413 - DNA, 1665 bp, Artificial Sequence
  Description of Artificial Sequence: synthetic nucleic acid sequence
atggcggaaaaacaatattctgcagcacaaatggtaattgatactttaaaaaataatggagttgagtatgtatttggtattccaggtgcgaaaatcgactacttatttaatgcactagaggatgacgatattgaattagtcgttacgcgtcatgaacaaaacgcagcgatgattgcacaaggtattggtcgtttaacaggaaaaccaggtgtggctattactacaagtggcccaggggtaagtaacttaactactggtttattaactgcaacttctgaaggtgaccctgtattagctatcggtggtcaagttaaaagaaatgacttattacgtttaacacatcaaagtattgataacgcatcattacttagatcctcaactaaatatagtgcagaagtacaagatccagaatcactatcagaggttattacgaatgcaatgcgtacagccacttcaggtaaaaatggagcgagctttatcagtattccacaagatgttatttcatcacctgtcaaagctgatgcaatttcattatgtcaaaaaccacatcttggtgtaccttcagaacaagaaattaatgaagtgattgaggctattaaaaattctaaattcccagtattattagctggaatgagaagttcaagccaagctgaaacagaagctattcgccgtttagttcaaaaaacaaatttacctgttgttgaaacattccaaggtgccggcgtaattagtcgcgaattagaaaatcacttcttcggtcgtgttggtttatttagaaaccaagtgggtgacgaattacttagaaaaagtgatttagttatcacaatcggttatgaccctattgaatatgaagcaagtaactggaataaagaattagatactaaaatcatcaatgtcgatgaagaacatgctgaaatcactaattacatgcaaccagttaaagagttaatcggaaacattgcaggtacaatagatatgatttctgaacatgtaaatgaaccatttattaatcaagatcatttagatgaacttgaaaaattaagaggcgaaatcacagaagcaactggaattaaagcaactcacaaagaaggtgtgatgcacccagttgaaatcattgaaacaatgcaaaaagttttaactgatgatactactgtaactgtagatgtgggaagccattacatttggatggctcgtaaatacagaagttacaatcctagacatttactatttagtaacggtatgcaaactctaggtgttgcacttccatgggctatttcagctgcacttgtacgtccaaatacacaagttgtttctgtagctggagacggtggtttcctattctcaggacaagaattagaaactgcagtacgtaaaaacttaaatatcattcaattaatttggaatgatggtcgttataacatggttgaattccaagaagaaatgaaatataaacgctcttcaggtgtagaatttggaccagttgattatgtaaaatatgcagaatcatttggcgctaaaggattacgtgtgactaatcaagaagaattagaggcagcacttaaagagggttacgaaactgatggaccagtattaattgatatcccagttaactatgcagataatgttaaattatctacaaatatgttaccaaatgctttaaattaa

SEQ ID NO: 1414 - protein, 554 aa, Artificial Sequence
  Description of Artificial Sequence: synthetic amino acid sequence
MAEKQYSAAQMVIDTLKNNGVEYVFGIPGAKIDYLFNALEDDDIELVVTRHEQNAAMIAQGIGRLTGKPGVAITTSGPGVSNLTTGLLTATSEGDPVLAIGGQVKRNDLLRLTHQSIDNASLLRSSTKYSAEVQDPESLSEVITNAMRTATSGKNGASFISIPQDVISSPVKADAISLCQKPHLGVPSEQEINEVIEAIKNSKFPVLLAGMRSSSQAETEAIRRLVQKTNLPVVETFQGAGVISRELENHFFGRVGLFRNQVGDELLRKSDLVITIGYDPIEYEASNWNKELDTKIINVDEEHAEITNYMQPVKELIGNIAGTIDMISEHVNEPFINQDHLDELEKLRGEITEATGIKATHKEGVMHPVEIIETMQKVLTDDTTVTVDVGSHYIWMARKYRSYNPRHLLFSNGMQTLGVALPWAISAALVRPNTQVVSVAGDGGFLFSGQELETAVRKNLNIIQLIWNDGRYNMVEFQEEMKYKRSSGVEFGPVDYVKYAESFGAKGLRVTNQEELEAALKEGYETDGPVLIDIPVNYADNVKLSTNMLPNALN

SEQ ID NO: 1415 - DNA, 663 bp, Artificial Sequence
  Description of Artificial Sequence: synthetic nucleic acid sequence
atggcaggtttattagaaggaactgcttcaattaatgacttattagaacatggtgatttaggtattgctacgcttacaggttctgatggagaagtaatttttgttgatggtaaagcttatcatgcaaatgaacataaagaatttatagaattgacaggcgacgaaatgacaccatatgcaactgttacaaaattcaaagcagactcaagttttaaaacatctaataaaaatcaagaagaagtattcgatgaagttaaaaaacaaatgaaaagtgaaaatatgttctcggcagttaaaatttcaggaacgtttaaaaaaatgcatgtacgtatgatgcctggtcaagaacctccatacacacgtttaattgattcagctcgtagacaacctgaagaaacacgtgaaaatatcaaaggttcaatcgtaggtttcttcactccagaattattccatggtattggttctgcaggtttccatattcactttgcaaatgatgatcgtgattttggtggtcatattttagactttgaagtggatgatgtgactgttgaaatacaaaactttgaaacatttgaacaacacttcccagtagatgctaaatcatttactgatgctgacattgactataaagatatagccgatgaaatcagagaagctgaataa

SEQ ID NO: 1416 - protein, 220 aa, Artificial Sequence
  Description of Artificial Sequence: synthetic amino acid sequence
MAGLLEGTASINDLLEHGDLGIATLTGSDGEVIFVDGKAYHANEHKEFIELTGDEMTPYATVTKFKADSSFKTSNKNQEEVFDEVKKQMKSENMFSAVKISGTFKKMHVRMMPGQEPPYTRLIDSARRQPEETRENIKGSIVGFFTPELFHGIGSAGFHIHFANDDRDFGGHILDFEVDDVTVEIQNFETFEQHFPVDAKSFTDADIDYKDIADEIREAE

SEQ ID NO: 1417 - DNA, 792 bp, Artificial Sequence
  Description of Artificial Sequence: synthetic nucleic acid sequence
atgaaggcatcacagcaaaagatttctatggttacagcttatgattatcctagtgctaagcaagcacaacaagctgaaattgacatgattttggtaggagattctttaggaatgacagtgttaggatatgatagtactgttcaagttacattgaacgatatgattcatcatggtaaggctgttaaaagaggtgcttcagatacatttatagttgttgatatgcctatagggactgttggtttaagtgatgaagaagatctaaaaaatgcacttaagctttatcaaaacacgaatgctaacgctgtcaaagtagaaggggctcatcttacatcatttattcaaaaagcaactaaaatgggtatacctgttgtttctcacttaggtcttacacctcaaagtgtaggtgtaatggggtataaacttcaaggggatacaaagacagccgctatgcaacttatcaaagatgctaaagctatggaaactgctggtgcagtagtactggttttagaagccatacctagtgatttagctcgagaaattagtcagcaactcactattccagttataggtataggggcaggaaaagatactgatgggcaagtgttagtgtatcatgatatgttaaattatggtgttgatcgacacgctaagtttgttaagcaatttgcagacttttcaagtggtattgatggattaaggcaatataatgaagaagttaaagcagggacgtttccttctgaaaatcatacttacaaaaaacgtattatggatgaggtagagcaacatgactaa

SEQ ID NO: 1418 - protein, 263 aa, Artificial Sequence
  Description of Artificial Sequence: synthetic amino acid sequence
MKASQQKISMVTAYDYPSAKQAQQAEIDMILVGDSLGMTVLGYDSTVQVTLNDMIHHGKAVKRGASDTFIVVDMPIGTVGLSDEEDLKNALKLYQNTNANAVKVEGAHLTSFIQKATKMGIPVVSHLGLTPQSVGVMGYKLQGDTKTAAMQLIKDAKAMETAGAVVLVLEAIPSDLAREISQQLTIPVIGIGAGKDTDGQVLVYHDMLNYGVDRHAKFVKQFADFSSGIDGLRQYNEEVKAGTFPSENHTYKKRIMDEVEQHD

SEQ ID NO: 1419 - DNA, 903 bp, Artificial Sequence
  Description of Artificial Sequence: synthetic nucleic acid sequence
atgaatcgtaaaaagaaaggaaagaataaagttatgacaattgccattataggcccaggtgcagtgggtacaacgttagcttttgaattaaaaaaagttctaccagatacggaactcatcggccggcaagataaattaatgacctatttcccagaaaatacttctaatggaagtaatgttaaagtgacttcatttaatcatattaatcaaacttttgatgtcattatcatagcagttaaaacacatcaattggatgacgtcattaaacaattacctaaaatcactcatgacgattcgctcattatcttagcacaaaatggctatggacagcttaataaacttccatatcaacatgtctttcaagcagtcgtctatattagcggacaaaaagttaacaacaatgttcaacatttcagagattaccaactatatattcaagatagcacactaactcgtcaattcaagcaaatggttcatccttccaaaatagaggtggttttacaagaaaatattgaaaaaagcatttggtataaattattagtgaatttaggtataaataccatcactgctattggacaacaaccagctaaaattttaaaatctcctcatattgagtcgttgtgtcgtcgtatattagttgatggtcttaaagttgctagagctgaacaaattgactttgaagatcatatcgttgatgatattttaaatatttataaaggttatccagacgaaatgggaacaagtatgtattacgatgtcattaacaagcatcctcttgaagtcgaggccatacagggttatatatataaatgtgcaaaaaaacatcatttagagacaccctatctagatatggcttatacatttttatacgcttatcaccttgaatacacacaaccagattga

SEQ ID NO: 1420 - protein, 300 aa, Artificial Sequence
  Description of Artificial Sequence: synthetic amino acid sequence
MNRKKKGKNKVMTIAIIGPGAVGTTLAFELKKVLPDTELIGRQDKLMTYFPENTSNGSNVKVTSFNHINQTFDVIIIAVKTHQLDDVIKQLPKITHDDSLIILAQNGYGQLNKLPYQHVFQAVVYISGQKVNNNVQHFRDYQLYIQDSTLTRQFKQMVHPSKIEVVLQENIEKSIWYKLLVNLGINTITAIGQQPAKILKSPHIESLCRRILVDGLKVARAEQIDFEDHIVDDILNIYKGYPDEMGTSMYYDVINKHPLEVEAIQGYIYKCAKKHHLETPYLDMAYTFLYAYHLEYTQPD

SEQ ID NO: 1421 - DNA, 1173 bp, Artificial Sequence
  Description of Artificial Sequence: synthetic nucleic acid sequence
atgttatggaggtttgttatgggaagtttttttaatcggatgactcgaaaagagaatcctactatttatcaaagtaaagatgggcatcttaaacgcacattacgtgtacgcgactttcttgcactaggtgttggtacaattgtttctacatctatcttcactttaccaggtgttgtcgcggctgagcatgccggacctgctgtttcattgtcattcttattagctgctattgtggcaggtcttgtagcctttacttatgcagaaatggcatctacaatgccttttgctggttcagcttattcatggattaatgttctttttggtgaattattcggatgggttgccggttgggcgcttttagcagaatactttattgctgttgctttcgttgcttcaggcttttctgctaacttaagaggtcttattgcaccattgggcatttctttacctaaatcattatctaatccatttggaagtaacggtggtgtcattgatatcattgctgctgtagtgattattttaactgcattactattatcacgcggaatgaacgaagccgctcgtatggaaaatgtattggttatattaaaggtgttggccatcattttatttgtgattgttgggctaactgcgattaatttcagtaactatataccttttattccagaacataaagttactgaaactggcgactttggaggttggcaaggtatttatgctggagtttcaatgatttttttagcttatattggttttgactctattgctgctaattcagctgaagcgattaatccacagaagacaatgcctagaggaatcttagggtcactcatagtagcaattgtattgtttgtggccgtagcacttgttcttgttggcatgttccactactctcaatacgctgataatgcagagccagtaggttgggcattacgagaaagtggtcatggtattattgctgcaattgttcaagcaatttctgtcatcggtatgttcactgcattaatcggtatgatgcttgcaggttcacgtctattatattcatttggacgagatggtttactcccttcttggttaagtcaattgaatcacaaacatttacctaatcgagcacttgtcatacttacaatcattggcgtagttatcggatcaatgttccctagcaatcgctaa

SEQ ID NO: 1422 - protein, 390 aa, Artificial Sequence
  Description of Artificial Sequence: synthetic amino acid sequence
MLWRFVMGSFFNRMTRKENPTIYQSKDGHLKRTLRVRDFLALGVGTIVSTSIFTLPGVVAAEHAGPAVSLSFLLAAIVAGLVAFTYAEMASTMPFAGSAYSWINVLFGELFGWVAGWALLAEYFIAVAFVASGFSANLRGLIAPLGISLPKSLSNPFGSNGGVIDIIAAVVIILTALLLSRGMNEAARMENVLVILKVLAIILFVIVGLTAINFSNYIPFIPEHKVTETGDFGGWQGIYAGVSMIFLAYIGFDSIAANSAEAINPQKTMPRGILGSLIVAIVLFVAVALVLVGMFHYSQYADNAEPVGWALRESGHGIIAAIVQAISVIGMFTALIGMMLAGSRLLYSFGRDGLLPSWLSQLNHKHLPNRALVILTIIGVVIGSMFPSNR

SEQ ID NO: 1423 - DNA, 501 bp, Artificial Sequence
  Description of Artificial Sequence: synthetic nucleic acid sequence
atgcttccaaacataaatggtctagaaatttgtagacaaattcgtcaaaaaacaactactccaattatcatcattactgcaaaaagcgagacatatgataaagtagctgggttggactatggggcagatgactacattgtaaaaccctttgatatagaagaattgctcgcaagaataagagcggtattgcgcagacagccagataaagatgttttagatatcaatggtattatcattgataaagatgcctttaaagttactgttaatggccatcaattagaattaactaaaacagaatacgatttattatatgttttagctgaaaatcgtaaccacgtcatgcagcgtgaacaaattctcgatcacgtatgggggtataatagtgaagtagaaacgaatgtcgttgatgtttacattcgttatttacgtaataaactcaaaccttttaataaagaaaaatccatagaaacagtacgtggcgtagggtatgtgattcgatga

SEQ ID NO: 1424 - protein, 166 aa, Artificial Sequence
  Description of Artificial Sequence: synthetic amino acid sequence
MLPNINGLEICRQIRQKTTTPIIIITAKSETYDKVAGLDYGADDYIVKPFDIEELLARIRAVLRRQPDKDVLDINGIIIDKDAFKVTVNGHQLELTKTEYDLLYVLAENRNHVMQREQILDHVWGYNSEVETNVVDVYIRYLRNKLKPFNKEKSIETVRGVGYVIR

SEQ ID NO: 1425 - DNA, 855 bp, Artificial Sequence
  Description of Artificial Sequence: synthetic nucleic acid sequence
gtgagttatatcttttcttcgcaaattactaaaccgatagttacaatgtccaataaaatgaatcaaattagaagagatggttttcaaaataaacttgaattaactacaaattatgaagaaacagataatttaattgatacttttaatgaaatgatgtatcaaatagaagaatcttttaatcagcaacgtcaatttgtcgaggatgcttcacacgaattaagaacgccactgcagattattcaaggtcatctaaatttaatccaacgttgggggaaaaaagatccagcagttttggaagaatctttgaatatttcaattgaagaagtgaatcgaataacaaaacttgtcgaagaactacttttacttaccaaagatagagtcaatcataatgttttggaatgtgaaaatgtagacgtaaatagcgagattcaatcacgtgtgaagtcactgcaacacctacatccagattatacttttgaaacacatcttgctactaagcctatccaattaaaaattaaccgtcatcagtttgaacaactcttactcatatttattgataatgcaatgaaatacgacactgaacataagcacattaaaattgttactcaactaaaaaataaaatgattatgattgatattactgatcatggtatgggtataccaaaagctgacttagaatttatctttgatagattttatcgtgtagataaatcacgtgctcgtagtcaaggaggcaatggattaggactatcaatagcagaaaaaattgtgcaacttaacggtggtatgattcaagtagaaagtgaactacaaaagtacacgactttcaaaatcagttttccagtactaaactaa

SEQ ID NO: 1426 - protein, 284 aa, Artificial Sequence
  Description of Artificial Sequence: synthetic amino acid sequence
VSYIFSSQITKPIVTMSNKMNQIRRDGFQNKLELTTNYEETDNLIDTFNEMMYQIEESFNQQRQFVEDASHELRTPLQIIQGHLNLIQRWGKKDPAVLEESLNISIEEVNRITKLVEELLLLTKDRVNHNVLECENVDVNSEIQSRVKSLQHLHPDYTFETHLATKPIQLKINRHQFEQLLLIFIDNAMKYDTEHKHIKIVTQLKNKMIMIDITDHGMGIPKADLEFIFDRFYRVDKSRARSQGGNGLGLSIAEKIVQLNGGMIQVESELQKYTTFKISFPVLN

SEQ ID NO: 1427 - DNA, 1137 bp, Artificial Sequence
  Description of Artificial Sequence: synthetic nucleic acid sequence
atgtttcaattattagcagtatgtccaatgggattagaagcagttgtagctaaagaaatacaagaattaggttacgatacacaagtagaaaacggtcgtatcttttttgaaggtgatgaaagtgctattgttagatgtaacttatggttacgtaccgcagaccgaataaaaattgtaatgggtcgattcaatgctactactttcgacgaattatttgagcaaacaaagtcattaccatgggagaccgtaattgacaaagaaggtaatttcccggttcaagggcggagtgtaaaatcaacattatatagtgtacctgactgccaagcaattactaaaaaggctatagtagaacgacttaagcatgctcatcaagaaaaaggatggctaagtgaaacaggcgccaaatatcctgtagaagtagcaatattaaaagataatgtattattgaccattgatactgctggttctggactcaacaagcgaggttatcgcattgctcaaggtgaagcacccattaaagaaacattggcagcaagcctcattcgtttagcaaattggaatggtaacacacctttaattgatcctttctgtggttcaggcaccattgctattgaagcatgtcttattgcacaaaatattgcacctggttttaatagggattttgtatctgaacaatggaatatgatgccacctaatatttatgacaaatttcgtgatgaagctgatcaattggctgactatgataaagacatacaagtatatgcttctgatattgatccagaaatgattgaaattgcaaaacgtaatgcagaagaagttggtctcggagatatcatacagttcaatgttaaagatgtgaatactttgtctattgataccgacaagcctgtagcacttgttggcaatccaccgtatggtgaaagaattggagatcgtgaagaagttgaagaaatgtatcgttatataggtacacttttgaaacaacatcctcatttatcggcctacatattaacaagtaacaaagaatttgaatacttagttaatcgaaaagcgactaaaagacgtaagttgttcaacgggtatattgaatgtacgtactatcagtattggggtaaaaagcaaagtaataaaaattaa

SEQ ID NO: 1428 - protein, 378 aa, Artificial Sequence
  Description of Artificial Sequence: synthetic amino acid sequence
MFQLLAVCPMGLEAVVAKEIQELGYDTQVENGRIFFEGDESAIVRCNLWLRTADRIKIVMGRFNATTFDELFEQTKSLPWETVIDKEGNFPVQGRSVKSTLYSVPDCQAITKKAIVERLKHAHQEKGWLSETGAKYPVEVAILKDNVLLTIDTAGSGLNKRGYRIAQGEAPIKETLAASLIRLANWNGNTPLIDPFCGSGTIAIEACLIAQNIAPGFNRDFVSEQWNMMPPNIYDKFRDEADQLADYDKDIQVYASDIDPEMIEIAKRNAEEVGLGDIIQFNVKDVNTLSIDTDKPVALVGNPPYGERIGDREEVEEMYRYIGTLLKQHPHLSAYILTSNKEFEYLVNRKATKRRKLFNGYIECTYYQYWGKKQSNKN

SEQ ID NO: 1429 - DNA, 675 bp, Artificial Sequence
  Description of Artificial Sequence: synthetic nucleic acid sequence
atgtatcatattttaattagaaaggggcttttaaatatgaagactgttttgattgtaggcgcaaatggtagagtatctatcgaagcgacaaaaattttcctagagaactcaagatttaatgttgatttatttttgagaaatgcgcatcgtatacctgattacgcctctaatagaattaaagtttatgagggagacgctaaaaatattgaggatttagaaagtgctttaaacaatgttgatgttgtttttgcaagtttatcgggatcacttgataaacaagctgaaactatcgtaaaagccatggataacaaaaatgttaagagactgatttttgtagcagctcctggtatttatgatgaactaccagaaccattcaatcaatggaataaagaacaatttggcgaaaaattgaatcgctaccgcaaagcatctgatattatagaaaattcagatttagattacacaataatacgtccaggctggcttacagataaaaatgaaaatgtatatgagatcacagcaaagaacgaaacatttaaaggtactgaagtatcacgtaaaagtgtagcatctttagcagtacaaattgccaaaaacccagaactacactctaaagaaaatattggtgtgaataaacctaatacagaaggtaataaacctgcttggttcaattag

SEQ ID NO: 1430 - protein, 224 aa, Artificial Sequence
  Description of Artificial Sequence: synthetic amino acid sequence
MYHILIRKGLLNMKTVLIVGANGRVSIEATKIFLENSRFNVDLFLRNAHRIPDYASNRIKVYEGDAKNIEDLESALNNVDVVFASLSGSLDKQAETIVKAMDNKNVKRLIFVAAPGIYDELPEPFNQWNKEQFGEKLNRYRKASDIIENSDLDYTIIRPGWLTDKNENVYEITAKNETFKGTEVSRKSVASLAVQIAKNPELHSKENIGVNKPNTEGNKPAWFN

SEQ ID NO: 1431 - DNA, 3438 bp, Artificial Sequence
  Description of Artificial Sequence: synthetic nucleic acid sequence
atggcaataaatgaacaattagatactttatataaattaaaaaaagaattggaaaaatctaataacagacctttaattaataccattaatcaagtaataaaaaaagtttatttaaatcaatacaccgcaacatttgtaggacatttctcagctggaaaatcaacgttaattaatttgttattagaacaagatatactaccaagttctccagtaccaacaacgagcaatacagctatcgtttcagtagccaaggaagacgaaatcattgccaatcttacgcaacaacaatatacaaaattaaaaacgtacaacgatgttaaacaaatgaatcgacaaaatgtcgatgtagaatcgatagaaattaattttccatcaaacaaatttaatctagggtttacatttcaagatacaccgggtgttgactctaacgttgcaacgcatcagtcgagtacagagcaatttatgtatacaagtaacttgttgttttatacagtagactataatcatgtccaatcagcgttgaactttaaatttatgaaacgtattaatgaagttggtataccaattatttttgtgattaatcagattgataaacataatgaagaagaaattacatttgaaacttttaaatcaagagtcgaaaaatcaatcaaagactgggatatcaaacttcaagatacttattacgtttcaaagtttgatcatccacagaatgaaattgacaaactttcaaattttctagtatttatggatcaacatcgtgaatcaacagaagactatgttaatagaaccattcaattcattaccgacgcacaatacatatacattcaaaatgaaatgcaatctattcttgacacccttcaaattaatgaagaacaattcgaggaagcatatattcaatttcaacaaaatcaagaagtcagcgcagaagcacaattgctcaatgactctaatcaattatttaattatttaaaacagaagcgtaaagatatattagataatgcttatatcatgacgtacgatatgcgtgaatctttacggaattatttagaaagcatggcaactgattttaaagtgaatggattttttaataaaaggaagaaaaaagaagaagaacaaatcaaacgacttaatgaggcgaccactcaattgcaagagaaagttaatcaacaagtacgacaaccacttcgtgaagatatgtcatttttaactagattcataaataaacatgctgtgaatgaaaaaatactaaatcaagaatatgacgtcgttccgtcacttatatcagagctatatcaaactcaaacgagcattagcaacacatacgttttaacattttcagatgaagttataaaagctttgaataaaaaaatagaaaatgagtcaacaccactatttgaagaagctgtcaatcatgtacaagttaatgaattatcgagtgatgaaaatgaagataggtatgaatatgatagatacattgaacttaacacattaaaggattcgcttacatcccacaactacaaacattactatatccatttagacgattctttagataaattaattggaagaacagagactcattttgaacttaaacaagaaaattcaactgcttatcatcgtaaacatgagacacaacatcgtaacgagtttgttacatctaatcaagatattaagcgtgcattagatatcgttaaagatgtaccattatttgatcgcactaaacaagatatcaccgataccattctgagactcgataatcaaataacaaaagttggtgtttttggtacatttagcgcaggtaaaagcagcttaatcaacgctctactaggtgaaaactatttagttagttctcctaatccaacaacagcggcaacgacggaattatcatatggtaaagagagtcaaatcacattaaaatcgaaagaacaattactagaggaagttaatcatgtactagaattttatgaaatatcgtttaacacattagacgactttattgagagtgatttagataagttaaaattgaaactagaaaagaaccaacttgcatttattagtgcaattgagaaacattatgaaatgtacacatctatgttagaacattcacttatacacacagtatcgcttgaagaaattaaaaaatggagtgccgaggatgagtatgctactttcgtgaaaactgtacaccttaagctacctttagattggctcaagggtaaaatcattattgattcactcggtttacattccaataatcaaagacacacgaatgaaactgaacaaattctcacttcttctgaccttattttgtatgtaacttacttcaatcattcatttacagataacgacaaagcctttatcgaacatatgaaagatatgaatcaattaaatgaaaatcaagcttttaaaatgataattaatgctgttgacctagctgaagataaacaggatatacaagctgttgaggattatgttgcagatgcactggggcaagttaacatacactctgaaatatatagtgtttcaagtcgtcaaagtttaaatgggaataacattggcataaatgaattaagagaaagtatacaatactttgcaaaggttgaatccagaacaattttagagcaacaaatgacttatcaattgcaacaaatgaatacgtcctttaaaaacatgattaaagattttcatgatgacaacgcaaaattgtcagcgagacaacataaattaaatcactataaaaatcaaacccggttaaatcaagagttgattgatacaactgcacaacgtacttttaatgaagtagaagaacaagtatatcatctaaatgaacggttaaaactacaacttttagatgaggttaaatctgtatttaatagtcagatgacacaaaataacgacttcaatgaggaaaagaaaatttcaactaaaatatatttagatcaaattcatcaacgcttattcttagaacaatcacttattacagaaaggattaaaaaatattttaattcacaactagaagaacaaatcataccagtcatgaaaaagttaaatcagattcatgttattataaatgcaaaatttaatgtggagccatcaatcgttgatacgccattacttcaaattgaacttaattcaatgttgcaatcactaccaaaacagttaactaaacgtaaaatagttaatccaaagtcacaaaaggatattcaagaacacatagctaatcaaactcttgaattattacaagatgatttgaactcattgcgtcgacaattaaatgattatatccacgagatgactcaacttgccgaacatcaatttcaaatgttggagacatccatccaacaacaaattgatgagttactttcattcactatcgatgatacattaatacaacaactagaattgaaaaccacacaattagataatattttatag

SEQ ID NO: 1432 - protein, 1145 aa, Artificial Sequence
  Description of Artificial Sequence: synthetic amino acid sequence
MAINEQLDTLYKLKKELEKSNNRPLINTINQVIKKVYLNQYTATFVGHFSAGKSTLINLLLEQDILPSSPVPTTSNTAIVSVAKEDEIIANLTQQQYTKLKTYNDVKQMNRQNVDVESIEINFPSNKFNLGFTFQDTPGVDSNVATHQSSTEQFMYTSNLLFYTVDYNHVQSALNFKFMKRINEVGIPIIFVINQIDKHNEEEITFETFKSRVEKSIKDWDIKLQDTYYVSKFDHPQNEIDKLSNFLVFMDQHRESTEDYVNRTIQFITDAQYIYIQNEMQSILDTLQINEEQFEEAYIQFQQNQEVSAEAQLLNDSNQLFNYLKQKRKDILDNAYIMTYDMRESLRNYLESMATDFKVNGFFNKRKKKEEEQIKRLNEATTQLQEKVNQQVRQPLREDMSFLTRFINKHAVNEKILNQEYDVVPSLISELYQTQTSISNTYVLTFSDEVIKALNKKIENESTPLFEEAVNHVQVNELSSDENEDRYEYDRYIELNTLKDSLTSHNYKHYYIHLDDSLDKLIGRTETHFELKQENSTAYHRKHETQHRNEFVTSNQDIKRALDIVKDVPLFDRTKQDITDTILRLDNQITKVGVFGTFSAGKSSLINALLGENYLVSSPNPTTAATTELSYGKESQITLKSKEQLLEEVNHVLEFYEISFNTLDDFIESDLDKLKLKLEKNQLAFISAIEKHYEMYTSMLEHSLIHTVSLEEIKKWSAEDEYATFVKTVHLKLPLDWLKGKIIIDSLGLHSNNQRHTNETEQILTSSDLILYVTYFNHSFTDNDKAFIEHMKDMNQLNENQAFKMIINAVDLAEDKQDIQAVEDYVADALGQVNIHSEIYSVSSRQSLNGNNIGINELRESIQYFAKVESRTILEQQMTYQLQQMNTSFKNMIKDFHDDNAKLSARQHKLNHYKNQTRLNQELIDTTAQRTFNEVEEQVYHLNERLKLQLLDEVKSVFNSQMTQNNDFNEEKKISTKIYLDQIHQRLFLEQSLITERIKKYFNSQLEEQIIPVMKKLNQIHVIINAKFNVEPSIVDTPLLQIELNSMLQSLPKQLTKRKIVNPKSQKDIQEHIANQTLELLQDDLNSLRRQLNDYIHEMTQLAEHQFQMLETSIQQQIDELLSFTIDDTLIQQLELKTTQLDNIL

SEQ ID NO: 1433 - DNA, 879 bp, Artificial Sequence
  Description of Artificial Sequence: synthetic nucleic acid sequence
atgcctcaaagagtattgctcgttgatggaatggctttattatttagacatttttatgcaacaagcttacacaatcaatttatgtacaattctaaaggaattcctacaaacggcattcaaggttttgtaagacatatttttagcgctatcaaagaaatcgaacccactcacgtagcagtttgttgggatatggggcaagaaacattcagaaatgaaatgtatgatggttacaaacaaaatcgcccagcaccacctgatgaacttatacctcaatttgattatgttaaagaaatatcgcatcagtttggttttgtaaatgttggtaagcgtaattatgaagctgatgatattattggtagtttagcggaaacatattcacaagaacatgaagtttatatcattaccggagaccgagacttactccaatgcattaatcataatgtagaagtttggcttattaaaaaaggttttacaatatatcaacgttacacgcttgatcgttttattgatgaatatggactaaatcctcaacaattaatagatgtcaaagcttttatgggtgatactgcagatggctattctggtgtaaaagggataggtgaaaaaacagcaattaaattaattcaaaatcatggaactgtcgaaaatgtagtgaacaatttatcatcattaactcccgctcaacagaaaaaaataacaaataatttaaatcatctgcatttatcaaaatcactcgcagaaatatataccaaagttccaattgaaacagacaaactttttaaagagatgacatatgctcatacactaaatgagattttatccatttgtaatgaacatgaactatacgtttcaagtaaatatattgcaactcacctctaa

SEQ ID NO: 1434 - protein, 292 aa, Artificial Sequence
  Description of Artificial Sequence: synthetic amino acid sequence
MPQRVLLVDGMALLFRHFYATSLHNQFMYNSKGIPTNGIQGFVRHIFSAIKEIEPTHVAVCWDMGQETFRNEMYDGYKQNRPAPPDELIPQFDYVKEISHQFGFVNVGKRNYEADDIIGSLAETYSQEHEVYIITGDRDLLQCINHNVEVWLIKKGFTIYQRYTLDRFIDEYGLNPQQLIDVKAFMGDTADGYSGVKGIGEKTAIKLIQNHGTVENVVNNLSSLTPAQQKKITNNLNHLHLSKSLAEIYTKVPIETDKLFKEMTYAHTLNEILSICNEHELYVSSKYIATHL

SEQ ID NO: 1435 - DNA, 1930 bp, Artificial Sequence
  Description of Artificial Sequence: synthetic nucleic acid sequence
atgaagagcaaaccgaaattaaacggtcggaacatctgctcttttttattgagcaaatgtatgagttattcattgtcaaaattatcaacattaaaaacgtataattttcaaatcacatcaaacaacaaagaaaaaacatcaagaataggagtggcaatagctttgaataatcgtgataaattacaaaaatttagtattcgaaaatacgcaattggaacattttctactgtgattgcaacacttgtgttcatgggtatcaatacaaaccatgcaagtgccgacgagttgaatcaaaatcaaaagttaattaaacaattaaatcaaacagatgatgatgattcgaatacgcatagtcaagaaatcgaaaataacaaacaaaattctagtgggcagactgaatcattacgttcatcaactagtcaaaatcaagcaaatgcacgactgtcggatcaattcaaagacactaatgaaacatcgcaacaattacctacaaatgtttcggatgatagtatcaatcaatcgcatagtgaagcaaatatgaataacgaaccattgaaagttgataatagtactatgcaagcacatagtaaaatagtaagcgatagcgatgggaatgcttctgaaaataaacatcataaactaacagaaaatgtacttgcagaaagccgagcaagtaaaaatgacaaagagaaagagaatctacaagagaaagataaatcgcagcaagtacatccaccattagataaaaatgcattacaagctttttttgacgcatcatatcacaattacagaatgattgatagagatcgtgcggatgcaacagaatatcaaaaagtcaaatctacttttgactacgtcaatgacttactaggtaataatcaaaatattccttcagaacagcttgtttcggcatatcaacaattagagaaagcattagaacttgcacgtacgttaccacaacgatctactacagaaaaacgtggtagaagaagtacgagaagtgttgttgagaatcgttcatcaagaagcgattacttagatgctagaactgaatattatgtttcaaaagacgatgatgattctggtttccctcctggtactttcttccatgcttcaaatagaagatggccttataatttaccaagatctaggaacatcttacgtgcttctgatgtacaaggtaatgcttatatcactacaaaacgacttaaagatggatatcaatgggatattttatttaatagtaatcataaagggcatgaatatatgtactattggtttggacttccaagtgatcaaacaccaactggtccagtaactttcactattatcaaccgtgatggttcaagtacatctactggtggcgttggatttggatcaggtgcaccactacctcaattttggagatcagcaggtgctattaattctagcgtagcgaatgattttaaacatggctccgctacaaattatgcattttatgatggtgttaataatttttctgactttgctagagggggagaattatacttcgacagagaaggcgctacacaaactaataaatattatggcgatgaaaacttcgcattgctaaatagtgagaaaccagatcaaataagaggattagatacaatatatagttttaaaggtagtggtgatgtaagttatcgtatttcatttaaaactcaaggagctccaactgcaagattgtattatgctgctggcgcgcgttctggtgaatataaacaagcaacgaactataaccaactctatgtcgaaccttataagaattatcgaaatcgagtacagtcaaatgtccaagttaaaaatcgtacacttcatttaaaaagaacaatcagacaattcgatcctacattacagagaactactgatgttcctattttggatagtgacggttccggaagtattgatt

SEQ ID NO: 1436 - protein, 644 aa, Artificial Sequence
  Description of Artificial Sequence: synthetic amino acid sequence
  MOD_RES (644): variable amino acid
MKSKPKLNGRNICSFLLSKCMSYSLSKLSTLKTYNFQITSNNKEKTSRIGVAIALNNRDKLQKFSIRKYAIGTFSTVIATLVFMGINTNHASADELNQNQKLIKQLNQTDDDDSNTHSQEIENNKQNSSGQTESLRSSTSQNQANARLSDQFKDTNETSQQLPTNVSDDSINQSHSEANMNNEPLKVDNSTMQAHSKIVSDSDGNASENKHHKLTENVLAESRASKNDKEKENLQEKDKSQQVHPPLDKNALQAFFDASYHNYRMIDRDRADATEYQKVKSTFDYVNDLLGNNQNIPSEQLVSAYQQLEKALELARTLPQRSTTEKRGRRSTRSVVENRSSRSDYLDARTEYYVSKDDDDSGFPPGTFFHASNRRWPYNLPRSRNILRASDVQGNAYITTKRLKDGYQWDILFNSNHKGHEYMYYWFGLPSDQTPTGPVTFTIINRDGSSTSTGGVGFGSGAPLPQFWRSAGAINSSVANDFKHGSATNYAFYDGVNNFSDFARGGELYFDREGATQTNKYYGDENFALLNSEKPDQIRGLDTIYSFKGSGDVSYRISFKTQGAPTARLYYAAGARSGEYKQATNYNQLYVEPYKNYRNRVQSNVQVKNRTLHLKRTIRQFDPTLQRTTDVPILDSDGSGSIDX

SEQ ID NO: 1437 - DNA, 399 bp, Artificial Sequence
  Description of Artificial Sequence: synthetic nucleic acid sequence
atgaggatgttgtttcaaaagtgtacctatataacgatacatttcttcaacttcttcacgatctccaattctttcaccatacggtggattgccaacaagtgctacaggcttgtcggtatcaatagacaaagtattcacatctttaacattgaactgtatgatatctccgagaccaacttcttctgcattacgttttgcaatttcaatcatttctggatcaatatcagaagcatatacttgtatgtctttatcatagtcagccaattgatcagcttcatcacgaaatttgtcataaatattaggtggcatcatattccattgttcagatacaaaatccctattaaaaccaggtgcaatattttgtgcaataagacatgcttcaatagcaatggtgcctga

SEQ ID NO: 1438 - protein, 132 aa, Artificial Sequence
  Description of Artificial Sequence: synthetic amino acid sequence
MRMLFQKCTYITIHFFNFFTISNSFTIRWIANKCYRLVGINRQSIHIFNIELYDISETNFFCITFCNFNHFWINIRSIYLYVFIIVSQLISFITKFVINIRWHHIPLFRYKIPIKTRCNILCNKTCFNSNGA

SEQ ID NO: 1439 - DNA, 642 bp, Artificial Sequence; identical to SEQ ID NO: 1113
  Description of Artificial Sequence: synthetic nucleic acid sequence

SEQ ID NO: 1440 - protein, 213 aa, Artificial Sequence; identical to SEQ ID NO: 1114
  Description of Artificial Sequence: synthetic amino acid sequence

SEQ ID NO: 1441 - DNA, 678 bp, Artificial Sequence; identical to SEQ ID NO: 955
  Description of Artificial Sequence: synthetic nucleic acid sequence

SEQ ID NO: 1442 - protein, 225 aa, Artificial Sequence; identical to SEQ ID NO: 956
  Description of Artificial Sequence: synthetic amino acid sequence

SEQ ID NO: 1443 - DNA, 363 bp, Artificial Sequence; identical to SEQ ID NO: 957
  Description of Artificial Sequence: synthetic nucleic acid sequence

SEQ ID NO: 1444 - protein, 120 aa, Artificial Sequence; identical to SEQ ID NO: 958
  Description of Artificial Sequence: synthetic amino acid sequence

SEQ ID NO: 1445 - DNA, 366 bp, Artificial Sequence
  Description of Artificial Sequence: synthetic nucleic acid sequence
atgaaatggttaaaaatcattatattaattttatctttagttccaatagaatttatcggattatttactgattatcaaacaggtttattaataggttacatcccatttatagtagttgctatattaatgagtatatccatttttaaatttggctttaaaaataatataagtattgtaataggtagatgcattggaatatttctttcttggggatgtgttcatttatttatgaacatttacgattcatcagattattttaaacctcttaccacagatattttcgcattatttttaggagctattcatttcatagttattatgcttatatatttagttatctatggtttttctcatcgcaataattaa

SEQ ID NO: 1446 - protein, 121 aa, Artificial Sequence
  Description of Artificial Sequence: synthetic amino acid sequence
MKWLKIIILILSLVPIEFIGLFTDYQTGLLIGYIPFIVVAILMSISIFKFGFKNNISIVIGRCIGIFLSWGCVHLFMNIYDSSDYFKPLTTDIFALFLGAIHFIVIMLIYLVIYGFSHRNN

SEQ ID NO: 1447 - DNA, 336 bp, Artificial Sequence; identical to SEQ ID NO: 1131
  Description of Artificial Sequence: synthetic nucleic acid sequence

SEQ ID NO: 1448 - protein, 111 aa, Artificial Sequence; identical to SEQ ID NO: 1132
  Description of Artificial Sequence: synthetic amino acid sequence

SEQ ID NO: 1449 - DNA, 1050 bp, Artificial Sequence
  Description of Artificial Sequence: synthetic nucleic acid sequence
atgatagtcagtttaataattacacccattattattgtaatatcaaaaaaattagatttagtagatcgtcctaatttcagaaaagtacatacgaaacctatctcagtgatgggaggaacggtcattttattttctttcttaatagggatttggctcggacaccctattgaacgtgaggttaaaccgcttatattaggtgcaattacaatgtatatggttggattgattgatgatatttacgatctaagaccttatttaaagttagcaggtcaaattgttgcagctttaattgttacgttttatggaattacaatagactttatttcattgccaattggtccaacgattcattttggcatattcagcattcctattacagtaatatggattgtagcaattaccaatgctattaatcttatcgacggacttgatggacttgcctcaggcgtctcagcattggcattaatgactattggattcatcgctattttacaagcgaacatatttattatcatgatttgctgtgtacttttagggtctttacttggtttcttattctataactttcacccagcgaaaattttcctaggtgatagtggtgcattaatgataggatttattatcggtttcttatccttactcggctttaagaatatcacatttattgcattattctttcctatagttatattagcggtgccatttattgatacattatttgcaatgattcgtcgaatgaaaaaagggcaacatataatgcaagcggacaagtcacatttacatcataaattacttgctttaggatatacgcatagacaaaccgttttacttatttattcaatagcgattatgtttagtttatctagtgttatcctctatttatcccaaccgttgggtgcacttatgatgttcattctcattgtctttacgattgagttgatcgttgaatttactggattaatagatgataattatcgaccaatattaaatttaattacaaaaaaaggaaatggtaagcaacatcattatgatgagcatcaccgttcataa

SEQ ID NO: 1450 - protein, 349 aa, Artificial Sequence
  Description of Artificial Sequence: synthetic amino acid sequence
MIVSLIITPIIIVISKKLDLVDRPNFRKVHTKPISVMGGTVILFSFLIGIWLGHPIEREVKPLILGAITMYMVGLIDDIYDLRPYLKLAGQIVAALIVTFYGITIDFISLPIGPTIHFGIFSIPITVIWIVAITNAINLIDGLDGLASGVSALALMTIGFIAILQANIFIIMICCVLLGSLLGFLFYNFHPAKIFLGDSGALMIGFIIGFLSLLGFKNITFIALFFPIVILAVPFIDTLFAMIRRMKKGQHIMQADKSHLHHKLLALGYTHRQTVLLIYSIAIMFSLSSVILYLSQPLGALMMFILIVFTIELIVEFTGLIDDNYRPILNLITKKGNGKQHHYDEHHRS

SEQ ID NO: 1451 - DNA, 673 bp, Artificial Sequence
  Description of Artificial Sequence: synthetic nucleic acid sequence
atgaagattgcagttatgaccgattctacaagttatttaccacaacatataatagaacaatataacataccagtcgcttcactaagtgtaactttcgatgatggagtgaatttcactgagagtgatgatttttctgtagatgatttttataaaaaaatggcttcatctaaaactataccaacaacaagccaacctgctattggcgattggattgaaaattttgagagattaagagaacaaggatacactgatgtcatcgtgattaacttatcaagtggtataagcggaagctatccttcagcaacacaagctggtgaaatggttgaagatattcaagtacatacgtttgatagccgtcttgctgcgatgattgaaggtagctttgcaatttacgctgctcaattggtacaaaagggatataaacctgatgatattattaatgaactaactgaaataagacaacatattggtgcatacttaattgttgatgatttaaaaaatttacaaaaaagtggtcgtatcactggagctcaagcttgggtaggtacattattgaaaatgaaacctgtcttgcgttttgaagaagatggtaaaatacatccacacgaaaaagtacgtactaaaaaacgtgcgctaaaatctttagaaacaaacatttttaaagaaatagagt

SEQ ID NO: 1452 - protein, 225 aa, Artificial Sequence
  Description of Artificial Sequence: synthetic amino acid sequence
  MOD_RES (225): variable amino acid
MKIAVMTDSTSYLPQHIIEQYNIPVASLSVTFDDGVNFTESDDFSVDDFYKKMASSKTIPTTSQPAIGDWIENFERLREQGYTDVIVINLSSGISGSYPSATQAGEMVEDIQVHTFDSRLAAMIEGSFAIYAAQLVQKGYKPDDIINELTEIRQHIGAYLIVDDLKNLQKSGRITGAQAWVGTLLKMKPVLRFEEDGKIHPHEKVRTKKRALKSLETNIFKEIEX

SEQ ID NO: 1453 - DNA, 378 bp, Artificial Sequence
  Description of Artificial Sequence: synthetic nucleic acid sequence
atgtcattatctacattgaaaagggatcatattaaaaagaatttaagagacactgaatacgatgttgttatcgtaggtggcggtattacaggtgcaggtattgctttagatgcaagtaatcgtgggatgaaggtagctttagtagagatgcaagactttgcacaaggtacaagttcacgctcaactaaacttgtacacggtggtttaagatatttaaaacaactgcaagtaggggtagttgcagaaacaggtaaagaacgtgctattgtttatgaaaatggtccacatgtgacaacaccagaatggatgcttttacctatgcataaaggtggtacatttggtaaattctcaacttctattggactagctatgtactga

SEQ ID NO: 1454 - protein, 125 aa, Artificial Sequence
  Description of Artificial Sequence: synthetic amino acid sequence
MSLSTLKRDHIKKNLRDTEYDVVIVGGGITGAGIALDASNRGMKVALVEMQDFAQGTSSRSTKLVHGGLRYLKQLQVGVVAETGKERAIVYENGPHVTTPEWMLLPMHKGGTFGKFSTSIGLAMY

SEQ ID NO: 1455 - DNA, 1305 bp, Artificial Sequence
  Description of Artificial Sequence: synthetic nucleic acid sequence
atgtacgatcgtctagctggtgtcaaaaaatccgaacgtaaaaaaatgttatctaagcaagaaacgttaaataaagaacctttagttaaacgtgatggattaaaaggcggtggctactatgtggaataccgcactgatgatgcgcgtttaactattgaagttatgaaaaaagctgctgaaaatggagcagaaatcattaattatacaaaatcagaacacttcacttatgattccaataagaaagtaaatggtattgaagtattggatatgattgatggcgaaacgtatgcgattaaagctaaaaaagttattaatgcttctggtccttgggttgatgaagtgagaagtggcgattatgcacgtaacaataagcaattaagattaactaaaggtgtacacgttgttatagatcaatctaaattcccattaggtcaagcagtttactttgatactgaaaaagacggacgcatgatttttgcgattccacgtgaaggaaaagcttatgtaggaacaactgacacgttttatgataatgaaaaagcaacacctttaacaacacaagaagatagagactacttaattaatgcaattaactatatgttcccaacagttaatgttaaagatgaagatattgaatcaacatgggctggtattcgtccgctaattcttgaaaaaggtaaagatccttctgaaatctcacgtaaagatgaagtttgggaaggtgaatctggattattaactatagcaggcggtaaattaactggttatcgtcatatggcactagaaattgttgatttattagctaaacgtttaaaacaagaatacggattgaaatttgaatcatgtgccacaaaaaatctaaaaatttccggtggtgacgttggcggaagcaaaaactttgaacactttgttgaacaaaaagttgatgcagctaaaggatttggaattgatgaagatgtggcacgtcgcttagcaagtaaatatggttcaaatgttgatcaactatttaatattgctcaaacggcaccatatcatgatagtaaattaccattagaaatttatgttgaattagtttatagtattcaacaagaaatggtttacaaaccaactgacttcttagtacgtcgttctggcaaattatactttaatattcaagatgtgttagattataaaaatgctgtgatagatgttatggcggatatgcttaattatagtgaaactcaaaaagaagcttatactgaagaagtagaagttgcgattgatgaggcacgtacaggtaatgatcaacctgcaactaaagcttaa

SEQ ID NO: 1456 - protein, 434 aa, Artificial Sequence
  Description of Artificial Sequence: synthetic amino acid sequence
MYDRLAGVKKSERKKMLSKQETLNKEPLVKRDGLKGGGYYVEYRTDDARLTIEVMKKAAENGAEIINYTKSEHFTYDSNKKVNGIEVLDMIDGETYAIKAKKVINASGPWVDEVRSGDYARNNKQLRLTKGVHVVIDQSKFPLGQAVYFDTEKDGRMIFAIPREGKAYVGTTDTFYDNEKATPLTTQEDRDYLINAINYMFPTVNVKDEDIESTWAGIRPLILEKGKDPSEISRKDEVWEGESGLLTIAGGKLTGYRHMALEIVDLLAKRLKQEYGLKFESCATKNLKISGGDVGGSKNFEHFVEQKVDAAKGFGIDEDVARRLASKYGSNVDQLFNIAQTAPYHDSKLPLEIYVELVYSIQQEMVYKPTDFLVRRSGKLYFNIQDVLDYKNAVIDVMADMLNYSETQKEAYTEEVEVAIDEARTGNDQPATKA

SEQ ID NO: 1457 - DNA, 876 bp, Artificial Sequence
  Description of Artificial Sequence: synthetic nucleic acid sequence
gtgaaaattgataaagcaaaaaagagtactattggtattgttcatcttttccatggcatggctgaacatatggaccgttatcaagagttagttgaggctttaaatacacaaggttatgacgttgttagacataatcaccgtggacatggtaaagaaatagatgagaatgaacgtggtcattttaatagcatgaatcaaattgtagatgatgcttatgaaattattgagacattatatcttgaagagctcaatgtaccctatattatcataggtcattcaatgggctccattattgctagatcatttgttgaaaagtatcctgacattgctcaaggtttaattcttacaggaacaggtatgttccccaagtggaaaggtgtaccaatacgtttagcaatgaagttagttacatttatttttgggaaacgacgtcgactcaagtgggtgaatcaattattgaataaaactttcaataaaaaaatcactcaacctcgaacagatagtgattggatttctacacgtcaggatgaagttgataaatttgtggaagatgaattttgtggattcaaagtatctaatcagctcatttatcaaactttaaagaccatgatgaagacagtagaacgacaacaactaaaaagaatggacaaagaactacctatactatttatttctgggaaagatgatccttttggtgaatatggtaaaggtataaagcatttagctagattatataaaagagcaggtattaaacatataacagtacaactatataaacataagcgtcatgaaatattatttgaagaagattatttgaaaacatggcaacacatgtttgaatggatggaaaagcaaattttgaaaaaacaaaagtga

SEQ ID NO: 1458 - protein, 291 aa, Artificial Sequence
  Description of Artificial Sequence: synthetic amino acid sequence
VKIDKAKKSTIGIVHLFHGMAEHMDRYQELVEALNTQGYDVVRHNHRGHGKEIDENERGHFNSMNQIVDDAYEIIETLYLEELNVPYIIIGHSMGSIIARSFVEKYPDIAQGLILTGTGMFPKWKGVPIRLAMKLVTFIFGKRRRLKWVNQLLNKTFNKKITQPRTDSDWISTRQDEVDKFVEDEFCGFKVSNQLIYQTLKTMMKTVERQQLKRMDKELPILFISGKDDPFGEYGKGIKHLARLYKRAGIKHITVQLYKHKRHEILFEEDYLKTWQHMFEWMEKQILKKQK

SEQ ID NO: 1459 - DNA, 990 bp, Artificial Sequence
  Description of Artificial Sequence: synthetic nucleic acid sequence
atgacaaagccttttttaatcgttattgtaggtccaactgcttcaggtaaaactgagttaagtattgaagttgctaaaaaatttaatggagaaattattagcggagattcaatgcaggtctatcaaggaatggatattggtacagcaaaagttacaactgaagaaatggaaggtataccacattatatgatagatattttgcctccagatgcttccttttctgcatatgaatttaaaaaaagggcagaaaaatatattaaagatattactagaagaggcaaggtgcctattatagcaggaggaacaggactatatatacaatctctcttatacaactatgcttttgaagatgaatccatatctgaagataaaatgaaacaagttaaattaaagttaaaagaacttgagcatctaaataataataagctccacgaatatttagcttcattcgacaaagaatcagccaaggatatacatcctaataacagaaaaagagtgttgcgagcaatagaatattatttgaaaacaaaaaaacttttaagttctcgcaagaaagtgcaacaatttactgaaaattatgatacattattaatagggattgaaatgtcgcgtgaaacattatatttaagaataaataaacgtgttgatattatgttgggccacggattatttaatgaagtgcaacatctcgttgaacaaggttttgaagcgagtcaaagtatgcaagccattgggtataaagagcttgtacccgttattaagggaaatataagcatggaaaatgctgtagagaaattaaaacagcattctcgacaatatgctaaaagacagttgacttggtttaaaaataaaatgaatgttcattggttaaataaagaaaggatgtcacttcaaatgatgttagatgagattacaacccaaataaataaaaggagttctaaccatgattgcaaacgaaaacatccaagaccaagcactagagaactttaa

SEQ ID NO: 1460 - protein, 329 aa, Artificial Sequence
  Description of Artificial Sequence: synthetic amino acid sequence
MTKPFLIVIVGPTASGKTELSIEVAKKFNGEIISGDSMQVYQGMDIGTAKVTTEEMEGIPHYMIDILPPDASFSAYEFKKRAEKYIKDITRRGKVPIIAGGTGLYIQSLLYNYAFEDESISEDKMKQVKLKLKELEHLNNNKLHEYLASFDKESAKDIHPNNRKRVLRAIEYYLKTKKLLSSRKKVQQFTENYDTLLIGIEMSRETLYLRINKRVDIMLGHGLFNEVQHLVEQGFEASQSMQAIGYKELVPVIKGNISMENAVEKLKQHSRQYAKRQLTWFKNKMNVHWLNKERMSLQMMLDEITTQINKRSSNHDCKRKHPRPSTREL

SEQ ID NO: 1461 - DNA, 1251 bp, Artificial Sequence
  Description of Artificial Sequence: synthetic nucleic acid sequence
atgtataacgtgacacagcatgcgacttatagaacaaaaaataaacgagaaactgctgtattaatcggtgtacatgctcaaacggatcgtcaatttaattttgaatctactatggaagagctcgatgctttatcacaaacttgccaacttaatgttaaaggacaaatcactcaaaatagagagcaatttgaccataaatattatgttggaaaaggaaaaatcgatgaaataaaatctttcatagaattccatgatatagatgttgtcgtaaccaacgatgaattaacgacggcacagtctaaaacgttaaatgataatttgggcattaaaatcatcgatagaacccaattaattttagagatattcgcgttgcgagcgagaagtagagagggaaagctacaagtagaacttgcacaactcgattatttgttaccaagactacatggtcatggtaaaagcctatctcgtcttggtggtggcataggaacaagaggcccaggtgaaacaaaattagaaatggatcgtcgccatattagaacacgtatgaatgagattaaacatcaattaaaaacggtcgtggatcatcgggaaagatatagaaataaacgtgaacaaaatcaagtttttcaaatcgctttagttggttatacaaatgcaggaaaatcgtcatggtttaatgttttagctaatgaggagacctatgaaaaaaatattttgtttgcaacattagatcccaaaacacgacaaatacaagtgaatgaaggatttaatttaattatttctgatacggtaggatttattcagaaattaccaacgacattggtggctgcgtttaaatctacactagaagaagctaaaggtgcagacgtacttatgcatgtcgtcgatgcaagtcattcggaataccgtactcaaattgacactgtaaatcaaattattaatgatttagatatggaccatattccacaagtagttatttttaataaaaaagacttatgtaacgaacagatggatgtacctgtatctaaatctgcgcatgtttttgtatctagtcgtgatgaaaatgataaacaaaaggtgaaaaatttagtaattcaagaaataaaaaatagtctcagcccatacgaagaaattgtagatagtgctgatgcagatagattatattttcttaaacaacacacgcttgttactgaattaatatttgacgaaacacaagcatcttatcgtatcaaaggatttaaaaaattataa

SEQ ID NO: 1462 - protein, 416 aa, Artificial Sequence
  Description of Artificial Sequence: synthetic amino acid sequence
MYNVTQHATYRTKNKRETAVLIGVHAQTDRQFNFESTMEELDALSQTCQLNVKGQITQNREQFDHKYYVGKGKIDEIKSFIEFHDIDVVVTNDELTTAQSKTLNDNLGIKIIDRTQLILEIFALRARSREGKLQVELAQLDYLLPRLHGHGKSLSRLGGGIGTRGPGETKLEMDRRHIRTRMNEIKHQLKTVVDHRERYRNKREQNQVFQIALVGYTNAGKSSWFNVLANEETYEKNILFATLDPKTRQIQVNEGFNLIISDTVGFIQKLPTTLVAAFKSTLEEAKGADVLMHVVDASHSEYRTQIDTVNQIINDLDMDHIPQVVIFNKKDLCNEQMDVPVSKSAHVFVSSRDENDKQKVKNLVIQEIKNSLSPYEEIVDSADADRLYFLKQHTLVTELIFDETQASYRIKGFKKL

SEQ ID NO: 1463 - DNA, 510 bp, Artificial Sequence
  Description of Artificial Sequence: synthetic nucleic acid sequence
atgcaagattttagcaatttagttgaagaagttgaaaacacacttattccttactttagaaaaattgaaaagcgtgcattatttaatcaggaaaaggtcttaaatgcttttcaccatgttaaagctagcgaaagtgatttacaggggtctacgggttatggatatgatgattttgggagagaccatttagaacaaatttatgcgcacacatttaaagcagatgacgcacttgtaagacctcaaattatttcaggtactcatgctattactttagctttacaaagtacgttaaaaaacaatgatgaactactttatattacaggtagtccatatgatacacttctagaagtcattggtataaatggcaatggtgttgaaagtcttaaagaatatggtgttcgctataatgaagtcgaattacgtgacggtcgaattgatattcctaaagtcatcactgcaattaatgacaatacaaaaagttgtagcaattcaacgatcaaaaggatatga

SEQ ID NO: 1464 - protein, 169 aa, Artificial Sequence
  Description of Artificial Sequence: synthetic amino acid sequence
MQDFSNLVEEVENTLIPYFRKIEKRALFNQEKVLNAFHHVKASESDLQGSTGYGYDDFGRDHLEQIYAHTFKADDALVRPQIISGTHAITLALQSTLKNNDELLYITGSPYDTLLEVIGINGNGVESLKEYGVRYNEVELRDGRIDIPKVITAINDNTKSCSNSTIKRI

SEQ ID NO: 1465 - DNA, 744 bp, Artificial Sequence
  Description of Artificial Sequence: synthetic nucleic acid sequence
atggcagttctttgggcaattattgctaaagacttaccagaacaacataaaatggtaaacgatgccgagaaaagatttattactcaaaatcgtgatattgtcgcaactgagaaatctttaccaccgtggaaacgttttttaagtcatttcagtttctacgcaatcgcattgcaatactttgtagttcagtttgttatcgcgttgttcctaatatggttaccaacatatttaactgaacaatatcatgtgaatttcaaagaaatgactatcagtgcattaccttggttatttatgttcttcttaattttatttgctggagctatttcagacaagattttgaatacaggtcaatcacgttttgttgcacgtggcgtaattgcgattgcgggatttgtggtattctcaatttcaattttcttagcagtacatacagacaacttatatgtaaccattttctggttatcactttgtttaggtggcgtaggtatttctatgggaatgagttgggctgcagccactgacttaggtcgtaatttctctggaactgtgtcaggttggatgaacttatggggaaatgttggcgcacttattagtcctttacttgcaggaattgttgtagatcatttaggatggtcaatgacattacaactcttaatcgttccggctattatagcagcaattctatggttcttcgttaaaccagacaaacctcttattgttagtgaagaacacgttaataaataa

SEQ ID NO: 1466 - protein, 247 aa, Artificial Sequence
  Description of Artificial Sequence: synthetic amino acid sequence
MAVLWAIIAKDLPEQHKMVNDAEKRFITQNRDIVATEKSLPPWKRFLSHFSFYAIALQYFVVQFVIALFLIWLPTYLTEQYHVNFKEMTISALPWLFMFFLILFAGAISDKILNTGQSRFVARGVIAIAGFVVFSISIFLAVHTDNLYVTIFWLSLCLGGVGISMGMSWAAATDLGRNFSGTVSGWMNLWGNVGALISPLLAGIVVDHLGWSMTLQLLIVPAIIAAILWFFVKPDKPLIVSEEHVNK

SEQ ID NO: 1467 - DNA, 1917 bp, Artificial Sequence
  Description of Artificial Sequence: synthetic nucleic acid sequence
atgcaacaaatcattaactctttgatacacttcgaccgttcaaaaattgatatagctaaaggaatacgacaaggatttttaatgatactaccagcattgataggttacttattaggattccctatgtttggtattctaatatcaacaggtacgctagcacatgtctacgtttttagtggatcaccacaatctatgttaaaaacagtcatcacctgttcactatcatttactatttgcatgattcttggcactttaacagtatctcagcctattttatttggattactattactgattgttgttacaatcccatattatacgtttaatgcactaaaaatcgctggtccatcatcgacattctttttagtaacgttttgcttatctataaacttaccgatagccccagaagaagcgcttttacgtggatctgcaattctcattggtggtatattggctaccataacagtaattttaacaatcatatttgctaaagagaaagcagaagacagagcaattcatgcggattttaaaacattacataacttgctacatcattttgatgagccagaggatttcaaagcatatgctcgaaacgctgttacagaatttagaaattctgaaaaacttttaattacctcaacatcaggtggtaatggaaaattaagtaaaaggtttcagaaattaattttattacacacatcagcacaagggatatattcagaattactagaactcaatgaaaatcatattcgtccattaccaagtgacttagttgaaatgatggatcatatcattaatagtgttcaacaacctaaacaacaatatcgaccgtggtcaaaagttgttgatgtggcaccagaatttcaaaatttaatggatcatattttgaaaatagatgaaatgattcacgcaaacgataatcaaattaaatatgaagcagatattcgcaagcctttatatagtaagcgaatatatcaaaatctaactttcgactcaattgtatttagaaatgctttgcaatatacagttattatggcagtagctatatttattgctctagcgtttaacattcaaaaagcgtattgggtgccattgtcagcgcataccatcatgttaggtaatgtgacaacgattcgtacgttagacaggtcacttgctagaggtattggaacgataatcgggactattgttttgtcgggaatcttggcatttcatatcgatcctattttcgctattatcattatgggattttctgccatgatgacggaagcgtttgtggcatctaactatgcatttgcagtcatttttattacgacacaagtcattatgctcaatggtctagcctctcaaaatttaaatattgagatagcgtacacccgaattattgacgttctgataggtatagctattgcagttattggtatattcatactcgcgcgtaaaactgcatcctcaatgttatctgatgctattgccgaattggtacgtaaagaaggtattttatttcattatttattttcaaaaaataaacaggaaacgaatgaacgtgatagggtagaaagtttaaatttaaacgtcaaaatcagtaatgtgacacagatttacaattcagcgaatggtgaattgtttagtaataaagaagcggtaaggtattactatccaagcatatttgctctagaggaaataagttttatgctagagcgtgccatgaataataaacatcgacaaacaataaatgatgatttaatgggtgaatatttagtcgtatttgaaaatatagctaagcatttccaatttcaagcagatttaaatctcagagacatgcaaccattacctcaatacaattacatccgtgcttcccttatgaatatacaacgtaattgtgttgaacaacgtcaggccatcacaaaagattaa

SEQ ID NO: 1468 - protein, 638 aa, Artificial Sequence
  Description of Artificial Sequence: synthetic amino acid sequence
MQQIINSLIHFDRSKIDIAKGIRQGFLMILPALIGYLLGFPMFGILISTGTLAHVYVFSGSPQSMLKTVITCSLSFTICMILGTLTVSQPILFGLLLLIVVTIPYYTFNALKIAGPSSTFFLVTFCLSINLPIAPEEALLRGSAILIGGILATITVILTIIFAKEKAEDRAIHADFKTLHNLLHHFDEPEDFKAYARNAVTEFRNSEKLLITSTSGGNGKLSKRFQKLILLHTSAQGIYSELLELNENHIRPLPSDLVEMMDHIINSVQQPKQQYRPWSKVVDVAPEFQNLMDHILKIDEMIHANDNQIKYEADIRKPLYSKRIYQNLTFDSIVFRNALQYTVIMAVAIFIALAFNIQKAYWVPLSAHTIMLGNVTTIRTLDRSLARGIGTIIGTIVLSGILAFHIDPIFAIIIMGFSAMMTEAFVASNYAFAVIFITTQVIMLNGLASQNLNIEIAYTRIIDVLIGIAIAVIGIFILARKTASSMLSDAIAELVRKEGILFHYLFSKNKQETNERDRVESLNLNVKISNVTQIYNSANGELFSNKEAVRYYYPSIFALEEISFMLERAMNNKHRQTINDDLMGEYLVVFENIAKHFQFQADLNLRDMQPLPQYNYIRASLMNIQRNCVEQRQAITKD

SEQ ID NO: 1469 - DNA, 414 bp, Artificial Sequence
  Description of Artificial Sequence: synthetic nucleic acid sequence
atgccttggacgatggaagattatcctcaaagttggaaaaactttgaagaactcgaacggaaaaaagcgattgatattggtaatgcgatgctcaaagatggctataaagaatctgatgtgatacctattgctacaaatcaagctgaaaaatggtatgaacatgcttcaaaagaagaattagagacgttaaaaaacaaacatatcacgcaacatcaagaagatgaatcagctaatcctaaacttaacgaagaaaatgttcatgtatattatgaagatcagctatggaaagtaaaatctaaagaggctagacgagcttcagatacatttgacacaaaatctgaagcagttaaccgtgcacaacatatcgcagagaataaaggtaccaaagtgattgagcatcgaaaagatgagtga

SEQ ID NO: 1470 - protein, 137 aa, Artificial Sequence
  Description of Artificial Sequence: synthetic amino acid sequence
MPWTMEDYPQSWKNFEELERKKAIDIGNAMLKDGYKESDVIPIATNQAEKWYEHASKEELETLKNKHITQHQEDESANPKLNEENVHVYYEDQLWKVKSKEARRASDTFDTKSEAVNRAQHIAENKGTKVIEHRKDE

SEQ ID NO: 1471 - DNA, 915 bp, Artificial Sequence
  Description of Artificial Sequence: synthetic nucleic acid sequence
atgggaacacctgatttttcaacgaaaattttagagatgttaattgctgagcatgaagttatcgctgtagtgacacaacctgatagaccagtgggacgtaagaaagtgatgacaccaccaccagtaaaaagagtagctacaaagcatcaaataccggtatatcaacctgaaaaacttaaagattctcaagaattagaatcgttactttctttagaatcagatttaatagtaacggctgcgttcggtcaactattaccagagtccttactcaatgcacctaaattaggagctattaatgtccatgcatcattgctacctaagtatagaggaggagcacctatacatcaggctataattgatggtgaagaagaaactggaatcacgattatgtatatggttaaaaaacttgatgcaggtaatatcatctcgcaacaatcaattcgtattgaagaagaagataatgttggcgcaatgcatgataaattaagctttttaggtgccgaattattaaagaagacacttcctagtatcattgataataccaatgacagtatccctcaagatgatgcacttgcaacatttgcatctaatattcgtcgtgaagacgagagagttgattggaatatgagtgcacaagcaattcataaccatattagaggactgtctccatggccagttgcttatacaactatgaatgaaaagaatctcaaattatttagcgctttcattgtgaaagggaaaaaaggtaatccaggaacaattattgaaactactaagcatgaactcatcatagctaccggttctgatgatgccatcgcacttactgagattcaacctgcagggaaaaaacgtatgaaagttactgattatttaagtggtgtacaagagtcgttagttgggaaagttctattatga

SEQ ID NO: 1472 - protein, 304 aa, Artificial Sequence
  Description of Artificial Sequence: synthetic amino acid sequence
MGTPDFSTKILEMLIAEHEVIAVVTQPDRPVGRKKVMTPPPVKRVATKHQIPVYQPEKLKDSQELESLLSLESDLIVTAAFGQLLPESLLNAPKLGAINVHASLLPKYRGGAPIHQAIIDGEEETGITIMYMVKKLDAGNIISQQSIRIEEEDNVGAMHDKLSFLGAELLKKTLPSIIDNTNDSIPQDDALATFASNIRREDERVDWNMSAQAIHNHIRGLSPWPVAYTTMNEKNLKLFSAFIVKGKKGNPGTIIETTKHELIIATGSDDAIALTEIQPAGKKRMKVTDYLSGVQESLVGKVLL

SEQ ID NO: 1473 - DNA, 1296 bp, Artificial Sequence
  Description of Artificial Sequence: synthetic nucleic acid sequence
gtgcgaacatatgcattagaaacaatcaacgacgtcctaaataaaggggcttatagtaatttgaaaattaatgaagttctatctacaaataacattaatacagtagataaaaatttattcacagaattagtatatggaacaataaaaagaaaatactcgttagattatctactaaagccttttatcaaaactaaaatcaaatcatgggtgcgacaattactgtggatgagtttatatcaatatttatatttagataaaatacctaaccatgctattattcatgaagcggtagatatagcaaaaaaacgtggtggctatcacacagggaatatagtcaatggtgtattacgaacagtaatgcgcactgaattgccaagctttgaagatatagatgatactaaaaaaagaattgcaattcaatatagtcttcccaaatggattgttgatcattgggttacacattttggagtagaaaaaactgaaaacattgcacgatcttttttagagcctgtaaccacaaccgtgcgcgccaatatatctcgtgattctattgattcaattatctctaagttagaacaggaaggttaccacgttaaaaaagacgatatgttaccattttgtcttcatatatcaggtatgcctgtggttaattcaaacgcttttaaagaaggttatatctctattcaagataaaagttcaatgatggtagcttatgtaatgaacctagggcgagatgacaaagttttagatgcgtgcagcgcacctggtggtaaagcttgtcatatggcagaaattctttcaccagaaggtcacgtcgatgcaacagatattcatgaacataaaataaatcttataaagcaaaatattaaaaaattgaaattgaataatatcaaggcttttcaacatgatgctacagaagtatacgataaaatgtatgataagattcttgttgatgcaccatgtagtggattaggtgttcttagacacaaacctgaaattaaatatagtcaatcacaaaatagcattaagtctttagtagaattacaattacaaattttagaaaatgttaaagataatattaaacctggtggtacaatagtgtattcaacatgtacaatagaacaaatggaaaacgaaaatgtcatctatacttttttaaagagacataaagattttgagtttgaaccattccaaaatccagcgactggtgaacaggttaaaacgttacagatacttccacaagattttaattcggatggattctttattagcaagataaaaagaaaggaaagttag

SEQ ID NO: 1474 - protein, 431 aa, Artificial Sequence
  Description of Artificial Sequence: synthetic amino acid sequence
VRTYALETINDVLNKGAYSNLKINEVLSTNNINTVDKNLFTELVYGTIKRKYSLDYLLKPFIKTKIKSWVRQLLWMSLYQYLYLDKIPNHAIIHEAVDIAKKRGGYHTGNIVNGVLRTVMRTELPSFEDIDDTKKRIAIQYSLPKWIVDHWVTHFGVEKTENIARSFLEPVTTTVRANISRDSIDSIISKLEQEGYHVKKDDMLPFCLHISGMPVVNSNAFKEGYISIQDKSSMMVAYVMNLGRDDKVLDACSAPGGKACHMAEILSPEGHVDATDIHEHKINLIKQNIKKLKLNNIKAFQHDATEVYDKMYDKILVDAPCSGLGVLRHKPEIKYSQSQNSIKSLVELQLQILENVKDNIKPGGTIVYSTCTIEQMENENVIYTFLKRHKDFEFEPFQNPATGEQVKTLQILPQDFNSDGFFISKIKRKES

SEQ ID NO: 1475 - DNA, 744 bp, Artificial Sequence
  Description of Artificial Sequence: synthetic nucleic acid sequence
atgttaaacgcacaatttttcactgatactgggcaacatcgtgagaaaaacgaggacgctggcggtatattttacaatcaaacacagcaacaaatgctagtattatgcgatggcatgggtggacatcaagctggagaaatagctagtcagtttgtcacttatgaacttcaaaagcgttttgaagaagagaatctaattgaaataaatcgtgctgaatcgtggttgcgttcgaacattaaagaaatcaattttcagctgtacaactatgctcaagaaaatgaagattacagaggtatgggtacaacgctcgtttgtgccatcatttatgacaaacaagttgttgtagcaaatgtaggagattcgcgtgcttatgtaattaatcagagacagatggatcaaattacgagcgaccattcatttgttaatcacttagtaatgactggacaaattactaaagatgaagcatttcatcatccacaacgtaatattattactaaagtcatgggaacagataaacgtgtttctccagatttatttatcaagagaactcatttttatgattatcttcttttgaactctgacggacttactgattatgtcagagattatgaaatccaagaactactaagttcaaataattcattagacgtccatggtaatgagttattggacttagcgcttgcccatgattcaaaagataatgtcagctttatccttttaaagttagaaggtgataaagtatga

SEQ ID NO: 1476 - protein, 247 aa, Artificial Sequence
  Description of Artificial Sequence: synthetic amino acid sequence
MLNAQFFTDTGQHREKNEDAGGIFYNQTQQQMLVLCDGMGGHQAGEIASQFVTYELQKRFEEENLIEINRAESWLRSNIKEINFQLYNYAQENEDYRGMGTTLVCAIIYDKQVVVANVGDSRAYVINQRQMDQITSDHSFVNHLVMTGQITKDEAFHHPQRNIITKVMGTDKRVSPDLFIKRTHFYDYLLLNSDGLTDYVRDYEIQELLSSNNSLDVHGNELLDLALAHDSKDNVSFILLKLEGDKV

SEQ ID NO: 1477 - DNA, 1788 bp, Artificial Sequence
  Description of Artificial Sequence: synthetic nucleic acid sequence
atgattgacgtagatgaggaagatgattgtttttatattgttatggaatacatagaaggtcctactttagcggaatatatacacagtcatggtccacttagtgtagaaactgctattcagtttacagaacaaattttgagtggaatcaaacatgcgcatgatatgagaattgttcatcgcgatattaaaccacagaatatattaattgataagaataaaaaattacaaatttttgattttggtattgctaaagcattgagtgaaacgtcgctgactcaaacaaatcatgttttaggaactgttcaatatttatcgcctgaacaggctaaaggcgaagctactgatgaaagtactgacatatattcaattggaattgtattatatgagatgttagttggagagccaccattcaatggagagactgcagtgagtattgctataaagcatattcaagatagtatcccaaatataacaacggataaaagagatgatgtacctcaatcattgagtaatgtcgttttacgtgctaccgagaaagataaatatcatcgctatcatactgttcaagaaatgtgtgacgatttaacaagtgctttacatgagaatcgtttgaatgaagaaaaatacgagctagataaaactaaaacggtaccactcactaaagatgatttgaatcataaaatctatgatgaacaaaatcaaaatgaccttaataaaaccatgcaaatacctattgttaacgattcaataaagcaacaagaatttcaatcgtctgaaccacgttattatcaaaaaagcgacaagaaacgttctaaaatgaaaattgcaattttatcaatcatttttgtaatattattaattggtttattttcttttgtagctatggctgtttttggaaataaatatgaagaaatgcctgaccttaaagggaaaactgaaaaacaagctgaaaaggtattagacagtcatcatctaaaagtaggtgacatatcaagaaattatagtgataaatatcctgaaaaccaaattattaaaacaaatccagatagtggagaacgcgtcgaacaagggaatagagttgatatcgttctatccaaaggaccagagaaggttaagatgccaaatgttttaggtatgtcgaaaaatgatgcgctaaaaaaattaaaggctatcggatttaaagatattcacgttgagcaagcttatagtcaaacatatgaaaaaggattaatttctgaacaaagcgttgtagctaatagtgaggttgccgttaataatcatcatattacaatttatgaatcattaggtgttcgacaagtatatgtcaataattatgaaaataagtcatatgagtcagcaaaaaaagaacttgaagataaaggatttaaagttcaagtgacaaaagaaaacaacgatgatgtcgaaaaaggtaatgtcatttctcaatctccaaaggataaaactgttgatgaaggttctactatactattagtggtttctaaaggagaaaagtctgaagaagaagatgatgaggaggacaaggatacaacgactaaaaatgagactgttaaagtaccgtataccggtaaaaaaagtaaaagtcaaaaagtagaagtatttattcgtgatattgaaaataaaggtgattcagcagttcaaacgtttaatattaaaagtgataaaacaattaatattcctttgaaaattaaaaaaggaagtgacgctgggtacaccataagagttgataataaaattgtagctgataaagatgtgagctatgatggctaa

SEQ ID NO: 1478 - protein, 595 aa, Artificial Sequence
  Description of Artificial Sequence: synthetic amino acid sequence
MIDVDEEDDCFYIVMEYIEGPTLAEYIHSHGPLSVETAIQFTEQILSGIKHAHDMRIVHRDIKPQNILIDKNKKLQIFDFGIAKALSETSLTQTNHVLGTVQYLSPEQAKGEATDESTDIYSIGIVLYEMLVGEPPFNGETAVSIAIKHIQDSIPNITTDKRDDVPQSLSNVVLRATEKDKYHRYHTVQEMCDDLTSALHENRLNEEKYELDKTKTVPLTKDDLNHKIYDEQNQNDLNKTMQIPIVNDSIKQQEFQSSEPRYYQKSDKKRSKMKIAILSIIFVILLIGLFSFVAMAVFGNKYEEMPDLKGKTEKQAEKVLDSHHLKVGDISRNYSDKYPENQIIKTNPDSGERVEQGNRVDIVLSKGPEKVKMPNVLGMSKNDALKKLKAIGFKDIHVEQAYSQTYEKGLISEQSVVANSEVAVNNHHITIYESLGVRQVYVNNYENKSYESAKKELEDKGFKVQVTKENNDDVEKGNVISQSPKDKTVDEGSTILLVVSKGEKSEEEDDEEDKDTTTKNETVKVPYTGKKSKSQKVEVFIRDIENKGDSAVQTFNIKSDKTINIPLKIKKGSDAGYTIRVDNKIVADKDVSYDG

SEQ ID NO: 1479 - DNA, 891 bp, Artificial Sequence
  Description of Artificial Sequence: synthetic nucleic acid sequence
atgagaggtgtctttttgaagactggtcgaatcgttaaactaatcagtggtgtgtatcaagtagacgtagaaggtgagagatttgataccaaaccacgtggtttattcagaaaaaagaagttttcacctgtggtgggcgatatcgtagattttgaagttcaaaatacaaaagagggctatattcatcatgtacatgaccgaaataatgaactaaaacgaccacctgtaagtaatattgacgagttagttatagtaatgagtgcagtcgagcctgaattttcaacacaattattagatcgctatttagtgattgctcattcttatcatctcaaacctagaattttaatcactaaacatgatttagcttccgaacaagaaattcttaaaatcaaagacacaataaaaatatatcaaaaaataggatatgctacgcagtttattggaaaagatagtaattatactgctactgttgatgaatggtctgacggtttaatagtattaagtggccaatctggagtgggtaaatctactttcttaaatagttatcagcctcagttgaagttagaaacaaatgatatttctaagtcattgaataggggtaaacatactacaagacatgtcgaattatacgatagaaaaggtggttacatcgctgatacaccggggtttagtgcgttagattttaatcatattgaaaaagaacaactaaaagatttttttattgatattcatgaagctggagagcaatgtaagtttcgtaattgtaatcatataaaagaaccacaatgtcatgtcaaagcactcgttgaaaaaggagaaattccacaattcaggtatgatcattatcagcaattatataatgaaatttccaatagaaaggttcgatactaa

SEQ ID NO: 1480 - protein, 296 aa, Artificial Sequence
  Description of Artificial Sequence: synthetic amino acid sequence
MRGVFLKTGRIVKLISGVYQVDVEGERFDTKPRGLFRKKKFSPVVGDIVDFEVQNTKEGYIHHVHDRNNELKRPPVSNIDELVIVMSAVEPEFSTQLLDRYLVIAHSYHLKPRILITKHDLASEQEILKIKDTIKIYQKIGYATQFIGKDSNYTATVDEWSDGLIVLSGQSGVGKSTFLNSYQPQLKLETNDISKSLNRGKHTTRHVELYDRKGGYIADTPGFSALDFNHIEKEQLKDFFIDIHEAGEQCKFRNCNHIKEPQCHVKALVEKGEIPQFRYDHYQQLYNEISNRKVRY

SEQ ID NO: 1481 - DNA, 831 bp, Artificial Sequence
  Description of Artificial Sequence: synthetic nucleic acid sequence
atgtatatgaatgcttatttagcagaatttttaggtactgcaatccttattctttttggtggtggcgtttgtgcaaacgttaacttaaagagaagtgctggtaacggtgcagattggattgttattgcatttggttggggtttggcagtaacaatgggcgtttatgctgttggaacgttttctggtgcacatttaaatccagctgtaacagttgctttagccatggatggtggatttagctgggcgcaagtaccgggctatattgtttgtcaaatgcttggcggtattgttggtggagtttttgtatggttaatgtatttaccacactggaaagttacagaagatccagcagtcaaattaggtgtattttcaacagcaccagccattaaaaattattttgctaactttttaagtgagattatcgggactatggctttaacattaggaattttatttatcggggttaataaaattgctgatggtttaaatccaattattgttggtagtcttatcatagcaattggtttaagcttaggaggtactactggttacgctattaatccagcccgtgacctagcaccacgtattgcacatgctattttgccaattcatggtaaaggtaaatctaactggtcttacgcaattgtacccgttctgggacccatggcaggtggtatgttaggtgcgattgtttacgaagtgttttataaacaaacattcaattttagttgtttcattggtttaattgtacttatattcacacttatacttggcgtgatactaaataagatatctcaaaataaaaacaacgatattgaatcaatttattaa

SEQ ID NO: 1482 - protein, 276 aa, Artificial Sequence
  Description of Artificial Sequence: synthetic amino acid sequence
MYMNAYLAEFLGTAILILFGGGVCANVNLKRSAGNGADWIVIAFGWGLAVTMGVYAVGTFSGAHLNPAVTVALAMDGGFSWAQVPGYIVCQMLGGIVGGVFVWLMYLPHWKVTEDPAVKLGVFSTAPAIKNYFANFLSEIIGTMALTLGILFIGVNKIADGLNPIIVGSLIIAIGLSLGGTTGYAINPARDLAPRIAHAILPIHGKGKSNWSYAIVPVLGPMAGGMLGAIVYEVFYKQTFNFSCFIGLIVLIFTLILGVILNKISQNKNNDIESIY

SEQ ID NO: 1483 - DNA, 1500 bp, Artificial Sequence
  Description of Artificial Sequence: synthetic nucleic acid sequence
atggaaaaatatattttatcaattgatcaaggaactacgagttcacgtgcgatactttttaataaagaaggagaaattaaaggtgtttctcaaagagaatttaaacaacactttccacatccaggctgggtagaacatgatgctaatgaaatatggacatctgttctatcagttatggctgagttacttaatgaaaacaatattaatgcaaatcaaattgaaggtattggtattacaaaccaacgtgaaacgacagttgtatgggataaaaatacaggtcgtccaatctatcacgctatcgtttggcaatcacgtcagacacaagatatttgtacaaatttaaaggaacagggttatgaagaaacatttagagaaaaaacaggtttacttttagacccgtactttgcgggaactaaagtaaaatggattcttgatcatgttgaaggtgctagagaaaaagctgaaaatggtgatttactcttcggaacaatcgattcatggttagtatggaaattgtcaggacgtactgctcatattacagattacactaatgcaagtcgtacattaatgtttaatatttatgacctaaaatgggatgatgagttgttagaacttttaaatattcctaaacaaatgttacctgaagttaaagaatcaagtgaaatttacgggaaaactatcgactatcacttctttggtcaagaagtacctattgctggtattgccggtgaccaacaagcagcattatttggtcaagcatgttttgaccgtggtgatgtaaaaaatacatacggcacaggtggatttatgctaatgaatactggtgaagaagcagttaagtcagaaagtggcttgttaacaaccattgcatacggtttagatggaaaagttaattatgcacttgaaggttcaattttcgtatctggttctgctatccaatggctacgagatggtttgagaatgattaattctgcgccacaaaccgaaaactatgcttcaagagtagagtcaactgagggtgtttatatggttccagcatttgttggtttaggtacaccttattgggattcagaagcaagaggtgctattttcggattatctcgtggtacggaaaaagaacatttcattcgtgctacattagaatctttgtgctatcaaacaagagatgttatggaagctatgtctaaggactcaggtattgaagttcaaaatttacgcgttgatggtggtgctgtaaaaaataacttcattatgcagttccaagcagatatcgtaaattcatctgttgaaagacctgaaatccaagaaacaacagcacttggtgctgcatatttagctggattagctgttggattctgggatgataaagaggatatccgtgaacgttggaaacttcaaactgagttcaaaccagaaatggatgcagatcaacgtcataaactttatagtggttggaaaaaagctgttaaggcgactcaagtatttaaattagaagattaa

SEQ ID NO: 1484 - protein, 499 aa, Artificial Sequence
  Description of Artificial Sequence: synthetic amino acid sequence
MEKYILSIDQGTTSSRAILFNKEGEIKGVSQREFKQHFPHPGWVEHDANEIWTSVLSVMAELLNENNINANQIEGIGITNQRETTVVWDKNTGRPIYHAIVWQSRQTQDICTNLKEQGYEETFREKTGLLLDPYFAGTKVKWILDHVEGAREKAENGDLLFGTIDSWLVWKLSGRTAHITDYTNASRTLMFNIYDLKWDDELLELLNIPKQMLPEVKESSEIYGKTIDYHFFGQEVPIAGIAGDQQAALFGQACFDRGDVKNTYGTGGFMLMNTGEEAVKSESGLLTTIAYGLDGKVNYALEGSIFVSGSAIQWLRDGLRMINSAPQTENYASRVESTEGVYMVPAFVGLGTPYWDSEARGAIFGLSRGTEKEHFIRATLESLCYQTRDVMEAMSKDSGIEVQNLRVDGGAVKNNFIMQFQADIVNSSVERPEIQETTALGAAYLAGLAVGFWDDKEDIRERWKLQTEFKPEMDADQRHKLYSGWKKAVKATQVFKLED

SEQ ID NO: 1485 - DNA, 1674 bp, Artificial Sequence
  Description of Artificial Sequence: synthetic nucleic acid sequence
atgtcattatctacattgaaaagggatcatattaaaaagaatttaagagacactgaatacgatgttgttatcgtaggtggcggtattacaggtgcaggtattgctttagatgcaagtaatcgtgggatgaaggtagctttagtagagatgcaagactttgcacaaggtacaagttcacgctcaactaaacttgtacacggtggtttaagatatttaaaacaactgcaagtaggggtagttgcagaaacaggtaaagaacgtgctattgtttatgaaaatggtccacatgtgacaacaccagaatggatgcttttacctatgcataaaggtggtacatttggtaaattctcaacttctattggactagctatgtacgatcgtctagctggtgtcaaaaaatccgaacgtaaaaaaatgttatctaagcaagaaacgttaaataaagaacctttagttaaacgtgatggattaaaaggcggtggctactatgtggaataccgcactgatgatgcgcgtttaactattgaagttatgaaaaaagctgctgaaaatggagcagaaatcattaattatacaaaatcagaacacttcacttatgattccaataagaaagtaaatggtattgaagtattggatatgattgatggcgaaacgtatgcgattaaagctaaaaaagttattaatgcttctggtccttgggttgatgaagtgagaagtggcgattatgcacgtaacaataagcaattaagattaactaaaggtgtacacgttgttatagatcaatctaaattcccattaggtcaagcagtttactttgatactgaaaaagacggacgcatgatttttgcgattccacgtgaaggaaaagcttatgtaggaacaactgacacgttttatgataatgaaaaagcaacacctttaacaacacaagaagatagagactacttaattaatgcaattaactatatgttcccaacagttaatgttaaagatgaagatattgaatcaacatgggctggtattcgtccgctaattcttgaaaaaggtaaagatccttctgaaatctcacgtaaagatgaagtttgggaaggtgaatctggattattaactatagcaggcggtaaattaactggttatcgtcatatggcactagaaattgttgatttattagctaaacgtttaaaacaagaatacggattgaaatttgaatcatgtgccacaaaaaatctaaaaatttccggtggtgacgttggcggaagcaaaaactttgaacactttgttgaacaaaaagttgatgcagctaaaggatttggaattgatgaagatgtggcacgtcgcttagcaagtaaatatggttcaaatgttgatcaactatttaatattgctcaaacggcaccatatcatgatagtaaattaccattagaaatttatgttgaattagtttatagtattcaacaagaaatggtttacaaaccaactgacttcttagtacgtcgttctggcaaattatactttaatattcaagatgtgttagattataaaaatgctgtgatagatgttatggcggatatgcttaattatagtgaaactcaaaaagaagcttatactgaagaagtagaagttgcgattgatgaggcacgtacaggtaatgatcaacctgcaactaaagcttaa

SEQ ID NO: 1486 - protein, 557 aa, Artificial Sequence
  Description of Artificial Sequence: synthetic amino acid sequence
MSLSTLKRDHIKKNLRDTEYDVVIVGGGITGAGIALDASNRGMKVALVEMQDFAQGTSSRSTKLVHGGLRYLKQLQVGVVAETGKERAIVYENGPHVTTPEWMLLPMHKGGTFGKFSTSIGLAMYDRLAGVKKSERKKMLSKQETLNKEPLVKRDGLKGGGYYVEYRTDDARLTIEVMKKAAENGAEIINYTKSEHFTYDSNKKVNGIEVLDMIDGETYAIKAKKVINASGPWVDEVRSGDYARNNKQLRLTKGVHVVIDQSKFPLGQAVYFDTEKDGRMIFAIPREGKAYVGTTDTFYDNEKATPLTTQEDRDYLINAINYMFPTVNVKDEDIESTWAGIRPLILEKGKDPSEISRKDEVWEGESGLLTIAGGKLTGYRHMALEIVDLLAKRLKQEYGLKFESCATKNLKISGGDVGGSKNFEHFVEQKVDAAKGFGIDEDVARRLASKYGSNVDQLFNIAQTAPYHDSKLPLEIYVELVYSIQQEMVYKPTDFLVRRSGKLYFNIQDVLDYKNAVIDVMADMLNYSETQKEAYTEEVEVAIDEARTGNDQPATKA

SEQ ID NO: 1487 - DNA, 459 bp, Artificial Sequence
  Description of Artificial Sequence: synthetic nucleic acid sequence
atgacagactcaaatgctaaagaaataagaactggacgtttaattgcgataagttcattagtgttttgtattttacttatcatacaccactttattgtattagatgaatcaacagctaaatcaattttatctttagctggtcaaaaaacatcagatacagcagtgaaaaacattttaaatagtgaccgatacactggaattatgtatattttagcttacttagcaggtactgttgctttctggaatcgccatccatatttatggtggtttatgtttgccgtatatatttctaatgcactatttacactcgtaaatctttacttatttattcaaggtattttagatgtaaaaaatgtacttgcagttttaccaattttaattgtagtgattggatctataattctagcaatttatatgctagttgtttctattacacgtaaaagtactttcaatagatag

SEQ ID NO: 1488 - protein, 152 aa, Artificial Sequence
  Description of Artificial Sequence: synthetic amino acid sequence
MTDSNAKEIRTGRLIAISSLVFCILLIIHHFIVLDESTAKSILSLAGQKTSDTAVKNILNSDRYTGIMYILAYLAGTVAFWNRHPYLWWFMFAVYISNALFTLVNLYLFIQGILDVKNVLAVLPILIVVIGSIILAIYMLVVSITRKSTFNR

SEQ ID NO: 1489 - DNA, 741 bp, Artificial Sequence
  Description of Artificial Sequence: synthetic nucleic acid sequence
atgcaaattaaactaccaaaaccattcttttttgaagaagggaaacgtgcagtgttacttcttcacggctttacaggtaactctgctgatgtaagacaacttgggcgttatcttcaaaaaaagggctatacatcttatgctccacaatatgaaggacatgcagcgcccccagaagaaatattaaaatctagcccttttgtttggtttaaagatgttttagatggttatgattatttagtagatcaaggttacgaagaaatagcagtagctggtttatcattaggtggcgccttcgcattaaaactaagtttaaatcgtgatgtgaaggggattataactatgtgtgcacctatggagaataaaacagaaggttcgatttatgaaggctttcttgaatatgcacgtaactttaaaaaatatgaaggcaaagatcaacaaacgattgatcaagaaatggaacaatttcatccaactgaaaccctgagagaactgagtgacactctaaatggagttaaagaacatgtcgatgaagtaattgatccaatacttgtcgtacaagcagaacaagatacaatgattgatcctcaatcagcaaattatatatataatcatgtcgattctgatgaaaaagaaatcaaatggtatcaacattcaggtcatgtgattaccattgataaagaaaaagagaaagtctttgaagatgtatatcaatttttagaatcattggaatggacagagtaa

SEQ ID NO: 1490 - protein, 246 aa, Artificial Sequence
  Description of Artificial Sequence: synthetic amino acid sequence
MQIKLPKPFFFEEGKRAVLLLHGFTGNSADVRQLGRYLQKKGYTSYAPQYEGHAAPPEEILKSSPFVWFKDVLDGYDYLVDQGYEEIAVAGLSLGGAFALKLSLNRDVKGIITMCAPMENKTEGSIYEGFLEYARNFKKYEGKDQQTIDQEMEQFHPTETLRELSDTLNGVKEHVDEVIDPILVVQAEQDTMIDPQSANYIYNHVDSDEKEIKWYQHSGHVITIDKEKEKVFEDVYQFLESLEWTE

SEQ ID NO: 1491 - DNA, 2379 bp, Artificial Sequence
  Description of Artificial Sequence: synthetic nucleic acid sequence
atgaatttaaagcaatccatcgaagaaatgataaaacaacctgactatgaacccatgtcagtatctgactttcaagatgcgttaggtttaaacagtgccgactcatttagagatttaattaaaatactcgttgaattagaacagtctggtttaattgaacgtacaagaacagacagatatcaacgtaaacaatccaacaaaacaaattcaaaactaatcaaaggaacgttaagtcaaaataaaaaaggctttgctttcttaagacctgaagatgacgagatggatgatatttttattccaccaactaaaatcaatagagcattagatggagatactgtcatcgtggaaattcaaaaatctcgtggagaacataaaggtaaaattgaaggtgaagtaaaatctattgaaaagcattcagttacacaagttgttggaacgtatagcgaagcaaagcattttggtttcgtattaccggatgacaaacgtattatgcaagatatctttatacctaaaggacaaaatttaggtgctgtagatggtcataaagtattagtacaaattacgaagtatgccgatagtactgacaatccagaaggccacgtctcagcaatattaggtcataaaaatgatccaggtgtagatatactttccatcatttaccagcatggaatagaaatcgagtttccagatgatgtattacaagaagctgaagaagtaccggatgtaatagaaccatctgaaatcgaagggcgtcgtgatttaagagatgaattaacaatcactatagatggcgcagatgctaaagatttagatgatgccattgctgtaaaaaaattaaaaaatggcaacaccgagcttacagttagtattgcagatgtaagttactatgtaaaagaaggatcagctttagataaagaagcttatgatcgtgcgacaagtgtgtatcttgtcgatcgagtaatcccgatgattccacaccgtctaagtaatggaatatgctcattaaatccagaagaagatcgtttaacattaagttgtcgaatggaaataaatgaacgaggcgaagttgtaaaacatgaaatctttgatagtgtaatacattcaaactacagaatgacatatgatgcagttaacaaaattatcactgatcaagattctgaaatacgttcacaatataaagatttaacacctatgttagatttagcgcaagatttatcaaatagattaattcatatgcgcaaacgtcgtggagaaattgattttgatattaatgaagcgaaagtacttgtgaatgacgaaggtattccaacagaagtgctaatgagagaacgtggcgaaggagaacgtttaattgaatcattcatgttagcagccaatgaaacagtagctgaacacttcaataaattggaagtaccatttatttatcgtgttcatgaacaaccaaaatctgaccgattaagacagttcttcgactttattaccaatttcggtattatgataaaaggtacaggtgaagatattcatccaacaacattacaaagcattcaagaagaagttgaaggtagaccagaacaaatggttatttcaacgatgatgttacgttctatgcaacaagcacattatgatgatgttaatttaggacattttggtttgtctgctgagtactatactcactttacgtctccaatacgccgttatcctgatttaacagtgcatagattaattcgtaaatatttaatagagaattctatggataaaaaagaaatacgtcattgggaagagacgttgccagaattagctgagcacacatcacaacgtgaacgccgtgccattgaagccgaacgtgatactgatgaattgaaaaaagctgagtatatgattcaacatattggtgatgaatttgaaggtatcattagctcggttgctaattttggtatgtttatagaattacctaatactattgagggtatggttcatatcgctaatatgacagacgattattatcattttgatgaacgacaaatggcactaatcggtgaacgtcaagcaaaggtctttcgcattggtgatacggtcaaagttaaagtgacacatgttgatgtggaagaacgcatgatagatttccaaattgttggcatgccattacctaaaaagacatcatcacaacgacctgctcgtgagaaaaccattcaagctaaaacacgtggcaagtcgttagaccacactaaaagtgatcgtaatggtaaaggtaaaaagaaaaaacgtaagcaacgtaaaggtaaaaatgcacgtaaaaaagataaacaaggtaatacgcatcacaaacctttttataaagataaaagtgtgaagaagaaatcgcgtcgaaagaaaaaatag

SEQ ID NO: 1492 - protein, 792 aa, Artificial Sequence
  Description of Artificial Sequence: synthetic amino acid sequence
MNLKQSIEEMIKQPDYEPMSVSDFQDALGLNSADSFRDLIKILVELEQSGLIERTRTDRYQRKQSNKTNSKLIKGTLSQNKKGFAFLRPEDDEMDDIFIPPTKINRALDGDTVIVEIQKSRGEHKGKIEGEVKSIEKHSVTQVVGTYSEAKHFGFVLPDDKRIMQDIFIPKGQNLGAVDGHKVLVQITKYADSTDNPEGHVSAILGHKNDPGVDILSIIYQHGIEIEFPDDVLQEAEEVPDVIEPSEIEGRRDLRDELTITIDGADAKDLDDAIAVKKLKNGNTELTVSIADVSYYVKEGSALDKEAYDRATSVYLVDRVIPMIPHRLSNGICSLNPEEDRLTLSCRMEINERGEVVKHEIFDSVIHSNYRMTYDAVNKIITDQDSEIRSQYKDLTPMLDLAQDLSNRLIHMRKRRGEIDFDINEAKVLVNDEGIPTEVLMRERGEGERLIESFMLAANETVAEHFNKLEVPFIYRVHEQPKSDRLRQFFDFITNFGIMIKGTGEDIHPTTLQSIQEEVEGRPEQMVISTMMLRSMQQAHYDDVNLGHFGLSAEYYTHFTSPIRRYPDLTVHRLIRKYLIENSMDKKEIRHWEETLPELAEHTSQRERRAIEAERDTDELKKAEYMIQHIGDEFEGIISSVANFGMFIELPNTIEGMVHIANMTDDYYHFDERQMALIGERQAKVFRIGDTVKVKVTHVDVEERMIDFQIVGMPLPKKTSSQRPAREKTIQAKTRGKSLDHTKSDRNGKGKKKKRKQRKGKNARKKDKQGNTHHKPFYKDKSVKKKSRRKKK

SEQ ID NO: 1493 - DNA, 471 bp, Artificial Sequence
  Description of Artificial Sequence: synthetic nucleic acid sequence
gtggctaagaaaaaatcaaaatcaccaggtacgttagctgaaaatcgtaaagcaagacatgactacaatattgaagatacaattgaagcgggtattgctttaagaggtactgaaattaaatctatacgtcgtggtagtgccaatttaaaagatagctttgcgcaagtgagacgaggcgaaatgtacctgaataatatgcatattgcaccatatgaagaagggaaccgttttaatcatgaccctttacgtacacgtaaattactcttgcacaaaaaagaaattcaaaaattaggtgagcgtacacgagaaataggttattctattattccgttgaagttatatttaaaacatggtcaatgtaaagttttattaggcgttgctagaggtaaaaagaaatacgacaaacgtcaagcacttaaagaaaaagcggtaaaacgagatattgatcgcgcagttaaagcccgttattaa

SEQ ID NO: 1494 - protein, 156 aa, Artificial Sequence
  Description of Artificial Sequence: synthetic amino acid sequence
VAKKKSKSPGTLAENRKARHDYNIEDTIEAGIALRGTEIKSIRRGSANLKDSFAQVRRGEMYLNNMHIAPYEEGNRFNHDPLRTRKLLLHKKEIQKLGERTREIGYSIIPLKLYLKHGQCKVLLGVARGKKKYDKRQALKEKAVKRDIDRAVKARY

SEQ ID NO: 1495 - DNA, 639 bp, Artificial Sequence
  Description of Artificial Sequence: synthetic nucleic acid sequence
atgccacacctaggtacaaatgctgttgatattttagttgattttgtaaatgaaatgaaacaagaatataaaaatattaaagaacatgataaagtacacgagttagacgctgttccaatgattgagaaacatctccacagaaaaattggtgaagaagaatcacatatctactctggatttgtaatgttaaactctgtattcaatggtggtaaacaagttaattctgttcctcataaagcgacagctaaatataatgtaagaactgttccagaatatgacagtactttcgtgaaggatttatttgaaaaagtcattcgtcatgtgggcgaagattatttaactgtagatatacctagcagtcacgatccagtggcaagtgatcgtgataatcctcttattcaaaatattacacgtattgcaccgaattatgtacatgaagacattgttgtgagtgcattgattggtacaactgatgcatctagtttcctaggaacaaatgaaaataacgtggattttgctgtctttggacctggtgaatctattatggcgcatcaagttgatgaatttattagaaaagatatgtatttaagttacatcgatgtttataaagatgtatttaaagcatatctagaaaaataa

SEQ ID NO: 1496 - protein, 212 aa, Artificial Sequence
  Description of Artificial Sequence: synthetic amino acid sequence
MPHLGTNAVDILVDFVNEMKQEYKNIKEHDKVHELDAVPMIEKHLHRKIGEEESHIYSGFVMLNSVFNGGKQVNSVPHKATAKYNVRTVPEYDSTFVKDLFEKVIRHVGEDYLTVDIPSSHDPVASDRDNPLIQNITRIAPNYVHEDIVVSALIGTTDASSFLGTNENNVDFAVFGPGESIMAHQVDEFIRKDMYLSYIDVYKDVFKAYLEK

SEQ ID NO: 1497 - DNA, 1197 bp, Artificial Sequence; identical to SEQ ID NO: 43
  Description of Artificial Sequence: synthetic nucleic acid sequence

SEQ ID NO: 1498 - protein, 398 aa, Artificial Sequence; identical to SEQ ID NO: 44
  Description of Artificial Sequence: synthetic amino acid sequence

SEQ ID NO: 1499 - DNA, 2238 bp, Artificial Sequence
  Description of Artificial Sequence: synthetic nucleic acid sequence
atgcatgagcaaaaacaaaaagaggttgctctacacgatcaaacacaagaatggaaaaggttagaacagtcgcttaatatagagcctataaattttcctgaaaaagggatagatagatacgaaactgctaaatctcacaaacaatcacttgaacgagataaaagtttgcgagaagaaagattaagcatattaaataaagaggcggagtccatcaatccagtagaccaaaagtatattgattcgtttaatagcctttatcaacaagagactgaaattaaacaaaaagaatttgagttacgttcaatagagaaagatattgctgataagcaacgtgaactagaagctcttcaatctaatataggttggcaagaagtgttttacgacacagacagtactgaagcgatgaaaagtcatatgagtgatttagtattaggcaagcaagaacaaattgcttatatcaatcagttagaacgtggacttgaagaaaataaaattgaaagaaactctaattctaatgagattaatcaagttgagaatgagcttgttcctgacgaaacctttgaaaagaaaaaggaatatacacaacaagttttagaattacatgaaaaagagaacttgtatgaaaagttaaaagaaacttttgaagaagaacaaacacaaaaaaataaaagacaaaagtttttgagaataggatttattgttttgactattctatcagcagcactttctattttttcttttttcactgcaaatcttatttttggtataatatttgctctattaactgtgatttttgtagtaggtatcattttttctagatctaaagcagtagattatagcacagcaataagtcaggaaattaatgatttagaaaaccaactcacgcaacttgaaaaagaatataatcttgacttcgatttagaatatcaacaacaagttcgtgaacaatggcgtcatgctaaaaaaaataaaaaaatacttgaagaaaaacatcaatatatcaatcaatcattaacgactgcaaatgagcgattagatagtttaaaacatagcattattgaaataaaaaaagagttacgtttatcagaaaaactttctgatgaattagtggttgaaagtatctcaaccattggtcaaattaaagcgcatgataaatacattattgatttaaatcaacaacgcaataatctgctaaaagatatcaatcacttttatgaacgtgcacaatctgtaactgaaccacatttaaaactatttaatcagatgtctttcttccatgatgtgaaacagtggttaaaaaatgcagaagaacaaaatgaggcttggaataaaaatcaaactgaaacgcaattactcaataatgaattaaagcaattgaagtcacgcttaagtgaaacgaatcaaatgattaagcaattatttgattatgttgatgtagataatgaagaagattattatacacatcatcatcattttgaaacatatcaaagtgatttaaatcgatttaatgatttaaatcaatatttagaaaatcaaaattacacttatgaaatgagttcgcaattaagtgagaaaactactgctcaactagaagaagaagatcatagattggctaaacaagttgacgattacaatgatcaatttttagaaatgcaagcagaagttagtgatttaaatgctcagattaatcatatggaaacagatagaactttagcacaattaagacatgaatattatagcttaaaaaatagacttaacgatattgctaaggattgggcaagcttaagttatatgcaagctttagtggaagaacatatcaagcaaataaaagataagcgtctaccacaagtgattaatgaagctgtatctatttttaaaaatttaacaaatggtacttacaatatgattcattatactgaaaatcataaaatacatgtaaagcattctaacggacaagtatttgagccagttgagttgagtcaatctacaaaagaattattatatgtggctttacgtattagtcttattaaagtattaaaaccgtattatccattcccagtgattgtagatgatgcatttgttcattttgataaatatcgtaaagaacgtatgttgaaatatttgagagaactatcagaacattatcaaatactttattttacttgtacaaaagatcatgtcataccggctaaagaagtattaactttaaataaattacaggaaggcgggaaaaaatga

SEQ ID NO: 1500 - protein, 745 aa, Artificial Sequence
  Description of Artificial Sequence: synthetic amino acid sequence
MHEQKQKEVALHDQTQEWKRLEQSLNIEPINFPEKGIDRYETAKSHKQSLERDKSLREERLSILNKEAESINPVDQKYIDSFNSLYQQETEIKQKEFELRSIEKDIADKQRELEALQSNIGWQEVFYDTDSTEAMKSHMSDLVLGKQEQIAYINQLERGLEENKIERNSNSNEINQVENELVPDETFEKKKEYTQQVLELHEKENLYEKLKETFEEEQTQKNKRQKFLRIGFIVLTILSAALSIFSFFTANLIFGIIFALLTVIFVVGIIFSRSKAVDYSTAISQEINDLENQLTQLEKEYNLDFDLEYQQQVREQWRHAKKNKKILEEKHQYINQSLTTANERLDSLKHSIIEIKKELRLSEKLSDELVVESISTIGQIKAHDKYIIDLNQQRNNLLKDINHFYERAQSVTEPHLKLFNQMSFFHDVKQWLKNAEEQNEAWNKNQTETQLLNNELKQLKSRLSETNQMIKQLFDYVDVDNEEDYYTHHHHFETYQSDLNRFNDLNQYLENQNYTYEMSSQLSEKTTAQLEEEDHRLAKQVDDYNDQFLEMQAEVSDLNAQINHMETDRTLAQLRHEYYSLKNRLNDIAKDWASLSYMQALVEEHIKQIKDKRLPQVINEAVSIFKNLTNGTYNMIHYTENHKIHVKHSNGQVFEPVELSQSTKELLYVALRISLIKVLKPYYPFPVIVDDAFVHFDKYRKERMLKYLRELSEHYQILYFTCTKDHVIPAKEVLTLNKLQEGGKK

SEQ ID NO: 1501 - DNA, 504 bp, Artificial Sequence
  Description of Artificial Sequence: synthetic nucleic acid sequence
gtggatcattttttcttgatccatcgtgcaactcaaggtgttacagctcagggtaaagattacatgacactatttctgcaagataaaagtggtgatattgaagctaaattatggactgctacgaaagatgatatgcaaactttaaaaccagaaacaatagttcatgtcaaaggtgatatcatcaattatcgtggacgcaaacagatgaaaatacatcaaatacgtcttgcacaagctgaagacaaagtgtcaactaaagactttgttgacggtgcgccaatgtcacctacagaaatacaagaggaattatcgcattttatgttagatattgaaaatgctaacttacaacgcattactagacatttaattaaaaagtatcaagatcgttttttcacttatccagcagctagttctcatcatcataatttcgcgagtggattgagttatcatgttttaacaatgttgcgtatagcaaaatctgtatgtgatatttatcctctgtga

SEQ ID NO: 1502 - protein, 167 aa, Artificial Sequence
  Description of Artificial Sequence: synthetic amino acid sequence
VDHFFLIHRATQGVTAQGKDYMTLFLQDKSGDIEAKLWTATKDDMQTLKPETIVHVKGDIINYRGRKQMKIHQIRLAQAEDKVSTKDFVDGAPMSPTEIQEELSHFMLDIENANLQRITRHLIKKYQDRFFTYPAASSHHHNFASGLSYHVLTMLRIAKSVCDIYPL

SEQ ID NO: 1503 - DNA, 438 bp, Artificial Sequence
  Description of Artificial Sequence: synthetic nucleic acid sequence
atgctcaagtgcttttttgatatacatcaagagattgattattttaaaccttctctttcattgttttctttgttatctttttcatttttttgttgccattctttttttgtcattacgtcgtcaacttgcatgttaacttcaacaacttctaaaccagtaatatattttacttgttctttaactaagtctgtcactttacggaaaattttaggtgcagattcaccatattctaaaataacttttaaatctacagcagcttgtttttctccaacttctacagatacgcctgtagttacattgttaccgtttgagaaagcgttagtaaagctatctgtgaagccacctttcatgtctaaaattcctttaacttcacgtgctgcaatacctgcaattttttcaactacttcatctgagaaagttaatttgttttcaaattga

SEQ ID NO: 1504 - protein, 145 aa, Artificial Sequence
  Description of Artificial Sequence: synthetic amino acid sequence
MLKCFFDIHQEIDYFKPSLSLFSLLSFSFFCCHSFFVITSSTCMLTSTTSKPVIYFTCSLTKSVTLRKILGADSPYSKITFKSTAACFSPTSTDTPVVTLLPFEKALVKLSVKPPFMSKIPLTSRAAIPAIFSTTSSEKVNLFSN

SEQ ID NO: 1505 - DNA, 312 bp, Artificial Sequence
  Description of Artificial Sequence: synthetic nucleic acid sequence
atgaaaggtggcttcacagatagctttactaacgctttctcaaacggtaacaatgtaactacaggcgtatctgtagaagttggagaaaaacaagctgctgtagatttaaaagttattttagaatatggtgaatctgcacctaaaattttccgtaaagtgacagacttagttaaagaacaagtaaaatatattactggtttagaagttgttgaagttaacatgcaagttgacgacgtaatgacaaaaaaagaatggcaacaaaaaaatgaaaaagataacaaagaaaacaatgaaagagaaggtttaaaataa

SEQ ID NO: 1506 - protein, 103 aa, Artificial Sequence
  Description of Artificial Sequence: synthetic amino acid sequence
MKGGFTDSFTNAFSNGNNVTTGVSVEVGEKQAAVDLKVILEYGESAPKIFRKVTDLVKEQVKYITGLEVVEVNMQVDDVMTKKEWQQKNEKDNKENNEREGLK

SEQ ID NO: 1507 - DNA, 804 bp, Artificial Sequence
  Description of Artificial Sequence: synthetic nucleic acid sequence
atgcaaccttatttaatttgtctagatctagatggtacattattaaatgacaataaagaaatctcaccttacactaaacaagtattaaccgaattacaacaatgtggacactacgttatgattgctactggaagaccctatcgcgcaagccagatgtattatcatgaactaaatatgagcacacctgttgttaactttaatggagcatttgtacatcatccaaaagcaaacgattttaaagtgatacatgaagtacttgatgtggaaatttctaaaaatattattacagcacttcaacaatctcatattacaaatatcattgctgaagtaaaagactatgtctttataaatagttatgattcaagactttacgaaggtttttcaatgggaaatcctaaaattcaaacaggtaatttacttgaaaatcttaatgaagcacctacgtcattacttgttgaagcagaagaagaaaatattcctgaaattaaagatatgttaacacatttttatgcagaaaatattgaacatcgtcgttggggcgcaccgtttccagtaatagaaattgtgaagcgtgggattaacaaagcacgtggaatcaagcatgttcaaaactatttaaacatcgccgacgatcatatcattgcgtttggtgatgaggacaatgatatagaaatgataaagtttgcgacccatggcattgcaatggccaatggcttgaaagatttaaaggaaatagcaaatgagactacgtatagtaataatgaagacggaataggtcgttatttaaatgacttttggtattaa

SEQ ID NO: 1508 - protein, 267 aa, Artificial Sequence
  Description of Artificial Sequence: synthetic amino acid sequence
MQPYLICLDLDGTLLNDNKEISPYTKQVLTELQQCGHYVMIATGRPYRASQMYYHELNMSTPVVNFNGAFVHHPKANDFKVIHEVLDVEISKNIITALQQSHITNIIAEVKDYVFINSYDSRLYEGFSMGNPKIQTGNLLENLNEAPTSLLVEAEEENIPEIKDMLTHFYAENIEHRRWGAPFPVIEIVKRGINKARGIKHVQNYLNIADDHIIAFGDEDNDIEMIKFATHGIAMANGLKDLKEIANETTYSNNEDGIGRYLNDFWY

SEQ ID NO: 1509 - DNA, 669 bp, Artificial Sequence
  Description of Artificial Sequence: synthetic nucleic acid sequence
gtgtcatttgattgccccactggtgcatcaatagcaattattggagaaagtggaagtggaaagtctacgttgagtcgtatgattttaggactagaaaaaccagatcaaggacaagtgacgttggacggtcagcctgttcatttaaaaaaagtgagacgtcatcgaattgctgcggtttttcaagactatacttcttctttgcatccttttcatactgtcaaagatattttgtttgaagtaatgaatcagtgtcgatgtacatcaaaggagaatatggaagagtatgtaacagcgttactacgtgaagtagggttaaaatctgattgtttgtattgttatccacatatgctttcaggtggagaagcacagcgtgtagctattgcacgtgcgatatgtatgcaaccagattatatattatttgatgaggcgattagttcattagatatgtctatgcaaacacaaatattagatttattgaaaaggttacgtcactcacatcagctgagttatatttttattactcatgatatacaagctgccacgtatatatgtgatgacttgcttatttttaaaaatggctgtatcgaagctaggacatctataagtgaattgcataggcaacaaaatggttatacaagagaactgattgataaacaactatcaatctaa

SEQ ID NO: 1510 - protein, 222 aa, Artificial Sequence
  Description of Artificial Sequence: synthetic amino acid sequence
VSFDCPTGASIAIIGESGSGKSTLSRMILGLEKPDQGQVTLDGQPVHLKKVRRHRIAAVFQDYTSSLHPFHTVKDILFEVMNQCRCTSKENMEEYVTALLREVGLKSDCLYCYPHMLSGGEAQRVAIARAICMQPDYILFDEAISSLDMSMQTQILDLLKRLRHSHQLSYIFITHDIQAATYICDDLLIFKNGCIEARTSISELHRQQNGYTRELIDKQLSI

SEQ ID NO: 1511 - DNA, 1140 bp, Artificial Sequence
  Description of Artificial Sequence: synthetic nucleic acid sequence
atgttttttagtgcgaatgccatactcaatgttttcatacctctaagaggacatgacttggaggcgacgaataccgtaattggaattgtaatgggagcttacatgctaacggcaatgctatttcgcccttgggctggtcaaattattgcacgtgtaggaccgattaaagtattgcgtattatattattgattaatgctatggcactggtattatatgggtttacaggacttgaaggttatttggttgcacgtatcatgcaaggtgtatgtacggcattcttctcaatgtctttacaattgggtattatagatgctttacctgaaaaatatcgttcagaaggtgtatctctctattcattgttttcaacaattcccaatttattaggaccattaattgcagttgggatttggcacgtggaaaatatgaccatatttgctattgttatgatttttattgcagtaacaacaaccttatttggttatagaactacttttgcaaatacacaaaaagaggtagcaccaaaagaagaagtcttaccttttaatgcaatgactgtatatgttcaattttttaaaaataaagcactcttctgcagtggtatgattatgattttgtcatctatcgtgtttggtgcgatgagtacttttataccattatatacagttagggaaggtttcgcgaatgcaggtattttccttacaattcaagccattacagtagtgatagctagattttatttacgtaagtatgtaccatctgatggtttatggcatcaccggtttatgatgattgtcttaacgttactgatgattgcttcaatcattgtagcttttggaccacaaatattgagtatatttgtatatataagtgcaatctttattggaataacacaagcgctcgtttatcctacattgacaacgtatttaagttttgtcttaccaaagataggacgtaatatgttattaggattgtttatagcatgtgcagatttagggatttcactaggaggtgtgctaatggggccaatatcagatacggtaggatttaaatggatgtatattttatgcgctttattggttactattgcaatgatactaagtaaaattagacaaggacaaagtgtttctaaagcttcatag

SEQ ID NO: 1512 - protein, 379 aa, Artificial Sequence
  Description of Artificial Sequence: synthetic amino acid sequence
MFFSANAILNVFIPLRGHDLEATNTVIGIVMGAYMLTAMLFRPWAGQIIARVGPIKVLRIILLINAMALVLYGFTGLEGYLVARIMQGVCTAFFSMSLQLGIIDALPEKYRSEGVSLYSLFSTIPNLLGPLIAVGIWHVENMTIFAIVMIFIAVTTTLFGYRTTFANTQKEVAPKEEVLPFNAMTVYVQFFKNKALFCSGMIMILSSIVFGAMSTFIPLYTVREGFANAGIFLTIQAITVVIARFYLRKYVPSDGLWHHRFMMIVLTLLMIASIIVAFGPQILSIFVYISAIFIGITQALVYPTLTTYLSFVLPKIGRNMLLGLFIACADLGISLGGVLMGPISDTVGFKWMYILCALLVTIAMILSKIRQGQSVSKAS

SEQ ID NO: 1513 - DNA, 606 bp, Artificial Sequence
  Description of Artificial Sequence: synthetic nucleic acid sequence
gtgacggttgatgaaatggtaaatgaaatcttaccgtacaaaccttactttgaagcttcaggtggtggggtaacagtcagtggtggcgaaccattactacaaatgcctttcttggagcaattattcaaagaattaaaagcgaatggtgttcacacatgcattgatacttctgcgggatgtgtgaatgatacaccagcatttaatcgtcattttgatgaattgcaaaagcatacagatttaatcttattagatattaaacatattgataatgataagcacatcaaattaacaggcaaacctaacacacatattttaaagtttgcacgtaaattatctgatatgaaacaacctgtttggattagacatgttttagtacctggtatttcggatgataaagaagatttgataaaactaggagaatttattaattctttagataacgttgaaaagtttgaaatcttaccatatcatcaactcggtgtgcataagtggaaaaatttaggcatcccttatcaactcgaaaatgttgaaccatctgacgatgaagcggttaaagaagcttatcgctatgttaactttaatggcaaaatacccgtaacattatag

SEQ ID NO: 1514 - protein, 201 aa, Artificial Sequence
  Description of Artificial Sequence: synthetic amino acid sequence
VTVDEMVNEILPYKPYFEASGGGVTVSGGEPLLQMPFLEQLFKELKANGVHTCIDTSAGCVNDTPAFNRHFDELQKHTDLILLDIKHIDNDKHIKLTGKPNTHILKFARKLSDMKQPVWIRHVLVPGISDDKEDLIKLGEFINSLDNVEKFEILPYHQLGVHKWKNLGIPYQLENVEPSDDEAVKEAYRYVNFNGKIPVTL

SEQ ID NO: 1515 - DNA, 1362 bp, Artificial Sequence
  Description of Artificial Sequence: synthetic nucleic acid sequence
atgatgaaaaataaattaacattaaaagagaatctatttatcggctcaatgctgtttggtcttttttttggtgctggaaatctcatttttccaattcacttaggtcaaactgcgggggcaaatgtatggaccgccaatttaggatttcttatcacggctatcggactaccttttttaggaattatagcgataggtgtatctaaaacaaacggggtctttgaaatttcctcaaggataagtaaaatatatggttatttgttcacaattggcttgtatcttgttataggtccgttttttgcgttgccaagacttgcgacgacgtcatttgaaatagcattttcaccatttatttcatctggtacggcccaagcgttgttgcctatttttagtattttattcttcggagtagcgtggttattttcgcgtaaaccttctaaaatattagactatattggaaaattcttaaatccggtctttctcatcttgcttggaattgttgttgtgcttgcatttatccgtcctatgggtggaattagtcatgcgccagtaagtgctgattatagcaatagcgtgttactcaaagggtttatcgatggatataatacattagacgctttggcatcattagcatttggtattatcattgttactacaattaaaaagttggggattactaatccgaatacaatcgctaaagaaactttaaaatcaggtacgattagtattatagctatgggcgttatttatactttattagctttaatgggtacgatgagtttaggtcgttttaaagtaagtgaaaatggtggtattgcgcttgctcagattgcacaacattatttaggggattacggaattattattttgtcactaatcatcattgtggcatgtctgaaaacagcaataggattgatcacagccttttcggaaacatttacagagttattccctaaatctaactatctttggttagctactggggtgagtatattagcttgtatatttgctaatgtaggtttaacaaaaattattatgtattcaacaccagtgttgatgttcatttatcctttagcgattactttaattttattagcattacttagtccattatttaaacattctaaaattgtctatcgatttacaacattatttacaatggtggcggcatttgtagatggtgtgaaagcaagtccagagttctttgttaatacaaaatttgcacaaacaatcattggatttggtgaaaattatctcccattctttaacattggtatgggatggattgttccagcacttattggtttcattattggtattattgtatactttatgactgctaaaaaatcgtcccacgtacaataa

SEQ ID NO: 1516 - protein, 453 aa, Artificial Sequence
  Description of Artificial Sequence: synthetic amino acid sequence
MMKNKLTLKENLFIGSMLFGLFFGAGNLIFPIHLGQTAGANVWTANLGFLITAIGLPFLGIIAIGVSKTNGVFEISSRISKIYGYLFTIGLYLVIGPFFALPRLATTSFEIAFSPFISSGTAQALLPIFSILFFGVAWLFSRKPSKILDYIGKFLNPVFLILLGIVVVLAFIRPMGGISHAPVSADYSNSVLLKGFIDGYNTLDALASLAFGIIIVTTIKKLGITNPNTIAKETLKSGTISIIAMGVIYTLLALMGTMSLGRFKVSENGGIALAQIAQHYLGDYGIIILSLIIIVACLKTAIGLITAFSETFTELFPKSNYLWLATGVSILACIFANVGLTKIIMYSTPVLMFIYPLAITLILLALLSPLFKHSKIVYRFTTLFTMVAAFVDGVKASPEFFVNTKFAQTIIGFGENYLPFFNIGMGWIVPALIGFIIGIIVYFMTAKKSSHVQ

SEQ ID NO: 1517 - DNA, 363 bp, Artificial Sequence
  Description of Artificial Sequence: synthetic nucleic acid sequence
atgaatttgagtaatttcaaagttccaaaagttagattaggaaatagaacttatagtcaaagcgagctacaagactataggaaagccaatacacaaaggtataaccaagaggttagacacaataggcacaatagagagtatacagcgttctacaacagtacacagtggcgtaagttgcgtaaacaagtattattacgtgataactacttgtgtcaacattgtttaagtaaaggaatagtgaatgacaaagatttgattgttcaccataagattgaattaaaacgggactggtcgaaaagactggatatggataatttagaggcagtgtgttttagctgccataataaaattcacggtggataa

SEQ ID NO: 1518 - protein, 120 aa, Artificial Sequence
  Description of Artificial Sequence: synthetic amino acid sequence
MNLSNFKVPKVRLGNRTYSQSELQDYRKANTQRYNQEVRHNRHNREYTAFYNSTQWRKLRKQVLLRDNYLCQHCLSKGIVNDKDLIVHHKIELKRDWSKRLDMDNLEAVCFSCHNKIHGG

SEQ ID NO: 1519 - DNA, 525 bp, Artificial Sequence
  Description of Artificial Sequence: synthetic nucleic acid sequence
atggtaaaccatcaagcaacgcaaggtgctgaagcttttaatagagcttcaggatttatggaatctttaccattccttattgtgatggaatttatacttatttatataccattgttataccatggtttgttcggtttacacatcgcattcactgctaaggagaacatcgggcattactcattatttagaaactggatgtttttcttccaacgtgtaagtggtattttagcatttgtttttattgcaatgcacttatggcaaacacgtttgcaaaaagctttttatggtaaatctgtggactataatctaatgcatgaaacattacaacatccgttatgggcaatcttttacattatttgtgtcattgctgttgttttccattttgctaatggtttatggtcattttgtgtaacatggggctttttacaatctaaaaaatcacaacgtgtttttacttggatttcactcatagtatttttagtgatttcttatattggtgttgcagccgttattgcgtttatataa

SEQ ID NO: 1520 - protein, 174 aa, Artificial Sequence
  Description of Artificial Sequence: synthetic amino acid sequence
MVNHQATQGAEAFNRASGFMESLPFLIVMEFILIYIPLLYHGLFGLHIAFTAKENIGHYSLFRNWMFFFQRVSGILAFVFIAMHLWQTRLQKAFYGKSVDYNLMHETLQHPLWAIFYIICVIAVVFHFANGLWSFCVTWGFLQSKKSQRVFTWISLIVFLVISYIGVAAVIAFI

SEQ ID NO: 1521 - DNA, 1212 bp, Artificial Sequence
  Description of Artificial Sequence: synthetic nucleic acid sequence
atgtcaacaattaaagcggcagaacaaggtgcacatgtagatttattttccattgtaccggtaaagcgttcgcactctgtttgtgcacaaggtggcataaatggtgctgttaatactaaaggtgagggagattcaccgtggattcactttgatgatactgtttatggtggagacttcctggctaatcaaccaccagtcaaagcaatggctgatgctgcacctaaaatcatccatctgttagatcgtatgggggttatgtttaacagaacgaaagaaggcttattagactttagacgttttggcggtacactacatcatagaacagcttttgctggcgcaacgacaggtcaacaattgctttatgcattagatgagcaagttcgttcatttgaggtagatggtttagtaactaaatacgaaggatgggaatttctaggtattgttaaagacgaagaagatgctgcaagaggtattgttgctcaaaatatgacaacatcagaaattcaatcattcggttcagatgctgtcatcatggcaacaggtggtcctggtattatctttggtaaaacgacgaattcaatgattaatacaggttcagcggcgtcaatcgtttatcagcaaggtgcgatttatgcaaatggtgaattcatccaaatacatccgactgcgattcctggagatgacaaattacgtcttatgagtgaatcagctcgtggtgaaggtggacgtatttggacgtataaagatggtaaaccttggtacttcttagaagaaaaatatccagactatggtaacttggttccacgtgatatagcgacacgtgaaattttcgatgtttgtattaaccaaaagttaggtatcaatggagaaaacatggtataccttgatttatctcataaagatccacacgaattggatgttaaattaggtggtattattgaaatttatgaaaaattcacaggtgatgatccacgtaaagttccaatgaaaatcttcccagcagtgcattattcaatgggtggtttatacgtagactatgatcaaatgactaatatcaaagggttatttgcagctggagaatgtgatttctcacaacatggtggtaaccgtttaggtgccaattctttactttcagctatttataacataagcaaatatggtagccatgagtggatctattttttctcggttcatcttcttttcaatcattaa

SEQ ID NO: 1522 - protein, 403 aa, Artificial Sequence
  Description of Artificial Sequence: synthetic amino acid sequence
MSTIKAAEQGAHVDLFSIVPVKRSHSVCAQGGINGAVNTKGEGDSPWIHFDDTVYGGDFLANQPPVKAMADAAPKIIHLLDRMGVMFNRTKEGLLDFRRFGGTLHHRTAFAGATTGQQLLYALDEQVRSFEVDGLVTKYEGWEFLGIVKDEEDAARGIVAQNMTTSEIQSFGSDAVIMATGGPGIIFGKTTNSMINTGSAASIVYQQGAIYANGEFIQIHPTAIPGDDKLRLMSESARGEGGRIWTYKDGKPWYFLEEKYPDYGNLVPRDIATREIFDVCINQKLGINGENMVYLDLSHKDPHELDVKLGGIIEIYEKFTGDDPRKVPMKIFPAVHYSMGGLYVDYDQMTNIKGLFAAGECDFSQHGGNRLGANSLLSAIYNISKYGSHEWIYFFSVHLLFNH

SEQ ID NO: 1523 - DNA, 579 bp, Artificial Sequence; identical to SEQ ID NO: 1223
  Description of Artificial Sequence: synthetic nucleic acid sequence

SEQ ID NO: 1524 - protein, 192 aa, Artificial Sequence; identical to SEQ ID NO: 1224
  Description of Artificial Sequence: synthetic amino acid sequence

SEQ ID NO: 1525 - DNA, 966 bp, Artificial Sequence
  Description of Artificial Sequence: synthetic nucleic acid sequence
atgtctgaggagacacctgttattatttcttccagaattcgattagctagaaatcttgaaaaccatgtccacccacttatgttcccttcagagcaagaaggatatcgagtgataaatgaagttcaagatgcgctttccaacttaactttaaatcgattagatacgatggatcaacaaagtaaaatgaaattggttgcgaaacatcttgtgagtcctgaactagtgaaacaacctgcttcagcagtaatgttaaatgatgatgaatcggtaagtgttatgataaacgaagaagatcatatacgaatacaggctctaggaactgatttatcgctaaaggatttatatcaacgcgcttctaaaattgatgatgaattagataaagcgttagacattagttatgatgagcatttaggatatttaactacctgtcctactaatattggtacaggaatgcgtgcaagtgtgatgttacatttacctggactctccattatgaaaagaatgaacagaattgcacaaacaattaatcgttttggatttacaattcgaggtatatacggagaagggtcacaagtatatggtcacatttatcaggtttcaaaccaacttacactagggaaaacagaagaagacattatcgataacttaactgaagttgtaaatcaaattataaatgaagaaaagcaaataagagaaagacttgataaacacaattctgtagagacactggatagagtttatcgatcattaggtgtactacaaaacagtagaattatttctatggaagaagcctcatatcgtttgagcgaagtgaaactaggtattgatttgaattatattttgcttgaaaattttaaatttaatgaattaatggtagcaatacagtcaccatttttaatagatgacgatgataatagaacagtaaatgaaaaaagagctgatttattaagagaacatataaaatag

SEQ ID NO: 1526 - protein, 321 aa, Artificial Sequence
  Description of Artificial Sequence: synthetic amino acid sequence
MSEETPVIISSRIRLARNLENHVHPLMFPSEQEGYRVINEVQDALSNLTLNRLDTMDQQSKMKLVAKHLVSPELVKQPASAVMLNDDESVSVMINEEDHIRIQALGTDLSLKDLYQRASKIDDELDKALDISYDEHLGYLTTCPTNIGTGMRASVMLHLPGLSIMKRMNRIAQTINRFGFTIRGIYGEGSQVYGHIYQVSNQLTLGKTEEDIIDNLTEVVNQIINEEKQIRERLDKHNSVETLDRVYRSLGVLQNSRIISMEEASYRLSEVKLGIDLNYILLENFKFNELMVAIQSPFLIDDDDNRTVNEKRADLLREHIK

SEQ ID NO: 1527 - DNA, 2454 bp, Artificial Sequence; identical to SEQ ID NO: 49
  Description of Artificial Sequence: synthetic nucleic acid sequence

SEQ ID NO: 1528 - protein, 817 aa, Artificial Sequence; identical to SEQ ID NO: 50
  Description of Artificial Sequence: synthetic amino acid sequence

SEQ ID NO: 1529 - DNA, 915 bp, Artificial Sequence
  Description of Artificial Sequence: synthetic nucleic acid sequence
gtgatacatcaaactgtaaaagaagagagacctgacttacttgttgttgattcgattcaaacaatctatcatccggaaattagttccgcacctggatcggtatcacaagtaagagagagtacgcagagtttaatgaacattgctaaacaaatgaatattgccacatttattgtgggacacgtaacaaaagaaggacaaatcgccggaccaagattattggaacatatggttgatacagttctttattttgaaggagatgagcatcacgcatatcgtatccttagagcagtaaaaaatagatttggttctacaaatgagatggggattttcgaaatgaagcaaagtggattaaaaggtgtacttaatccttctgaaatgtttttagaagaacgttctacaaatgttccgggctctacaatcgtccccactatggaaggaacaagaccactactcattgaagtccaagcgcttgttacaccaacaacatttaataatcctagacgaatggctacaggtatagatcataatcgattaagtttacttatggcggttctagaaaaaaaggaaaactatttactccaacaacaagatgcctatattaaagtagcaggtggcgtcaaattaacagaacctgctgttgatttaagcattattgttgcgacagcttcaagttttaaagatcaagctgttgatggattagattgttttgtgggtgaagttggattaacaggtgaagtacgcagagtatctcgcatagagcaacgtgttcaagaagcgaccaaactagggtttaaaagagctattattccacagacaaatattggaggttggacattcccagaaggcatccaagtcgttggtgtttcatcagtacatgaagctttgaaatatgcattacattcaaaacagcgataa

SEQ ID NO: 1530 - protein, 304 aa, Artificial Sequence
  Description of Artificial Sequence: synthetic amino acid sequence
VIHQTVKEERPDLLVVDSIQTIYHPEISSAPGSVSQVRESTQSLMNIAKQMNIATFIVGHVTKEGQIAGPRLLEHMVDTVLYFEGDEHHAYRILRAVKNRFGSTNEMGIFEMKQSGLKGVLNPSEMFLEERSTNVPGSTIVPTMEGTRPLLIEVQALVTPTTFNNPRRMATGIDHNRLSLLMAVLEKKENYLLQQQDAYIKVAGGVKLTEPAVDLSIIVATASSFKDQAVDGLDCFVGEVGLTGEVRRVSRIEQRVQEATKLGFKRAIIPQTNIGGWTFPEGIQVVGVSSVHEALKYALHSKQR

SEQ ID NO: 1531 - DNA, 934 bp, Artificial Sequence
  Description of Artificial Sequence: synthetic nucleic acid sequence
atggaaggaggctataaattgaatataacaaaagcaattgttgtagcaatctatatcattgttggtgcagcacttggtgttataattatacccgaagttgttacagatcttggcattcatcaccatgcggttatcactaattattatgtagatggtttcatagggatcattatattttttataatatttggattgttcattaataaagtaacatatgcttttaaacaatttgaacaattaatcatgagacgtagtgcggtagaaatattatttgctacaattggtttaattattggtttatttatttcagtgatggtttcttttatcttagaaatgataggtaattccatattaaatcactttgtacctatgataatcactattattttatgttatttagggtttcaatttggtctgaaaaaaagagatgaaatgcttatgtttttaccagagaatatggcacgttccatgtctaataatatacgaagagcgacacctaagattgtagatacaagtgccattatcgatggaaggatattagatattatacgttgcggatttatcgatggtgatatattgataccacaaggcgttataaatgaattacaggttatagcggatgctaaagatagcgtgaaacgtgaaaaaggtcaaagaggattagatattttgaatcaactttatgatttagattatcctacacgcgttatacatccaactcaatcccatagtgatatagatacattattaattaaattagcacaacagtatcatgcacatgtgattacgactgattttaatttaaataaagtatgtcacgttcaaggaattacagcactcaacgttaatgatttatcggaagcaatcaaacctaatgtacatcaaggcgaccagttaagtattttattaacgaagataggtaaagagcttttta

SEQ ID NO: 1532 - protein, 312 aa, Artificial Sequence
  Description of Artificial Sequence: synthetic amino acid sequence
  MOD_RES (312): variable amino acid
MEGGYKLNITKAIVVAIYIIVGAALGVIIIPEVVTDLGIHHHAVITNYYVDGFIGIIIFFIIFGLFINKVTYAFKQFEQLIMRRSAVEILFATIGLIIGLFISVMVSFILEMIGNSILNHFVPMIITIILCYLGFQFGLKKRDEMLMFLPENMARSMSNNIRRATPKIVDTSAIIDGRILDIIRCGFIDGDILIPQGVINELQVIADAKDSVKREKGQRGLDILNQLYDLDYPTRVIHPTQSHSDIDTLLIKLAQQYHAHVITTDFNLNKVCHVQGITALNVNDLSEAIKPNVHQGDQLSILLTKIGKELFX

SEQ ID NO: 1533 - DNA, 510 bp, Artificial Sequence
  Description of Artificial Sequence: synthetic nucleic acid sequence
atgaaatatccaaactgtgtacttttaggtgaaggtgccaaaggtagcacattatccattgcatttgctggtaaaggtcaagttcaagatgctggtgctaaaatgattcataaagcacctaatacatcttcaactattgtttctaaatctatctccaaaaatggtggtaaagtcatttatcgtggtatcgttcattttggacgtaaagctaagggagcacgttcaaatatcgaatgtgatacattaattttagataatgaatcgacttcagatactatcccttataatgaagtgttcaatgacaatatttcattagaacatgaagctaaagtttctaaagtatcagaagagcaattattctatcttatgagtcgtggtatttctgaggaagaagcgacagaaatgattgttatgggattcattgagccgttcacaaaagaattaccaatggaatacgcagtagaaatgaaccgtttaattaagtttgaaatggaaggctcaattggttaa

SEQ ID NO: 1534 - protein, 169 aa, Artificial Sequence
  Description of Artificial Sequence: synthetic amino acid sequence
MKYPNCVLLGEGAKGSTLSIAFAGKGQVQDAGAKMIHKAPNTSSTIVSKSISKNGGKVIYRGIVHFGRKAKGARSNIECDTLILDNESTSDTIPYNEVFNDNISLEHEAKVSKVSEEQLFYLMSRGISEEEATEMIVMGFIEPFTKELPMEYAVEMNRLIKFEMEGSIG

SEQ ID NO: 1535 - DNA, 414 bp, Artificial Sequence
  Description of Artificial Sequence: synthetic nucleic acid sequence
atgatgaataaagcaattaatataacatcattgataggaatcattttacaaagtttttctagtctattgtttttagttttcttggtattttcaattactggagcgatggatgctaattttactacaacagttaatggtgaaacaacagttcatagtgcagaagccgcacagcatgtttttagtgttggatttttggttatattcatcgttgcaattttttcaatcatttttggaattataggtatgatgaagaaaaaaactaatactatagcaagtggtgtattttatattataggtgcaatattaagtttaaatatgattacttttatatcttggctagtgtgtggaatattattaattaaaaaaagacaaaataaaagcataaaagacaataaaacacatttggtggattag

SEQ ID NO: 1536 - protein, 137 aa, Artificial Sequence
  Description of Artificial Sequence: synthetic amino acid sequence
MMNKAINITSLIGIILQSFSSLLFLVFLVFSITGAMDANFTTTVNGETTVHSAEAAQHVFSVGFLVIFIVAIFSIIFGIIGMMKKKTNTIASGVFYIIGAILSLNMITFISWLVCGILLIKKRQNKSIKDNKTHLVD

SEQ ID NO: 1537 - DNA, 810 bp, Artificial Sequence
  Description of Artificial Sequence: synthetic nucleic acid sequence
gtgacaatcttagcgattgatattggagtgaatgtgggaatagcatcagcaattgtaacaattgtgattatacttatttctgaagtgattcctaaatcaattgctgcaacatttcctgataaaatttcaaaacttgtgtatcctatcattcatatatgtgttattgtactcaagcccattacaatcttattaaacaagatgacagatggtattaatcatttactatctcgaggccaacctgttgaaaaaagattttctaaagaagaaattcgtacattattaaatattgcgggtagagaaggtgcatttaatgagatagaaaatactcgacttcaaaacgttatggactttgaacaattgaaggttaaggatgttgataccacgcctcgtattaatgttgtagctttttcaaaggaagtaacatatgacgaagcttatgatacagtgatgaataacccatatacaagatatccagtatatgatgaaaatatagatgatatcatcggcgtattccactcaaaatatttattagcttggagtaaaaataaagaggacgcaattactaattatgcatcaagccctttatttgtaaatgaacataatagggcagaatgggtattgcgtaaaatgaccgtttcacgaaaacatttagcgattgttttagatgaatttggaggtacggatgctatcgtatcgcacgaagatttaatagaagagctacttggtatggatattgaggatgaaatggatcgtgaagaagaaaataaattaaaacatcaaaaatttccgcaaagcatgatgcatcgttaa

SEQ ID NO: 1538 - protein, 269 aa, Artificial Sequence
  Description of Artificial Sequence: synthetic amino acid sequence
VTILAIDIGVNVGIASAIVTIVIILISEVIPKSIAATFPDKISKLVYPIIHICVIVLKPITILLNKMTDGINHLLSRGQPVEKRFSKEEIRTLLNIAGREGAFNEIENTRLQNVMDFEQLKVKDVDTTPRINVVAFSKEVTYDEAYDTVMNNPYTRYPVYDENIDDIIGVFHSKYLLAWSKNKEDAITNYASSPLFVNEHNRAEWVLRKMTVSRKHLAIVLDEFGGTDAIVSHEDLIEELLGMDIEDEMDREEENKLKHQKFPQSMMHR

SEQ ID NO: 1539 - DNA, 414 bp, Artificial Sequence
  Description of Artificial Sequence: synthetic nucleic acid sequence
atggtgctcgtacaatttccaccttggtttgattgtaacgtccaaaatataaattacatcttatatgtgagaaaacaattaactgatattccgatgagcattgaatttagacatcaatcatggtttgacaatcagtataaagaacaaactttatccttcttaacacaacatcaaatcattcatgcagtggtagatgaacctcaagttaaagaggggagcgttcctttagtaaataggattactagtgaaattgcttttgtacgttatcatggacgtaatcattatggttggactaaaaaagatatgactgatcaagaatggcgagatgtaagatatttatatgattatagcgatgatgagttagctgacttggctcgtaaagtcgaaatacttaatcaaaaggctaagaaagta

SEQ ID NO: 1540 - protein, 138 aa, Artificial Sequence
  Description of Artificial Sequence: synthetic amino acid sequence
MVLVQFPPWFDCNVQNINYILYVRKQLTDIPMSIEFRHQSWFDNQYKEQTLSFLTQHQIIHAVVDEPQVKEGSVPLVNRITSEIAFVRYHGRNHYGWTKKDMTDQEWRDVRYLYDYSDDELADLARKVEILNQKAKKV

SEQ ID NO: 1541 - DNA, 320 bp, Artificial Sequence
  Description of Artificial Sequence: synthetic nucleic acid sequence
atgtccgcgtttattgaacaatctcaatatattgcgattcataatcaagataatttatatgatgatttattccagtttttagtaaaaataaaagatatctataaaacaaaactaggtagtgctgtgattgaaatattaattagtcatcaacaaatggaagctagagaaacttttatgactaattactttaatcataatcgcaaagttttaaaagagattgttcgtaagcacatacaagaggaagaacaagatttgtttattgatttaatcttctcacccatctattttaatatattaattaaacctgaaactctggatga

SEQ ID NO: 1542 - protein, 107 aa, Artificial Sequence
  Description of Artificial Sequence: synthetic amino acid sequence
  MOD_RES (107): variable amino acid
MSAFIEQSQYIAIHNQDNLYDDLFQFLVKIKDIYKTKLGSAVIEILISHQQMEARETFMTNYFNHNRKVLKEIVRKHIQEEEQDLFIDLIFSPIYFNILIKPETLDX

SEQ ID NO: 1543 - DNA, 615 bp, Artificial Sequence
  Description of Artificial Sequence: synthetic nucleic acid sequence
atgaatgctccatttattttaatagctgatcctagaatcgaaggtggtgccttttacctagggtcagagaattatgaacaggcaatccgtaaggtcatccaaaatgctttggattatttgggatttgcgaacaaccaattaattctttctggattatcaatgggatcatttggcgcactttattacgctacaaaattaaatccagcggctgttattgtaggaaaacctttgataaatctcggtactattgctaataatatgaaactcgttcgtccaaacgattttggaacgtcacttgatattttgcgattgaatcaaaatggcataactaacaaagatgttgttcagttagataatcatttttggaagcaaattcagcatagtgatttgtcaatgaccacatttgcgattgcttacatggagcatgatgattatgacaaatatgcatttcaagatttattgcctgttcttacaaaacaacatgcacgtgtgataagtaaaagaattcctggtagacataatgatgattctgctactgttactcattggtttattaatttttataatttaatcatggaagagcgatttgggagggtaacacatgcaagaagatag

SEQ ID NO: 1544 - protein, 204 aa, Artificial Sequence
  Description of Artificial Sequence: synthetic amino acid sequence
MNAPFILIADPRIEGGAFYLGSENYEQAIRKVIQNALDYLGFANNQLILSGLSMGSFGALYYATKLNPAAVIVGKPLINLGTIANNMKLVRPNDFGTSLDILRLNQNGITNKDVVQLDNHFWKQIQHSDLSMTTFAIAYMEHDDYDKYAFQDLLPVLTKQHARVISKRIPGRHNDDSATVTHWFINFYNLIMEERFGRVTHARR

SEQ ID NO: 1545 - DNA, 516 bp, Artificial Sequence; identical to SEQ ID NO: 509
  Description of Artificial Sequence: synthetic nucleic acid sequence

SEQ ID NO: 1546 - protein, 171 aa, Artificial Sequence; identical to SEQ ID NO: 510
  Description of Artificial Sequence: synthetic amino acid sequence

SEQ ID NO: 1547 - DNA, 2160 bp, Artificial Sequence
  Description of Artificial Sequence: synthetic nucleic acid sequence
atgtatccaaaagatgtgcagattttaggagcaatcgctatgcatcaggggaatattgcagaaatgcaaacaggagaaggtaagacgcttacagctaccatgcctctgtacttaaatgcacttacaggtaaaggtgcttatctaatcacaacaaatgattacttagcaaaacgcgattttttagaaatgaaaccactatatgaatggctaggcttgtctgtatcattaggatttgtggacattccagaatatgaatacgctgaaaatgaaaaatatgaactgtaccaccatgacattgtttacacgactaatgggcgactagggtttgattatttaattgataatttagctgatgatattcgtgccaaatttttaccgaaattaaactttgctattattgatgaagtcgattctattatattagacgctgcccaaacgcctttagttatttctggtgcaccacgtgtacaatctaatttatttcacatcgttaaaaagtttgttgaaacacttgagaaagataaagacttcatagttaattttaataaaaaagaagtgtggctcactgatgagggctcggaaaaagcaagccattatttcaaagtgaatagtatataccaacagcaatattttgatttagttaggatgattcatttatcgcttagagctaagtatttattcaaatataatttagactattttatttttgatggtgagattgtgcttatagatagaataactggtcgtatgctacctggaacaaagcttcagtctggtttacatcaagctatagaggctctggaaaatgttgaaatttctcaagatatgagtgtgatggcaaccataacattccaaaacttatttaagcaatttgatgaattttcaggtatgactggaacaggtaaattaggggaaaaagaattctttgatttatattcaaaagttgttatagagattccgactcacagtccgattgaacgagatgatagacctgatagagtatttgctaatggtgacaaaaagaacgatgcaattttaaagacagtgattggtatacatgaaactcaacaacctgtgttactaattacacgtactgcagaagcggcagaatatttttcagctgagttatttaaacgtgatatacccaacaatttattaatcgctcaaaatgtagctaaagaggcacaaatgattgctgaggcgggacaattatctgcagttactgttgctacaagtatggcagggcgtggaactgatataaagttatcaaaagaggttcatgatatcggtggcttagcagtgattattaatgaacatatggataatagccgtgttgatcgtcaattaagaggacgctcaggtcgccaaggagatcctggatattcacagatttttgtatcacttgatgatgatttagtaaaacgttggagtaactctaacttggcagaaaataaaaacctccaaacgatggatgcatctaaactagaaagtagtgcactctttaaaaaacgtgtaaagtcaattgttaataaagcgcaacgtgtatctgaagagactgctatgaaaaatagagaaatggcaaatgaattcgaaaaaagtattagtgttcaacgagataaaatttatgctgaacgtaatcacatacttgaagcaagcgattttgatgattttaattttgaacagcttgcacgagatgtgtttacaaaagacgttaaaaatcttgacttaagtagtgaacgtgcacttgtgaattatatatacgaaaacttaagttttgtcttcgatgaagatgtatcaaatattaatatgcaaaatgatgaagaaatcatacaattcttaatacaacaatttactcaacaatttaacaatcgtttagaagttgctgctgattcatatttaaaacttcgtttcattcaaaaatcaattttgaaagcgatagatagcgaatggattgaacaagtagataacttacaacaacttaaagccagtgtaaacaatcgacaaaatggacagcgtaatgtcatttttgaatatcataaagtggctcttgaaacgtatgaatatatgtctgaagatataaaaaggaagatggttagaaatttatgtttaagtattctagcctttgataaggacggagatatggtcattcatttcccataa

SEQ ID NO: 1548 - protein, 719 aa, Artificial Sequence
  Description of Artificial Sequence: synthetic amino acid sequence
MYPKDVQILGAIAMHQGNIAEMQTGEGKTLTATMPLYLNALTGKGAYLITTNDYLAKRDFLEMKPLYEWLGLSVSLGFVDIPEYEYAENEKYELYHHDIVYTTNGRLGFDYLIDNLADDIRAKFLPKLNFAIIDEVDSIILDAAQTPLVISGAPRVQSNLFHIVKKFVETLEKDKDFIVNFNKKEVWLTDEGSEKASHYFKVNSIYQQQYFDLVRMIHLSLRAKYLFKYNLDYFIFDGEIVLIDRITGRMLPGTKLQSGLHQAIEALENVEISQDMSVMATITFQNLFKQFDEFSGMTGTGKLGEKEFFDLYSKVVIEIPTHSPIERDDRPDRVFANGDKKNDAILKTVIGIHETQQPVLLITRTAEAAEYFSAELFKRDIPNNLLIAQNVAKEAQMIAEAGQLSAVTVATSMAGRGTDIKLSKEVHDIGGLAVIINEHMDNSRVDRQLRGRSGRQGDPGYSQIFVSLDDDLVKRWSNSNLAENKNLQTMDASKLESSALFKKRVKSIVNKAQRVSEETAMKNREMANEFEKSISVQRDKIYAERNHILEASDFDDFNFEQLARDVFTKDVKNLDLSSERALVNYIYENLSFVFDEDVSNINMQNDEEIIQFLIQQFTQQFNNRLEVAADSYLKLRFIQKSILKAIDSEWIEQVDNLQQLKASVNNRQNGQRNVIFEYHKVALETYEYMSEDIKRKMVRNLCLSILAFDKDGDMVIHFP

SEQ ID NO: 1549 - DNA, 1518 bp, Artificial Sequence
  Description of Artificial Sequence: synthetic nucleic acid sequence
gtgttagacatgacgatttataatatcaattttggaatcggttgggccagtagtggtgttgaatatgcacaagtgtatcgagcaaaactattaaggcaattaccttatccaacaaaatttatatttttagattttattcaatcagaaaatattcaaacactcacaagcaacatagggtttaaagatgatgaagttatttggctatatcaatacttcacagacgtaaaaatcgctcctacaacgtacacagttgatgatttaatttcagagttaggtaatgaggttactcgaaaagaacaaaacggtaaagtattacgactctatttaaataatcagcaaacattcgtaacctgctatttaaaaaatgctaacgaacattacgttgatcgtgcagagtttgtggtgaatggaatgttaattaggaaagatttttatagctatgtaagaacattctcggagtattatgctccttttaacaataaagctaaaatatatatgcgtcaattttataatgaaaatggatcaattgcatatcgcgaatatatagatgaagatgaacatgtttttgtgtttgatgatgcacgtttatacagtaaacaagcactcgtcgcatactttatacgtcaattgctattgaattcagaggatatcattattattgatcgagcaactgatgtgggacaagccatattagaaaacaagggatccagtaaagttggcgtagtcgttcacgctgaacatttcagtgaaggtgcgactgatgggactcacattttatggaataattattatgagtatcaattcgaaaatgcacagcatattgatttctttatcacagcgacagatttgcaaaggcagacactaagtgaacaatttaaacaatataagaatgattgtccacgtatacgtacaattccagtaggtagtatagaatcgttacaatatcctgaaaaagaaagaaaaccatattccatcatgaccgcatcacgtcttgctaacgaaaaacatgttgattggatagtggaagctgtgattaaagctaaacatcagttacctcaattgagttttgatatctacggacaaggagaagaacaagaaaaaattaaaaatattattaccaaacatcgtgctgaggattacatacaaattaaaggacatagaaatcttcgtacaatatatcagcaatatgaattattcatagcggcctcacaaagtgaagggttcggactgacattaatggaagcggttggctctggtttaggtatgattggatttgatgtgaattatggcagtccgacatttattcgacatcatcaaaatggctatttgataccgatagattttgaacaagcgtctactgatgatatcacaacgcaaatcgctcatatgattattcgatattttgaagatggtcccataagggcacatgaggtatcgtatgacattgcagaatcatttaaaacatcgcatattgttgatctatggagacaactcattgaagaggtgctatatgattaa

SEQ ID NO: 1550 - protein, 505 aa, Artificial Sequence
  Description of Artificial Sequence: synthetic amino acid sequence
VLDMTIYNINFGIGWASSGVEYAQVYRAKLLRQLPYPTKFIFLDFIQSENIQTLTSNIGFKDDEVIWLYQYFTDVKIAPTTYTVDDLISELGNEVTRKEQNGKVLRLYLNNQQTFVTCYLKNANEHYVDRAEFVVNGMLIRKDFYSYVRTFSEYYAPFNNKAKIYMRQFYNENGSIAYREYIDEDEHVFVFDDARLYSKQALVAYFIRQLLLNSEDIIIIDRATDVGQAILENKGSSKVGVVVHAEHFSEGATDGTHILWNNYYEYQFENAQHIDFFITATDLQRQTLSEQFKQYKNDCPRIRTIPVGSIESLQYPEKERKPYSIMTASRLANEKHVDWIVEAVIKAKHQLPQLSFDIYGQGEEQEKIKNIITKHRAEDYIQIKGHRNLRTIYQQYELFIAASQSEGFGLTLMEAVGSGLGMIGFDVNYGSPTFIRHHQNGYLIPIDFEQASTDDITTQIAHMIIRYFEDGPIRAHEVSYDIAESFKTSHIVDLWRQLIEEVLYD

SEQ ID NO: 1551 - DNA, 909 bp, Artificial Sequence
  Description of Artificial Sequence: synthetic nucleic acid sequence
atgacacgtgaaggtaaagaagtgatttatgagaattatgtaactaacgatgtagttgtagaatatgaagggaaatcttatttttttgagtcatatacagagtggattaaattttacttgagtgaaatgggcattgagataaaagaagttatatttaatactttatcaacaccatttttagcaatttatcatttgccgacattgaaaaaaggtattttattttggcaagaacaatctcagggttatgtcccaggaaatatgaaagtcatgttatcaccaaaccttcaaagtcgctttgccgttattgtccctaatcagaatgaatacaaattgatcaaggaacaactatctagggaggaacaacaggcagcatatgcatctggttacttatatgacacgtataaacggaatcattattctaagaatgtattaacattaacaaattcagatcaaataccacatgttgaaacgttggtacgtttgcataaagattatcaatttcacataggcgctaaaactgagatgtcttcaaaattattaagtttatcgcaatatgaaaatgttaaattatatccaataattaaagaacaaacagttcaaaccttatatcaacaatgtgacatctatttagatattaatgaggggaacgaaatagggaatgctgtaagaagcgcatataatcatcaattgttaattatgggatataaagaggttgttcataatcaagatttcgttgcaatagaaaatcagtttcttgtaaatgatataagtcagttgagtaacgctttgaaagagataggaaatcatcgtggtcaatttgaaacacgtttagcactacaacaacgtcatgctaatgctgtgccggtatcaacatttaaatacgcattagtacaagcattaagtggttaa

SEQ ID NO: 1552 - protein, 302 aa, Artificial Sequence
  Description of Artificial Sequence: synthetic amino acid sequence
MTREGKEVIYENYVTNDVVVEYEGKSYFFESYTEWIKFYLSEMGIEIKEVIFNTLSTPFLAIYHLPTLKKGILFWQEQSQGYVPGNMKVMLSPNLQSRFAVIVPNQNEYKLIKEQLSREEQQAAYASGYLYDTYKRNHYSKNVLTLTNSDQIPHVETLVRLHKDYQFHIGAKTEMSSKLLSLSQYENVKLYPIIKEQTVQTLYQQCDIYLDINEGNEIGNAVRSAYNHQLLIMGYKEVVHNQDFVAIENQFLVNDISQLSNALKEIGNHRGQFETRLALQQRHANAVPVSTFKYALVQALSG

SEQ ID NO: 1553 - DNA, 348 bp, Artificial Sequence
  Description of Artificial Sequence: synthetic nucleic acid sequence
atggaaaattttgataaaagttatcatgataaaacgggtgatgtattaggggctttaagttatctaagtgtatttttcgcacctgtattgtttccattaatcgtatggattgttggacaaccaccagcatctacgtattcaagaaatgcattatttaaccatattttgagttgggtgtgtttggtattaggacttatatcatttgctgctggactatccttgattgattcgacaaatggagtcgctgtactagtgataggagtaattattggaggtattctacttatcgcttcgcttgtattatttattattaatattgtgaagggtatcaaattattgatgatatag

SEQ ID NO: 1554 - protein, 115 aa, Artificial Sequence
  Description of Artificial Sequence: synthetic amino acid sequence
MENFDKSYHDKTGDVLGALSYLSVFFAPVLFPLIVWIVGQPPASTYSRNALFNHILSWVCLVLGLISFAAGLSLIDSTNGVAVLVIGVIIGGILLIASLVLFIINIVKGIKLLMI

SEQ ID NO: 1555 - DNA, 345 bp, Artificial Sequence; identical to SEQ ID NO: 255
  Description of Artificial Sequence: synthetic nucleic acid sequence

SEQ ID NO: 1556 - protein, 114 aa, Artificial Sequence; identical to SEQ ID NO: 256
  Description of Artificial Sequence: synthetic amino acid sequence

SEQ ID NO: 1557 - DNA, 1500 bp, Artificial Sequence
  Description of Artificial Sequence: synthetic nucleic acid sequence
atgaaaggaatttatgctgctatcacaacccttgtggttacattattaattgcaattccattctttaaattaccagtaggaattgcctctggagcagttgttgaaggtttcttccaaggtatcttcccaatcggatatattgttattatggcagtattattatataagattactttgaaatcggggcaattcgcaactattcaagacagtattacaagtatttcacaagaccaaagaattcagcttcttttaattggtttttcatttaatgcattcttagaaggcgctgcaggatttggtgttccaattgcaatttgtgcacttttattagcgcaacttggctttagaccattacaagcagctatgttatgtttagtagctaacgctgcatctggtgcatttggtgcaattggtattccggttggtgttgtagatacacttaacttacctggtcatgtagaagcgatgggagtttcacaaacatcaacattaactttagcaattattaacttctttattcctttcttacttatctttatcgtagatggtttcaaaggaattaaagaaactttaccttcaattcttgttgtttctgtcacttatacagttttacaaggattacttacagtgtttaatggtccagaattagctgatatcattccatcacttgcttctatgttagcattagctttattctctaagaaattccaacctaagaatatctttagagttcaaaaagatgttaaaccagaagcaccgaaaaaacttaaaggtaaagaagtcttatttgcttggagtccattcattatcttaactgtcattgttatgatttggagtgcaccttcatttaaagcattatttgcaccaaaaggtaaattatctgctttagttgcaaactttgacttacctggtactttcagtaatatttcacacaaaccaattactttatcattaaacttaattggtcaaacaggtacagcaattctaattacaattattattactgttttaatggctaaaaaagtcaactttggtgatgctggtcgcttatttgttgaagcatttaaagaattatggttaccaatcataacaatttgtttcatcttagcaatttcaaaaatcacaacatatggtggtttaagtaatgctatgggacaaggcatctcaaaagcaggaagcgtattcccaatattatcaccaatccttggttggatcggcgtatttatgactggttcagttgttaataacaactctttattcgcgccaattcaagcttctgtagcacaacaaattggtacaagtggttcactacttgtagcttcaaatacagcaggtggggttgcggcgaaacttatttctccacaatctattgccattgcaacagcagctgttaaagaagtaggtaaagaatctgaactacttaaaatgacattacgttatagtattggattacttgtatttatctgtatctggacatttatcttgtcattcattctgtaa

SEQ ID NO: 1558 - protein, 499 aa, Artificial Sequence
  Description of Artificial Sequence: synthetic amino acid sequence
MKGIYAAITTLVVTLLIAIPFFKLPVGIASGAVVEGFFQGIFPIGYIVIMAVLLYKITLKSGQFATIQDSITSISQDQRIQLLLIGFSFNAFLEGAAGFGVPIAICALLLAQLGFRPLQAAMLCLVANAASGAFGAIGIPVGVVDTLNLPGHVEAMGVSQTSTLTLAIINFFIPFLLIFIVDGFKGIKETLPSILVVSVTYTVLQGLLTVFNGPELADIIPSLASMLALALFSKKFQPKNIFRVQKDVKPEAPKKLKGKEVLFAWSPFIILTVIVMIWSAPSFKALFAPKGKLSALVANFDLPGTFSNISHKPITLSLNLIGQTGTAILITIIITVLMAKKVNFGDAGRLFVEAFKELWLPIITICFILAISKITTYGGLSNAMGQGISKAGSVFPILSPILGWIGVFMTGSVVNNNSLFAPIQASVAQQIGTSGSLLVASNTAGGVAAKLISPQSIAIATAAVKEVGKESELLKMTLRYSIGLLVFICIWTFILSFIL

SEQ ID NO: 1559 - DNA, 348 bp, Artificial Sequence
  Description of Artificial Sequence: synthetic nucleic acid sequence
atgtttactgaattagaagatttgtatttccgaggaaatgaaagactattacatcaagctttcaataacctcatcattaatgcaatgaattatgctcctcaaaatagcatgattaatatcactctaactagtacaaatcacttgattatatttaatattgaaaatgatggatcgattgcagaagaagatgcgaaacatatcttcgatcgtttttataaactgagtgacgaatctagtagtaatggtctaggtctagccattacccaatcaatcattcatcttcatcatggtagcattactctcacttcagatgataaaacacaatttattgtaaaactatttatttag

SEQ ID NO: 1560 - protein, 115 aa, Artificial Sequence
  Description of Artificial Sequence: synthetic amino acid sequence
MFTELEDLYFRGNERLLHQAFNNLIINAMNYAPQNSMINITLTSTNHLIIFNIENDGSIAEEDAKHIFDRFYKLSDESSSNGLGLAITQSIIHLHHGSITLTSDDKTQFIVKLFI

SEQ ID NO: 1561 - DNA, 1125 bp, Artificial Sequence
  Description of Artificial Sequence: synthetic nucleic acid sequence
atgcataatatttatgcaatgggcggaacggtaaagtcggtgacacaacttgcaaatacactggcagaaaaaggacatcctgtaacaattatttcagtttttagaggcgcagactctccatattttgaattacattcagcaataaaagttaaagtcgtagtggactatcgcttaaagcttaaaaatactagagctattacggcaaatcgtatcaaaaagtataccccctttttaaatacaaaagtgatttctcaatttgagccaggtaaaagtcagttttcgagttatgtagagaaaaaaatgattaaagcaatcaggcatactaaaactgatgtactcgttggaacaagagctagctttaatattctcatttctaaatatgctaaagctgaaatagtgaccatcgcaatggaacatatgaattttgatgctcaccctgatcagtatcaaaaggaaattattgctgcgtaccgtaatatcaataagattacaacgttaactgtcgcagaccagcaaaaatatcaatcacaacttaaaactcctgtatacgttatacctaatatggttaccgaaaaaagaattgctgctccaaagaaaaatcgtattattagcgccggacgtttagaatatgaaaaagggtatgatttattattagagagtattcgtttaatacaagaagacttgcgtcaattgaattatgacgttcacatctatggttctggtagtaagaaaacatcacttgttgactttattaatcaatatcatttaaatgatttgattaaaatatatgagccaacgcaagaattaaataataaacttgcacaaagtaaaatcgttgttgtaccttcacgcaatgaaggtttcggaatgattattttagaggcaatggtgcaagataatatagtaataagttttgaaggcaatgtagggccagattcaatcattaacaacggagataatggttatttagtaaactatgaaaatgtgtctgaacttgcaaaacgtatcgatttaacaacacaacattataatgagttagatcacatcattgaaaatagtaaagatacgttgaaacaatttagtccggatcatatatatcaattatttatgtctatgtttaaataa

SEQ ID NO: 1562 - protein, 374 aa, Artificial Sequence
  Description of Artificial Sequence: synthetic amino acid sequence
MHNIYAMGGTVKSVTQLANTLAEKGHPVTIISVFRGADSPYFELHSAIKVKVVVDYRLKLKNTRAITANRIKKYTPFLNTKVISQFEPGKSQFSSYVEKKMIKAIRHTKTDVLVGTRASFNILISKYAKAEIVTIAMEHMNFDAHPDQYQKEIIAAYRNINKITTLTVADQQKYQSQLKTPVYVIPNMVTEKRIAAPKKNRIISAGRLEYEKGYDLLLESIRLIQEDLRQLNYDVHIYGSGSKKTSLVDFINQYHLNDLIKIYEPTQELNNKLAQSKIVVVPSRNEGFGMIILEAMVQDNIVISFEGNVGPDSIINNGDNGYLVNYENVSELAKRIDLTTQHYNELDHIIENSKDTLKQFSPDHIYQLFMSMFK

SEQ ID NO: 1563 - DNA, 1148 bp, Artificial Sequence
  Description of Artificial Sequence: synthetic nucleic acid sequence
atgataaagcaaataaatatttcaaatatggacaaattaaaagagcaaatggaacgtgcacttagcgacggctatacgcatgtcatcccctattcaaatgaaattcaaattcatcagtccatgattaaagctatcactttacctaagacttcatttatagttgactatacaattaacaattattatttaaacgattgtaaatacttcgggttggactttgttgattttgaggactgggttaaaaatattaatttatatccaaatgttatttatgaaattaattcaacattagaacttattgataaatttgaagttgaaaatatctttgatttagcattattaacaattcttaaagggcatatcgcagttgaaggtcatgtcgtattagactttaaaggaccattaaaaacgagcaagggattttggcgctcatttgaccgtaatgatttaacttatagagataaattcttcttaaacaccatcgcttatgcacataaacaaagaatcccatttacgcgtgtaccatttaacgatcacgatagtattagatattatgattcagtactacttagtactaaatttaaagctccaagatggttagtgactcctattaagaattattcagttaaaaaacacaaagagattagctatatttataaaaaggattcatcaaaacttaagaaccacgtcgtttttctaggatttgatttcggctatcgaggaaactctaagtatttatttaattactttgttaaacacaatcctatgatagagtcttactttataacagatgagagaacaggaccacattttatttcaactaacgatgaaaatgtgaagaatttgattgaaacagctacttttgtcattacggaaagctatattcctgacgacattcaccctaatggtaaaatcatccaattatggcatgggacacctattaaaaaactatttttagatagtaaagagccacaccaaaatttaaatatatataactaccgagctcgaaaatataataaatggacacaacaagattatttaattgtagattcagaagaatcaaaaacatactttgaatcagcgtttcctagtcaaaaaattgatatattacctgtaggatatcctagaaataattatttattaaataa

SEQ ID NO: 1564 - protein, 383 aa, Artificial Sequence
  Description of Artificial Sequence: synthetic amino acid sequence
  MOD_RES (383): variable amino acid
MIKQINISNMDKLKEQMERALSDGYTHVIPYSNEIQIHQSMIKAITLPKTSFIVDYTINNYYLNDCKYFGLDFVDFEDWVKNINLYPNVIYEINSTLELIDKFEVENIFDLALLTILKGHIAVEGHVVLDFKGPLKTSKGFWRSFDRNDLTYRDKFFLNTIAYAHKQRIPFTRVPFNDHDSIRYYDSVLLSTKFKAPRWLVTPIKNYSVKKHKEISYIYKKDSSKLKNHVVFLGFDFGYRGNSKYLFNYFVKHNPMIESYFITDERTGPHFISTNDENVKNLIETATFVITESYIPDDIHPNGKIIQLWHGTPIKKLFLDSKEPHQNLNIYNYRARKYNKWTQQDYLIVDSEESKTYFESAFPSQKIDILPVGYPRNNYLLNX

SEQ ID NO: 1565 - DNA, 321 bp, Artificial Sequence; identical to SEQ ID NO: 177
  Description of Artificial Sequence: synthetic nucleic acid sequence

SEQ ID NO: 1566 - protein, 106 aa, Artificial Sequence; identical to SEQ ID NO: 178
  Description of Artificial Sequence: synthetic amino acid sequence

SEQ ID NO: 1567 - DNA, 789 bp, Artificial Sequence
  Description of Artificial Sequence: synthetic nucleic acid sequence
atgaaaagacttttactttgcattgttgcacttgtttttgttttagcagcctgtggcaacaattcatctaacaataaagataatcaatcaagcagtaaagacaaggatacgttaagagttggtacggaaggtacatatgcgccctttacttaccataataaaaaagatcaattaacaggttatgatattgatgtgattaaagcagttgcaaaagaagaaaatcttaaacttaagtttaatgaaacgtcatgggattcaatgtttgcaggattagatgctggtcgttttgatgttattgcaaatcaagtgggtgtgaataaagatagagagaaaaaatataaattctctgaaccttacacatattcaagtgctgtacttgttgttcgtgaaaatgaaaaagatattacatcattcaatgatgtaaaaggtaaaaagttagcacaaacgtttacgtctaattatggtcaattggctaaagataagggtgcggacgttactaaggtagatggatttaatcaatcaatggacttactattatctaaacgtgtagatggtacatttaacgacagtttatcttacttagattacagaaaacaaaagcctaatgctaaaattaaagcaatcaaaggacatgcagagcaaaataaatcagcatttgcattctctaagaaggttgatgaaaaaacgattgagaaatttaataaaggcctagaaaaaattagagataatggtgaattagctaaaattggtaagaaatggtttggtcaagatgtttctaaacctgaataa

SEQ ID NO: 1568 - protein, 262 aa, Artificial Sequence
  Description of Artificial Sequence: synthetic amino acid sequence
MKRLLLCIVALVFVLAACGNNSSNNKDNQSSSKDKDTLRVGTEGTYAPFTYHNKKDQLTGYDIDVIKAVAKEENLKLKFNETSWDSMFAGLDAGRFDVIANQVGVNKDREKKYKFSEPYTYSSAVLVVRENEKDITSFNDVKGKKLAQTFTSNYGQLAKDKGADVTKVDGFNQSMDLLLSKRVDGTFNDSLSYLDYRKQKPNAKIKAIKGHAEQNKSAFAFSKKVDEKTIEKFNKGLEKIRDNGELAKIGKKWFGQDVSKPE

SEQ ID NO: 1569 - DNA, 639 bp, Artificial Sequence
  Description of Artificial Sequence: synthetic nucleic acid sequence
gtgaaatactcaatccctattactttggtcactttcattctaggtttaatcattgcattgtttactgcacttatgcgtatatcaaccagtaaattgcttagaggtattgcgcgtgtctatgtatcaattattcgtggtacacctatgattgtacagttatttattattttttacggtataccggagcttggaagattggtaactaacaatgctgataatcaatggacacttgcacctgttattgctgcagtcattggtttatctttaaatgttggtgcttatgcttctgaaattatacgaggtggtatattgtctattcctaaaggacaaacagaagcggcttactctataggtatgaactatagacaaactgtgcaacgtattatcttaccacaagctattcgtgtatctataccagcactaggaaacacatttttaagtttaattaaagatacatcattacttggatttattcttgttgcagagatgtttagaaaggcacaagaagttgcttcgacaacgtatgagtatctaactatttatttgttagtagctttaatgtattgggtcgtatgttttgtcatctcaattatccaaggatggtatgaatcacgcattgaaagagggtatcgctcatga

SEQ ID NO: 1570 - protein, 212 aa, Artificial Sequence
  Description of Artificial Sequence: synthetic amino acid sequence
VKYSIPITLVTFILGLIIALFTALMRISTSKLLRGIARVYVSIIRGTPMIVQLFIIFYGIPELGRLVTNNADNQWTLAPVIAAVIGLSLNVGAYASEIIRGGILSIPKGQTEAAYSIGMNYRQTVQRIILPQAIRVSIPALGNTFLSLIKDTSLLGFILVAEMFRKAQEVASTTYEYLTIYLLVALMYWVVCFVISIIQGWYESRIERGYRS

SEQ ID NO: 1571 - DNA, 597 bp, Artificial Sequence
  Description of Artificial Sequence: synthetic nucleic acid sequence
atgattaatgctttagagatacctactgaaggtacagtgtatgtcaatggcatgacatataatgctaaagataagaaatctcaaattaaagtaagacaacaatcaggaatggtttttcaaaattataatttatttccacataaatctgcattagaaaacgttatggaaggtcttataacagttaaaaagatgaataaagcaacggctaatgaagaagcaatgaatttattgtctaaggttggattggtacatgttaaagatcaacggccacatgctttatcaggagggcaacaacaacgtgtcgcaattgcacgtgcattagccatgaatcctaaagtgatgttatttgatgagccaacatctgcgcttgatcctgaattggtcaatgatgtattaaaagtcataaaagaattggctgacgaaggtatgacaatggtcattgtgactcacgagatgcgttttgccaaagaagtttccaatcaaattgcttttattcatgagggtgttattgcagaacaaggtacgcctgaagatatatttaatcatcccaaaacagaagagcttcagcgatttttaaatgtgattaatgaaaaatag

SEQ ID NO: 1572 - protein, 198 aa, Artificial Sequence
  Description of Artificial Sequence: synthetic amino acid sequence
MINALEIPTEGTVYVNGMTYNAKDKKSQIKVRQQSGMVFQNYNLFPHKSALENVMEGLITVKKMNKATANEEAMNLLSKVGLVHVKDQRPHALSGGQQQRVAIARALAMNPKVMLFDEPTSALDPELVNDVLKVIKELADEGMTMVIVTHEMRFAKEVSNQIAFIHEGVIAEQGTPEDIFNHPKTEELQRFLNVINEK

SEQ ID NO: 1573 - DNA, 363 bp, Artificial Sequence
  Description of Artificial Sequence: synthetic nucleic acid sequence
atgatcagtaaaattgataaaaacaaagtacgtttgaaaagacatgctcgtgttcgtactaaattatcaggtacagctgaaaagccacgtttaaatgtgtatcgttcaaacaaacacatctatgcacaaattattgatgacgttaaaggcgtaacacttgctcaagcatcatcacaagataaagatattgcaaacacatcagcttcaaaagttgacttagcaactactgttggtcaagaaattgctaaaaaagctaacgataaaggtattaaagaaatcgtcttcgatcgcggaggatatttataccacggacgtgttaaagctttagctgatgctgcaagagaaaatggattagaattttaa

SEQ ID NO: 1574 - protein, 120 aa, Artificial Sequence
  Description of Artificial Sequence: synthetic amino acid sequence
MISKIDKNKVRLKRHARVRTKLSGTAEKPRLNVYRSNKHIYAQIIDDVKGVTLAQASSQDKDIANTSASKVDLATTVGQEIAKKANDKGIKEIVFDRGGYLYHGRVKALADAARENGLEF

SEQ ID NO: 1575 - DNA, 501 bp, Artificial Sequence
  Description of Artificial Sequence: synthetic nucleic acid sequence
atggctcgtagagaagaagaaactaaagaatttgaagaacgcgttgttacgattaaccgtgttgctaaagttgtaaaaggtggtcgtcgtttccgtttcactgcattagtggttgttggagataaaaatggtcgtgtaggtttcggtactggtaaagcgcaagaggtaccagaagctatcaaaaaagctgttgaagcagctaaaaaagatttagtagttgttccacgtgtagaaggtacgactcctcatactataactggtcaatatgggtcaggtagcgtatttatgaaaccagctgcacctggtacaggagttatcgctggtggaccagttcgtgccgtattagagttagcaggaattactgatatcttaagtaaatctttaggatcaaataatcctattaatatggttcgtgcgactatcaacggtttacaaaacttaaaaaatgcagaagatgttgctaaattacgtggcaaatctgtagaagaattatacaattaa

SEQ ID NO: 1576 - protein, 166 aa, Artificial Sequence
  Description of Artificial Sequence: synthetic amino acid sequence
MARREEETKEFEERVVTINRVAKVVKGGRRFRFTALVVVGDKNGRVGFGTGKAQEVPEAIKKAVEAAKKDLVVVPRVEGTTPHTITGQYGSGSVFMKPAAPGTGVIAGGPVRAVLELAGITDILSKSLGSNNPINMVRATINGLQNLKNAEDVAKLRGKSVEELYN

SEQ ID NO: 1577 - DNA, 1224 bp, Artificial Sequence
  Description of Artificial Sequence: synthetic nucleic acid sequence
atgttagttatttttaaaataggaacgtatattcctgctccaggagttaatcctgaagcctttaatcatccacagggatctcaaggtgccactgagttattaaatacttttggtggcggtgccttgaaacgtttctcaatatttgcgatgggaatcatgccttatatcactgcatccatcgtcatgcaattactgcaaatggatattgttcctaaatttacagagtgggcaaaacaaggtgaaatgggtagaagaaaaattaataacgtaactcgttattttgctataattttagcttttatccaatctataggtatggctttccaatttaataactatctcaaaggacaacttattatagaaaagtctgttatgagttatttattaattgcagttgtattaacagcgggaacagctttcttaatttggcttggtgaccaaatcacacagtttggtgttggtaacggtatttctcttatcatctttgcaggtatattatcaactttaccttcgagtctagaacaatttgcacaatcagtgtttgtaggtcaagacgatacttcacttgcttggctgaaaatactaggattgattgtagccttgattttactaacagtaggcgcaatatttgttcttgaagctaaacgtaaaatacctattcaatatgcaaagaaacaatctgctcaacgattaggttcacaagcaacttatctacctttgaaagttaactctgccggtgttattccagttatctttgcgatggcgtttttcttgttaccaagaacattgactttattcttcccgaaagcagaatgggcacagaatattgctgatactgccaacccatcaagtaatattggaatgattatttatgtagttttaattattgcatttgcatatttttatgcttttgtacaagttaatcctgaaaaaatggcagataaccttaaaaagcaaggtagttatgtcccaggaattagacctggtgaacaaacaaaaaaatatattactaaagtactttatagattgacttttgttggttcaattttcttagcagctatagctattttacctataattgcgactaaatttatgggcttaccacaatcaattcaaattggtggtacgagtcttttgatcgttattggtgtagctattgaaactatgaaaactttagaagcacaagtcactcaaaaagaatataaaggctttggtggtagataa

SEQ ID NO: 1578 - protein, 407 aa, Artificial Sequence
  Description of Artificial Sequence: synthetic amino acid sequence
MLVIFKIGTYIPAPGVNPEAFNHPQGSQGATELLNTFGGGALKRFSIFAMGIMPYITASIVMQLLQMDIVPKFTEWAKQGEMGRRKINNVTRYFAIILAFIQSIGMAFQFNNYLKGQLIIEKSVMSYLLIAVVLTAGTAFLIWLGDQITQFGVGNGISLIIFAGILSTLPSSLEQFAQSVFVGQDDTSLAWLKILGLIVALILLTVGAIFVLEAKRKIPIQYAKKQSAQRLGSQATYLPLKVNSAGVIPVIFAMAFFLLPRTLTLFFPKAEWAQNIADTANPSSNIGMIIYVVLIIAFAYFYAFVQVNPEKMADNLKKQGSYVPGIRPGEQTKKYITKVLYRLTFVGSIFLAAIAILPIIATKFMGLPQSIQIGGTSLLIVIGVAIETMKTLEAQVTQKEYKGFGGR

SEQ ID NO: 1579 - DNA, 648 bp, Artificial Sequence
  Description of Artificial Sequence: synthetic nucleic acid sequence
atgaatatcattttaatgggcttacctggtgcaggtaaagggactcaggcgagtgaaattgttaagaaattcccaataccacatatttctactggtgacatgttcagaaaagcgattaaagatgaaacagatttaggaaaagaagctaaatcatatatggatcgtggagaattagttcctgatgaagttactgtaggtatcgttaaagaaagaatttctgaagacgatgcaaaaaaaggattcttgttagatggattcccaagaactatagatcaagctgagtcattaagtcaaattatgtctgagcttgatagagaaattgatgctgtcattaatatcgaagttcctgaggaagaattaatgaatcgtcttacaggtcgtcgtatctgtgagaaatgtggtacaacatatcatcttgtatttaatcctccaaaggttgatggtatatgtgatatcgatggtggaaagttatatcaacgtgaagatgacaatccagaaacagtatctaatcgtttgagcgttaatgttaaacaatctaagcctattttagaatattacaacaacaaaggtgtcttgaaaaacattgatggttcaaaagatattgacgaagtaaccaacgatgtcattgatatcttagatcatttataa

SEQ ID NO: 1580 - protein, 215 aa, Artificial Sequence
  Description of Artificial Sequence: synthetic amino acid sequence
MNIILMGLPGAGKGTQASEIVKKFPIPHISTGDMFRKAIKDETDLGKEAKSYMDRGELVPDEVTVGIVKERISEDDAKKGFLLDGFPRTIDQAESLSQIMSELDREIDAVINIEVPEEELMNRLTGRRICEKCGTTYHLVFNPPKVDGICDIDGGKLYQREDDNPETVSNRLSVNVKQSKPILEYYNNKGVLKNIDGSKDIDEVTNDVIDILDHL

SEQ ID NO: 1581 - DNA, 300 bp, Artificial Sequence
  Description of Artificial Sequence: synthetic nucleic acid sequence
gtggtggtactgctgcgtaacttgtgcccagaaaatcaacgcctaaatattgtcttttatctgcccacatttgacgaacttccattgttagagggacttgatttgtactttctaaagcaacaatatcgacattcatatcactatctaatacaacttttacagcctcaggatcccaaaatgcattccattcagctgtaccatcatgttctggttcttcaacatttcctttgtctaaaaacgttccacccatccaaactaatttctctatattttttaaaattgagttgtcatattttatag

SEQ ID NO: 1582 - protein, 99 aa, Artificial Sequence
  Description of Artificial Sequence: synthetic amino acid sequence
VVVLLRNLCPENQRLNIVFYLPTFDELPLLEGLDLYFLKQQYRHSYHYLIQLLQPQDPKMHSIQLYHHVLVLQHFLCLKTFHPSKLISLYFLKLSCHIL

SEQ ID NO: 1583 - DNA, 345 bp, Artificial Sequence; identical to SEQ ID NO: 255
  Description of Artificial Sequence: synthetic nucleic acid sequence

SEQ ID NO: 1584 - protein, 114 aa, Artificial Sequence; identical to SEQ ID NO: 256
  Description of Artificial Sequence: synthetic amino acid sequence

SEQ ID NO: 1585 - DNA, 324 bp, Artificial Sequence
  Description of Artificial Sequence: synthetic nucleic acid sequence
gtgaaaaaagtggaaaatacaaatagtaatatgcataaaaatgacaatagttacgttttatcagcattgagttatttaagtatctttttcgcacctgtcattttacctttatttgtatggatacttgctgatgaaccaacatcagaacatggcaaaaaagcattcattaatcatattatgacttgggttagtttttttataggtagattggcatttattttttctaaagaagtctttgataaacctttggatcatcaattattaatattcatccgctcacttttcaacgtaagtcggttcggtcctccattcagtgttacctga

SEQ ID NO: 1586 - protein, 107 aa, Artificial Sequence
  Description of Artificial Sequence: synthetic amino acid sequence
VKKVENTNSNMHKNDNSYVLSALSYLSIFFAPVILPLFVWILADEPTSEHGKKAFINHIMTWVSFFIGRLAFIFSKEVFDKPLDHQLLIFIRSLFNVSRFGPPFSVT

SEQ ID NO: 1587 - DNA, 543 bp, Artificial Sequence
  Description of Artificial Sequence: synthetic nucleic acid sequence
atggttggtatgagagcgactgagagccatgatttaattcttgatgatgtttatgttcctaatgaaaattttgtagaatcaaaacgtgaatcaagacctaatggttggcttcttcatataccgagctgttatctaggtattgcacaagcagctcgtgactatgcagtagattttgcaaaaaattatcgtcctaatagtattacaggtacgattgatagtttacctacagtgcaacaaaatttagggaaaatggaaagtttattactttctgcaagacattttctatggagtacagctagagggtatcaatcatatacagaggatgcacaaatatggaatgaaacctcagcaagtaaagtggtggtaatgaaccaaggtatagaaatcgttgatttagctatgagaatagttggagctaagagtctagaaatgagcagacctcttcaacggtactatagagatatacgtgctggattacataatccaccaatggaagatatggcttacactaatattgctaaaagtattacaaacaaactttaa

SEQ ID NO: 1588 - protein, 180 aa, Artificial Sequence
  Description of Artificial Sequence: synthetic amino acid sequence
MVGMRATESHDLILDDVYVPNENFVESKRESRPNGWLLHIPSCYLGIAQAARDYAVDFAKNYRPNSITGTIDSLPTVQQNLGKMESLLLSARHFLWSTARGYQSYTEDAQIWNETSASKVVVMNQGIEIVDLAMRIVGAKSLEMSRPLQRYYRDIRAGLHNPPMEDMAYTNIAKSITNKL

SEQ ID NO: 1589 - DNA, 516 bp, Artificial Sequence
  Description of Artificial Sequence: synthetic nucleic acid sequence
atgactgctatcatttgtattttaggtatagtaccaagtgtacctctgccatttatgccagtccctattgtattacagaatataggaatctttttggcaggaattattttagggcgaaagcttggtactactagtgttattgtctttttactattggtagctacaggtttgccagtgctttctggaggccgtgggggaattggcgtatttgcaggaccttcggcaggattcttattcttatatcctgttgtagcttactttataggcattattcgtgatgcatatttgcataaaattaatttcttagtgatttttatagctacactagttatcggtgtattaggattagatatattaggtactatcattatgggctttattatacatatacctatctctaaggcatttatattatcatttacatttatgccaggtgatatcattaaggctattattgcaagtttaataggtgcagcaattttaaatcattcacgtttcaagactcttattcaataa

SEQ ID NO: 1590 - protein, 171 aa, Artificial Sequence
  Description of Artificial Sequence: synthetic amino acid sequence
MTAIICILGIVPSVPLPFMPVPIVLQNIGIFLAGIILGRKLGTTSVIVFLLLVATGLPVLSGGRGGIGVFAGPSAGFLFLYPVVAYFIGIIRDAYLHKINFLVIFIATLVIGVLGLDILGTIIMGFIIHIPISKAFILSFTFMPGDIIKAIIASLIGAAILNHSRFKTLIQ

SEQ ID NO: 1591 - DNA, 579 bp, Artificial Sequence
  Description of Artificial Sequence: synthetic nucleic acid sequence
atgcatctaaatcaatcatcctatcatctttcattttcatttccagctaatgaaaagatagatgaagtattgttggaaaaaatacgtgaactaggttttcagataggagtacttgagctctatgtcattgaagctaaagcgttaaaagagctctcccgcaaaagagacgtagatattcaacttgtatcaagcaataatatcaatgattaccttcatgtttatgatgcgtttgcacggccttttggtgatagctatgccaacatggttaaacaacatatttatagctcatataacttggacgatattgaacgtttagttgcatatgttaaccatcaaccagttggaatagtcgatattataatgacggataaaacaatagaaatagatggttttggggttttagaagaattccaacatcaaggtatcggttctgaaatacaagcttacgttggacgtatggctaatgagcgacctgttattcttgttgcagatggaaaagatactgctaaagatatgtatctaagacaaggatatgtatatcaaggttttaagtatcatattttaaaagaaaatatttaa

SEQ ID NO: 1592 - protein, 192 aa, Artificial Sequence
  Description of Artificial Sequence: synthetic amino acid sequence
MHLNQSSYHLSFSFPANEKIDEVLLEKIRELGFQIGVLELYVIEAKALKELSRKRDVDIQLVSSNNINDYLHVYDAFARPFGDSYANMVKQHIYSSYNLDDIERLVAYVNHQPVGIVDIIMTDKTIEIDGFGVLEEFQHQGIGSEIQAYVGRMANERPVILVADGKDTAKDMYLRQGYVYQGFKYHILKENI

SEQ ID NO: 1593 - DNA, 678 bp, Artificial Sequence
  Description of Artificial Sequence: synthetic nucleic acid sequence
atggacattattaaagaaatgaaaaaagcaaatgttagttttacaacatactttgatgataactacccttctctttgcaaagaaatgtatgattatccttatgtgatattctacaaaggaaatccacagttctttaatcattctcactctttagctgtaattggctcacgtaatgccacacaatatacaagtcaatctttaaactatctttttccttcatttagacaattaaatatggcgattgtttctggattagcgcgcggtgcagatagtgtagcacatcaaaccgcacttaaatacctattaccaactattggcgtacttggatttggccattgttatcattatcctaaagcaaccttaaatttaagaactaaagttgaaaggaatggcttagtgataagtgaatatccaccattttctcctataagtaagcataaatttcctgaaagaaacaggcttataagtggtctgtccagaggggtacttataactgaggctgaagaaagaagtggtagtcaaatcactatcgattgtgctttagagcaaaatagaaatgtttatgttctacctggttcaatgttcaacaaaatgactaaaggtaatttaagaaggataaatgaaggtgctcaagttgttatagatgaaagtagtatattatatgattatctattttag

SEQ ID NO: 1594 - protein, 225 aa, Artificial Sequence
  Description of Artificial Sequence: synthetic amino acid sequence
MDIIKEMKKANVSFTTYFDDNYPSLCKEMYDYPYVIFYKGNPQFFNHSHSLAVIGSRNATQYTSQSLNYLFPSFRQLNMAIVSGLARGADSVAHQTALKYLLPTIGVLGFGHCYHYPKATLNLRTKVERNGLVISEYPPFSPISKHKFPERNRLISGLSRGVLITEAEERSGSQITIDCALEQNRNVYVLPGSMFNKMTKGNLRRINEGAQVVIDESSILYDYLF

SEQ ID NO: 1595 - DNA, 1980 bp, Artificial Sequence
  Description of Artificial Sequence: synthetic nucleic acid sequence
atgggacatgttcgtgacttaccaagaagtcaaatgggtgtcgacactgaagataactatgaaccaaaatatattacaattcgtggcaaaggtcctgtagttaaagatttaaaaaaacatgcgaaaaaagcaaaaaaaatatttttagctagtgaccctgaccgtgaaggtgaagcgattgcttggcatttatcaaaaattttagaattagaagatagcaaagaaaatagagtagtatttaatgaaattacaaaagatgctgttaaagatagttttaagcatcctcgtggtattgaaatggatttagttgacgcgcaacaagcacgtcgtattttagatagactcgttggttataatatttctccagtattatggaagaaagttaaaaaagggctttctgctgggagagttcagtcagttgctttacgtttagtcattgatcgtgaaaatgaaattcgtaattttaaacctgaagagtattggtccattgaaggtgaatttagatacaagaaatctaaatttacagctaaatttctacactataaaaataaaccttataagctaaacaacaaagacgatgttcaaaggattactgaagcattaaatggtgatcaatttgaaatcacaaatgtgaatcgtaaagaaaaaacacgttatcctgctcatccatttactacatcaaccttacaacaagaagctgcacgtaaactaaattttaaagcacgcaagacaatgatgttagcacaacaattatacgaaggtattgacttaaagcgtcaaggtacagtaggtttaattacgtatatgcgtaccgattctactcgtatctcaacttctgcaaaatcagaagcgcagcaatatataaatgataaatatggtgaacagtacgtgtctcagcgtaaatcatcgggtaaacagggcgatcaagatgctcacgaagctattagacctactagtacaatgcgaactcctgatgacatgaaagcttttcttactagagatcaacaccgtctatacaaattaatttgggaaagatttgtagcaagtcagatggctccagctattttggatacagtagctttagatgtaactcaaaacgacattaaatttagagctaatggtcaaactattaaatttaaaggttttatgacactatatgtagaagcaaaagatgataaagagaatgataaagaaaataagcttcctcaactagataaaggagataaggtaactgcgacaaagattgaaccggcacaacactttacacaacctcctcctcgttatactgaggcgcgtttagttaaaacgcttgaggaacttaaaattggaagaccttcaacatatgctccaaccattgatacgattcaaaagcggaactacgtcaagttagaaagtaaacgcttcatcccaactgaattaggagaaattgtttatgagcaagttaaagaatacttcccagaaattattgatgtagaattcactgtaaacatggaaacattacttgataaaattgccgaaggtgacatgaattggcgtaaagtaataggagacttctacaacagttttaaacaagatgttgaacgcgcagaatctgaaatggaaaagattgagattaaagacgagccagctggtgaagattgtgaagtctgtggttctccaatggttattaaaatgggaagatatggtaagtttatggcatgttcgaactttccggactgtcgtaacaccaaagcaattgtcaaaacgattggtgtcacatgtccgaagtgtaatgaaggagatgtcgtagaacgtaaatcaaagaaaaatagaattttctatggttgttctagatatccagaatgtgattttatttcttgggataaacctgttggaagagattgtcctaagtgtcatcattaccttgtgaacaagaaaaaaggtaaaagtagtcaagttgtgtgctccaactgtgattatgaagaagaagttcaaaaatag

SEQ ID NO: 1596 - protein, 659 aa, Artificial Sequence
  Description of Artificial Sequence: synthetic amino acid sequence
MGHVRDLPRSQMGVDTEDNYEPKYITIRGKGPVVKDLKKHAKKAKKIFLASDPDREGEAIAWHLSKILELEDSKENRVVFNEITKDAVKDSFKHPRGIEMDLVDAQQARRILDRLVGYNISPVLWKKVKKGLSAGRVQSVALRLVIDRENEIRNFKPEEYWSIEGEFRYKKSKFTAKFLHYKNKPYKLNNKDDVQRITEALNGDQFEITNVNRKEKTRYPAHPFTTSTLQQEAARKLNFKARKTMMLAQQLYEGIDLKRQGTVGLITYMRTDSTRISTSAKSEAQQYINDKYGEQYVSQRKSSGKQGDQDAHEAIRPTSTMRTPDDMKAFLTRDQHRLYKLIWERFVASQMAPAILDTVALDVTQNDIKFRANGQTIKFKGFMTLYVEAKDDKENDKENKLPQLDKGDKVTATKIEPAQHFTQPPPRYTEARLVKTLEELKIGRPSTYAPTIDTIQKRNYVKLESKRFIPTELGEIVYEQVKEYFPEIIDVEFTVNMETLLDKIAEGDMNWRKVIGDFYNSFKQDVERAESEMEKIEIKDEPAGEDCEVCGSPMVIKMGRYGKFMACSNFPDCRNTKAIVKTIGVTCPKCNEGDVVERKSKKNRIFYGCSRYPECDFISWDKPVGRDCPKCHHYLVNKKKGKSSQVVCSNCDYEEEVQK

SEQ ID NO: 1597 - DNA, 1332 bp, Artificial Sequence
  Description of Artificial Sequence: synthetic nucleic acid sequence
atgagtgattttaggaggggcaaaatgacgcaaaaagtaaacgttgtaggagctggtttagctggctctgaagctgcatatcaattagctcaacgtggaattaaagtgaatttaattgagatgcgtccagttaaacagacaccggcgcaccatacagataaatttgctgaattggtatgttcaaattcattgagaggtaatgcacttacaaatgctgttggtgttcttaaagaggaaatgagacatttagactcgttaattatcacatcagcagataaagcacgtgtgccagcgggtggtgctttagcagtggatagacatgattttgctggctatattacagataccttaagaaaccaccctaacatcactgtattaaatgaagaagttaatcatataccagaaggttatacgattattgcaactggccctctaactactgagcatttagctcaagaaattgttgatattactggtaaagatcaattgtatttttacgatgctgccgcaccaataatagaaaaagattcaattaatatggataaagtatatttgaaatcacgttatgataaaggtgaagcagcgtatcttaattgtcctatgactgaagaagagtttaaccggttttatgatgcagtattagaagctgaagttgcaccagtcaatgagtttgaaaaagaaaaatattttgaagggtgtatgccttttgaagtcatggctgaaagagggcgaaaaactttgttatttggtccgatgaaacctgttggacttgaagatcctaagactgggaaacgcccttatgcagttgttcaattaagacaagatgatgcagctggaacattatataatattgttggctttcaaacacatttaaaatggggtgcgcaaaaagaagtcattcgtttaattccaggattagaaaatgttgatattgtaagatatggtgtgatgcaccgaaatacctttattaattcacctgatgttttaaacgaaaaatatgaattaaaaggacatgataatttatattttgctggacaaatgactggcgttgaaggttatgttgaaagtgctgccagtggattagttgcaggtattaatcttgcgcataaaattttagacaaaggggaagttattttccctagagagacaatgataggtagtatggcttactacatatcacatgccaaaaatgagaagaattttcaacctatgaatgccaattttggtcttttaccatctctcgaaaaacgtattaaagataaaaaagaaagatatgaaacacaagccaaaagagcgttagagtatttagataattacaaacaaacgctgtaa

SEQ ID NO: 1598 - protein, 443 aa, Artificial Sequence
  Description of Artificial Sequence: synthetic amino acid sequence
MSDFRRGKMTQKVNVVGAGLAGSEAAYQLAQRGIKVNLIEMRPVKQTPAHHTDKFAELVCSNSLRGNALTNAVGVLKEEMRHLDSLIITSADKARVPAGGALAVDRHDFAGYITDTLRNHPNITVLNEEVNHIPEGYTIIATGPLTTEHLAQEIVDITGKDQLYFYDAAAPIIEKDSINMDKVYLKSRYDKGEAAYLNCPMTEEEFNRFYDAVLEAEVAPVNEFEKEKYFEGCMPFEVMAERGRKTLLFGPMKPVGLEDPKTGKRPYAVVQLRQDDAAGTLYNIVGFQTHLKWGAQKEVIRLIPGLENVDIVRYGVMHRNTFINSPDVLNEKYELKGHDNLYFAGQMTGVEGYVESAASGLVAGINLAHKILDKGEVIFPRETMIGSMAYYISHAKNEKNFQPMNANFGLLPSLEKRIKDKKERYETQAKRALEYLDNYKQTL

SEQ ID NO: 1599 - DNA, 957 bp, Artificial Sequence
  Description of Artificial Sequence: synthetic nucleic acid sequence
atgttaaaggttgaaagaaacttttcagagtatacgttaaaatcttatcatgatgatttagttcaatttaacaactttttagaaagagaacatttacaacttgagacttttgaatataaagatgctagaaactatttggcttttttatattctaatcaattaaaaagaactacggtgtcaagaaagatatcaactttacgtaccttctatgaattttggatgactcaagataattcaattattaatccctttgttcaactagtgcatcctaaaaaagagaagtatttacctcaattcttttatgaagaagaaatggaagcactttttcaaactgtagagcatgataataaaaaaggcatacgagacaaagttattattgaattgttatatgcaacaggaatacgtgtgtctgaattaataaatattaaactaaaagatatagatatgaacttaccaggtgtaaaagttttaggtaaaggaaataaggaaaggtttatcccttttggagagttctgtagacagagtatagaaagatacttagaagaattccaacctaaacaattagccaatcatgattatttaattgtaaatatgaaaggtgatcctatcaccgaaagaggagtaagatatgtacttaatgatgtcgttaaaagaaccgctggcgtcaatgacatacatcctctatttatgattatagcgacgataggtgaaatggtatattctccaattcttgaagaaaatcgttttaaaatggttccttctcataaaagagggacatattcagcagtgcatgctttaggatttaacctagctgaattacttgcaagatttggaattatattaggagtgtttttaacttcaatggagatggggatctatatgtttgttttattattactaggtggcatgtcactttacattgcagtgagtcgttttaataatacaaattcacaataa

SEQ ID NO: 1600 - protein, 318 aa, Artificial Sequence
  Description of Artificial Sequence: synthetic amino acid sequence
MLKVERNFSEYTLKSYHDDLVQFNNFLEREHLQLETFEYKDARNYLAFLYSNQLKRTTVSRKISTLRTFYEFWMTQDNSIINPFVQLVHPKKEKYLPQFFYEEEMEALFQTVEHDNKKGIRDKVIIELLYATGIRVSELINIKLKDIDMNLPGVKVLGKGNKERFIPFGEFCRQSIERYLEEFQPKQLANHDYLIVNMKGDPITERGVRYVLNDVVKRTAGVNDIHPLFMIIATIGEMVYSPILEENRFKMVPSHKRGTYSAVHALGFNLAELLARFGIILGVFLTSMEMGIYMFVLLLLGGMSLYIAVSRFNNTNSQ

SEQ ID NO: 1601 - DNA, 694 bp, Artificial Sequence
  Description of Artificial Sequence: synthetic nucleic acid sequence
gtgacatactgggtaaagttaagtcgcgacattgagttacgtagattaatgtatgcattattagatgtcgttcaaagtcaacctgtgttgcgtacacagtttgtgacagatgattttaatcaactcaagataaatttaagagatttttttccatttattgaaattaaagaagttaatgaaatgtcgcaaagcatagatttagaagcattctttacacgtaatttaaattcctaccatttcaatcaattacctctgtttaattttaagatatatcaatttctagatggcgcctacctacttttagatttccacgctactatttttaatgaaagtcaattaactccatttttacaacaattaaatattgcttatacccactctttaaaaagtgaatatagtatctcggatttttataattggattaaagaaatgaatcaaaagatggatcaaaatcaagttgtgtgtccatcaaagcacttcaacgtattgaatgcagacggtgataattacgcttacatacctgtaaagaatacatctgaaaagaaaaaaatgtgttctttgcatgcagaactaccatctttagacattgatgcgtggattgtaagtatttacttagcgcatcattttataagtcagtcttctgatgtgacgttaggcatccatttttcgatagataataaaaatactgagaata

SEQ ID NO: 1602 - protein, 232 aa, Artificial Sequence
  Description of Artificial Sequence: synthetic amino acid sequence
  MOD_RES (232): variable amino acid
VTYWVKLSRDIELRRLMYALLDVVQSQPVLRTQFVTDDFNQLKINLRDFFPFIEIKEVNEMSQSIDLEAFFTRNLNSYHFNQLPLFNFKIYQFLDGAYLLLDFHATIFNESQLTPFLQQLNIAYTHSLKSEYSISDFYNWIKEMNQKMDQNQVVCPSKHFNVLNADGDNYAYIPVKNTSEKKKMCSLHAELPSLDIDAWIVSIYLAHHFISQSSDVTLGIHFSIDNKNTENX

SEQ ID NO: 1603 - DNA, 381 bp, Artificial Sequence
  Description of Artificial Sequence: synthetic nucleic acid sequence
gtgatttcatctactggttgttttgttattttttctgttggttcaccttcgccaactttttcccctgttaatgggttcttagttgttggtgttgtaattgtttttgttcctggttcacctttctgtttaacacgctcttcacctggttttaaatcaggattgaattcacgtttcttgtcgaatggaatttcttccgttgacgtaatcggatctccatcaactggaccatattttgtcacatcatccactggtggtgtgactacttcgcctgtatcaggatttttaactcctggtttacctggaacgtcctcttggctacctttcggtgcatttggatcaaattcatccttatggcctggcttgatttcttcgccaccataa

SEQ ID NO: 1604 - protein, 126 aa, Artificial Sequence
  Description of Artificial Sequence: synthetic amino acid sequence
VISSTGCFVIFSVGSPSPTFSPVNGFLVVGVVIVFVPGSPFCLTRSSPGFKSGLNSRFLSNGISSVDVIGSPSTGPYFVTSSTGGVTTSPVSGFLTPGLPGTSSWLPFGAFGSNSSLWPGLISSPP

SEQ ID NO: 1605 - DNA, 699 bp, Artificial Sequence
  Description of Artificial Sequence: synthetic nucleic acid sequence
gtgatttcatctactggttgttttgttactttttctgttggttcaccttcgccaactttttcccctgttaatgggttcttagttgttggtgttgtaattgtttttgttcctggttcacctttctgtttaacgcgctctttacctggttttaaatcaggattgaattcacgtttcttgtcgaatggaatttcttccgttgacgtgatcggatctccatcaactggaccatattttgtcacatcatccactggtggtgtgactacttcgcctgtatcagggtttttaactcctggtttacctggaacgtcctcttggctacctttcggtgcatttggatcaaattcatccttatggcctggcttgatttcttcgccaccatattctgtgatttcatctactggttgttttgttattttttctgttggttcaccttcgccaactttttcccctgttaatgggttcttagttgttggtgttgtaattgtttttgttcctggttcacctttttgtttaacacgctcttcacctggttttaaatcaggattgaattcacgtttcttgtcgaatggaatttcttccgttgacgtgatcggatctccatcaactggaccatattttgtcacatcatccacaggtggagtaactacttcgcctgtatcaggatttttaacccccggcttacctggttgcgttgtttga

SEQ ID NO: 1606 - protein, 232 aa, Artificial Sequence
  Description of Artificial Sequence: synthetic amino acid sequence
VISSTGCFVTFSVGSPSPTFSPVNGFLVVGVVIVFVPGSPFCLTRSLPGFKSGLNSRFLSNGISSVDVIGSPSTGPYFVTSSTGGVTTSPVSGFLTPGLPGTSSWLPFGAFGSNSSLWPGLISSPPYSVISSTGCFVIFSVGSPSPTFSPVNGFLVVGVVIVFVPGSPFCLTRSSPGFKSGLNSRFLSNGISSVDVIGSPSTGPYFVTSSTGGVTTSPVSGFLTPGLPGCVV

SEQ ID NO: 1607 - DNA, 930 bp, Artificial Sequence
  Description of Artificial Sequence: synthetic nucleic acid sequence
atggatagagtgatgaaacctctgttaaaaatgaatgctaatatatctggaattgataataattacacaccacttataattaagccttcaactattaaaggtataaattatcaaatggaagttgcaagtgcacaagttaaaagtgctattttacttgctagcctattttcaaaagaagccacgacacttacagaatttgatgtaagtagaaatcatacagaaacattgtttgcacactttaacattcctatatcaattcaaggtaaaacaatccaaaccataccttatgcaattgaacatatacagcctagagattttcatgttccaggagatatctcatctgctgcatttttcatagtcgcagccctaattacgcccggtagtgacattacaattcataatgttggcattaatcccactcgttcaggtatcatagatatcgttaaacaaatgggaggaaacattgaattaagtaatgtaagcaagggtgcagaaccaactgcatcaatacatgtaaaatatacaccgaacttgaatgctgttacaattaaaggcgacttagttccaagggctatcgatgaattaccagttattgcactactttgcacacaagcttcaaattcttgtattatcaaaaacgcggaagaattaaaagtgaaggaaacaaatcgtatagatactactgcagacatgctaaatttacttggttttaatttacaacccacacatgatggacttattatacatccatcagagtttagatcaaatgcaactgtagatagtcaaacagatcatcgtataggaatgatgttagctgtagcttcactacttagttcagaaccactcaaaatagagcaatttgacgctgttaatgtttccttcccaggttttttacctaaactaaagcttttagaaaatgagggaaaataa

SEQ ID NO: 1608 - protein, 309 aa, Artificial Sequence
  Description of Artificial Sequence: synthetic amino acid sequence
MDRVMKPLLKMNANISGIDNNYTPLIIKPSTIKGINYQMEVASAQVKSAILLASLFSKEATTLTEFDVSRNHTETLFAHFNIPISIQGKTIQTIPYAIEHIQPRDFHVPGDISSAAFFIVAALITPGSDITIHNVGINPTRSGIIDIVKQMGGNIELSNVSKGAEPTASIHVKYTPNLNAVTIKGDLVPRAIDELPVIALLCTQASNSCIIKNAEELKVKETNRIDTTADMLNLLGFNLQPTHDGLIIHPSEFRSNATVDSQTDHRIGMMLAVASLLSSEPLKIEQFDAVNVSFPGFLPKLKLLENEGK

SEQ ID NO: 1609 - DNA, 1110 bp, Artificial Sequence; identical to SEQ ID NO: 1389
  Description of Artificial Sequence: synthetic nucleic acid sequence

SEQ ID NO: 1610 - protein, 369 aa, Artificial Sequence; identical to SEQ ID NO: 1390
  Description of Artificial Sequence: synthetic amino acid sequence

SEQ ID NO: 1611 - DNA, 804 bp, Artificial Sequence
  Description of Artificial Sequence: synthetic nucleic acid sequence
atgaaattagacgcactattgaaagacatgcagagtgtagtaattgccttctcaggtggagtagatagtagcttgttactgaaaaaagcgattgatattttaggtgttaactatgttaaacctgttgtagtaaaatcagaattatttagaaatgaagagtttgaactagcgcttaaacttggacaaagtctaggtgttgaagtattagaaactgaaatgtctgaacttcaagatgcgaatatcgttaaaaatacgcctgaaagttggtactatagcaagcgcttgatgtatagtcaacttgagaatattaagaataaactaggatttaattatgtgctagatggtatgattatggatgacttagatgattttcgtcccggattaaaagcaagagacgactttggtgttcgtagcgttttacaagaagcaaaactatataaatctgaagttagagaattaagtcatcaacatgacttgcctgtatggaataaaccagccttatgtagtctagcatcaagaataccttatggtgaggaattaagttttacaaaagttaacaaggtcaacgaagcagaaaaattcattttaagcctaggtattaaccacgtacgagtacgctatcatcacaacatagcacgcattgaagtaacagaagatcaattaaataatcttcttaaattgaaagacagtatcatattacatttgaaagaattaggatttgactatgtaacaatggatttagaaggctatcgtacaggtagtatgaatgaaatcattgataccaaatctacaagttttaaataa

SEQ ID NO: 1612 - protein, 267 aa, Artificial Sequence
  Description of Artificial Sequence: synthetic amino acid sequence
MKLDALLKDMQSVVIAFSGGVDSSLLLKKAIDILGVNYVKPVVVKSELFRNEEFELALKLGQSLGVEVLETEMSELQDANIVKNTPESWYYSKRLMYSQLENIKNKLGFNYVLDGMIMDDLDDFRPGLKARDDFGVRSVLQEAKLYKSEVRELSHQHDLPVWNKPALCSLASRIPYGEELSFTKVNKVNEAEKFILSLGINHVRVRYHHNIARIEVTEDQLNNLLKLKDSIILHLKELGFDYVTMDLEGYRTGSMNEIIDTKSTSFK

SEQ ID NO: 1613 - DNA, 777 bp, Artificial Sequence; identical to SEQ ID NO: 169
  Description of Artificial Sequence: synthetic nucleic acid sequence

SEQ ID NO: 1614 - protein, 258 aa, Artificial Sequence; identical to SEQ ID NO: 170
  Description of Artificial Sequence: synthetic amino acid sequence

SEQ ID NO: 1615 - DNA, 315 bp, Artificial Sequence
  Description of Artificial Sequence: synthetic nucleic acid sequence
atgctactttctgctttagttgatttaggagcaaaccctgaagacattgaatcagaactaaaaaaattacctttagatcaatttaagctacattttcaaaaaagagtaaaacaaggtattcatgcaatgacattaaacattgatgttaaagaagcaaatcatcatcgtcacgttaatgatatatttaaaatgatagatgacagtacacttccggaaagggttaaatatcgcagtaagaaaatttttgaaatcattggtcaagcagaagctaaaattcatggcatgtcttcaagcatgttgttaactttactttga

SEQ ID NO: 1616 - protein, 104 aa, Artificial Sequence
  Description of Artificial Sequence: synthetic amino acid sequence
MLLSALVDLGANPEDIESELKKLPLDQFKLHFQKRVKQGIHAMTLNIDVKEANHHRHVNDIFKMIDDSTLPERVKYRSKKIFEIIGQAEAKIHGMSSSMLLTLL

SEQ ID NO: 1617 - DNA, 1407 bp, Artificial Sequence; identical to SEQ ID NO: 867
  Description of Artificial Sequence: synthetic nucleic acid sequence

SEQ ID NO: 1618 - protein, 468 aa, Artificial Sequence; identical to SEQ ID NO: 868
  Description of Artificial Sequence: synthetic amino acid sequence

SEQ ID NO: 1619 - DNA, 387 bp, Artificial Sequence
  Description of Artificial Sequence: synthetic nucleic acid sequence
atgaagttaacccgaatacattatgagattataaagtttatcatagttggtggaattaatacctttaactactatataacatacttatttttgttaaaggtgttacatgtgaattatatggttagtcacattgttggatttattgtaagttttattatttcatattatttaaattgttattttgtatataaagtaaaacctacaatagaaaagtttttaagatttcctatcactcagatagttaatatggtaatgcaaacgttattattatatatattcgtaaagtggttgaatatcgcttcagaaattgcaccttttgcgggtctaatcattacaatcccagtgacattcatactttctaagtggttacttagagataaagtttaa

SEQ ID NO: 1620 - protein, 128 aa, Artificial Sequence
  Description of Artificial Sequence: synthetic amino acid sequence
MKLTRIHYEIIKFIIVGGINTFNYYITYLFLLKVLHVNYMVSHIVGFIVSFIISYYLNCYFVYKVKPTIEKFLRFPITQIVNMVMQTLLLYIFVKWLNIASEIAPFAGLIITIPVTFILSKWLLRDKV

SEQ ID NO: 1621 - DNA, 639 bp, Artificial Sequence
  Description of Artificial Sequence: synthetic nucleic acid sequence
atgaaaagaacagataaatatagagattcatacaaatatgatgaccaatatcaaaatcatcgtaaacgttcagaagaagatatgtatcgacaacatcaagagtcccaacagagagcaaattcaaatcgtgcaacacaaagtgaaaatgatagagagtatgaaaatcatcctgaacgttattacaatggaagagactatcgacgtgagcagcaattggaagaagaaaatgaaaaatcaagcaaaactaaaaaatggctgattgcaatcatagttattttactcattattgtagctatctttatcacacgtgcaattatcaatcataataatgataaagtaagtaatgaccctaacgtttcacaaaactataaaaaagaagttgaaaatcaaaacgacgacattaatcgacaagttgattcagccaaaagcgatataaaaaataaaaaggacacccaatcccaaattgataaactacaaaatcaaattgatcaattaaaacaaaatgaagaaactaatgcggattctaaattcacaaaattttatcaaaaccaaatcgacaaactgaaaaatgcaaataacgctcaacttaataacgaaaatcaaagtaaagttaacaacatgcttgaagacatgccatga

SEQ ID NO: 1622 - protein, 212 aa, Artificial Sequence
  Description of Artificial Sequence: synthetic amino acid sequence
MKRTDKYRDSYKYDDQYQNHRKRSEEDMYRQHQESQQRANSNRATQSENDREYENHPERYYNGRDYRREQQLEEENEKSSKTKKWLIAIIVILLIIVAIFITRAIINHNNDKVSNDPNVSQNYKKEVENQNDDINRQVDSAKSDIKNKKDTQSQIDKLQNQIDQLKQNEETNADSKFTKFYQNQIDKLKNANNAQLNNENQSKVNNMLEDMP

SEQ ID NO: 1623 - DNA, 1494 bp, Artificial Sequence
  Description of Artificial Sequence: synthetic nucleic acid sequence
atgatttacatgcgtgtagcaataataggtatgggaacagctggtgtaagtgtgttacgccaactcgttaaacatgaaaacttttctcaattaaaagtagatgtatatgacgatgttagaaatatgggccaaggtgttccatttcaaaatgatagtagcgaactacttattaacatgccatcaaaatccatgagcttaaatcttgatgatgatcaagagttttggaagtggtatcaaaatcagacggaatttaattttagtaatcctcaatatttgcctagatttgtatttggtcattatatgaagtcttatttatcttattataatgaccaatttgataatttaactattatcaatgataaagtacaagaaatttttacacaatccgatgttgatgacacagatttaaaatatcatgtatgtacatgtgatgatgaaaaagaatggcgtgaatacgattatttatttttaacttttggaacttttagttaccatgacccttatgatttgaagggaactaaaggctatatacaaacgccgtatcctacatatcatacacttgataatgttaaagattcagatcgaatcgtgattattggaacagggttggctagtttagatgctgtgagatatgtagctgcacatcatccatctttacccattactatgacaagtcgttctgcagcattgccaagtgttagagggaaaatgactaaaattcagtttacgcatttaactaaatcacgatttaatggaattatgaaaaatcactttggtaatgtaccattagaaaaagtagtttcattatttttaaaagaatgtgaagattatggaatagattttaaaaaacttatttatcgtagaaccggaaaccatgtcaaagacttggagtatgatttaaatcatgaagaagaaatggggatattccaaagtatcattgaacatttaaaagaaaatttaaactggatttggaatagtttgagcgttaaagatcaagaaacttttaatcgtaaatacactaaaattattcagttaaattctaatccaatgcctcctagaacagctcgtttacttatcaagttaatacagaataatgaacttgtcattaaaaaagggctagaagacatagtccataaaaataatcaatttatgttgaagtataacgacactacgcaaaattatgagttgtttgacatcgttattaatgcaacgggctctaaaacacatctttctcaattagatgaggatgatcaattaattttaaacttagaaaatagacaaattgttcaacgtcatcctatgggtggcattcaaattatcccagaaacaaatcaagtcataagccccagatatggaaccttaaaaaatgtgattgcaattggacaaatgaccaacggtgtcaataaacttagaaatggcgtaaagatgattgttaatcaagttgttgatacagtatctcaattatatataacacaggaaaatagaaataagtaa

SEQ ID NO: 1624 - protein, 497 aa, Artificial Sequence
  Description of Artificial Sequence: synthetic amino acid sequence
MIYMRVAIIGMGTAGVSVLRQLVKHENFSQLKVDVYDDVRNMGQGVPFQNDSSELLINMPSKSMSLNLDDDQEFWKWYQNQTEFNFSNPQYLPRFVFGHYMKSYLSYYNDQFDNLTIINDKVQEIFTQSDVDDTDLKYHVCTCDDEKEWREYDYLFLTFGTFSYHDPYDLKGTKGYIQTPYPTYHTLDNVKDSDRIVIIGTGLASLDAVRYVAAHHPSLPITMTSRSAALPSVRGKMTKIQFTHLTKSRFNGIMKNHFGNVPLEKVVSLFLKECEDYGIDFKKLIYRRTGNHVKDLEYDLNHEEEMGIFQSIIEHLKENLNWIWNSLSVKDQETFNRKYTKIIQLNSNPMPPRTARLLIKLIQNNELVIKKGLEDIVHKNNQFMLKYNDTTQNYELFDIVINATGSKTHLSQLDEDDQLILNLENRQIVQRHPMGGIQIIPETNQVISPRYGTLKNVIAIGQMTNGVNKLRNGVKMIVNQVVDTVSQLYITQENRNK

SEQ ID NO: 1625 - DNA, 1032 bp, Artificial Sequence
  Description of Artificial Sequence: synthetic nucleic acid sequence
atggatgatgctattcaactagcaaaaatggtaaatggacaaacaggtgttaatccaccagtaggatccgttgttgttaaaaacggtaggattgtaggtttaggtgcacatttaaaaaagggagataaacatgccgaagtacaagctattgaaatggcaggtttaaatacccaaggtgctaccatatacgtttcattagaaccttgcacacaccatggttcaacaccaccttgtgtgcataaaatcattgaagcgggcatatctaaggtcatctatgctgttaaagatactactttagtaagtaagggtgacgagattctgagagaagctggtatagaggttgaatttcaatataatgaaaatgcagctgcattataccgtgacttttttactgctaaaagaaacgaagttccagaagtaactgtaaaggtctcatctagtctagatggtaaacaagcaacagactttaatgaaagtaagtggataacaaacaaagaagttaaagaagatgtttatcaattaagacatgagcatgatgcagttattactgggcgtagaaccattgaagcagacaatccattgtatacaaccagggttcctgatggaaagcatccgattcgagttattctttctaagaaaggtcaactcgattttaatcaacaaatatttaaagatactgcatcggagatatggatttacactgaaaatgaaaaattaaaaacaaataaaagttttattaaaataataaatattagtaattgtgatacaacgacaatattacaagacttatatcaaagaggtattgggaaactgctagtcgaggcaggcccaaatattacatctcaatttctccaatccaaacatctaaatgaactcattttatatatagccccgaaattaattggtggttctggcaaacatcaattttataagactgacgaggtcattgatttgcctgaagcaactcaatttgaaattgttgattccaagttaattaatcaaaatttaaaattgaaattacgaaagaagtga

SEQ ID NO: 1626 - protein, 343 aa, Artificial Sequence
  Description of Artificial Sequence: synthetic amino acid sequence
MDDAIQLAKMVNGQTGVNPPVGSVVVKNGRIVGLGAHLKKGDKHAEVQAIEMAGLNTQGATIYVSLEPCTHHGSTPPCVHKIIEAGISKVIYAVKDTTLVSKGDEILREAGIEVEFQYNENAAALYRDFFTAKRNEVPEVTVKVSSSLDGKQATDFNESKWITNKEVKEDVYQLRHEHDAVITGRRTIEADNPLYTTRVPDGKHPIRVILSKKGQLDFNQQIFKDTASEIWIYTENEKLKTNKSFIKIINISNCDTTTILQDLYQRGIGKLLVEAGPNITSQFLQSKHLNELILYIAPKLIGGSGKHQFYKTDEVIDLPEATQFEIVDSKLINQNLKLKLRKK

SEQ ID NO: 1627 - DNA, 639 bp, Artificial Sequence
  Description of Artificial Sequence: synthetic nucleic acid sequence
atgtctatgtttacaggtatcattgaagaaataggtactgtacaacaagttcgctctgaacaatcagtaagaacgcttgaaattaaagcacaaaacattttagttgatatgcatattggtgattcaataagtgttaacggtgcatgtttaactgtgatagatttcactgactcaagtttttcagttcaagtcatcaaagggactgaaaacaaaacatatcttggaagtgttcaacgtaatacagaagttaatctcgaaagagccatgagtggaagtgggagatttggtggacatttcgtgttaggtcatgttgatgagcttggaacaatttctaaaatcaatgaaactgctaactcaaaaattatttctattaaaacaactaaaaatattttgaatcaaatggtaaagcaaggttctataactgtagacggagttagtcttactgtatttgatttacatgattatacttttgatatacatcttataccagaaacacgtcgatctactattctttcatctaaaaaagtgggcgacaaagtgcacttggagtctgacgtactattcaaatatgttgaaaacatcatgaatcaaaatcaatcgcagttaacagaagaaaagcttagagcatttggtttttag

SEQ ID NO: 1628 - protein, 212 aa, Artificial Sequence
  Description of Artificial Sequence: synthetic amino acid sequence
MSMFTGIIEEIGTVQQVRSEQSVRTLEIKAQNILVDMHIGDSISVNGACLTVIDFTDSSFSVQVIKGTENKTYLGSVQRNTEVNLERAMSGSGRFGGHFVLGHVDELGTISKINETANSKIISIKTTKNILNQMVKQGSITVDGVSLTVFDLHDYTFDIHLIPETRRSTILSSKKVGDKVHLESDVLFKYVENIMNQNQSQLTEEKLRAFGF

SEQ ID NO: 1629 - DNA, 333 bp, Artificial Sequence
  Description of Artificial Sequence: synthetic nucleic acid sequence
gtgtgcatattagtatttaagcacagaaaagaacaattagcaggattgaaattttctatcagtttaaaagtgattgagcgtctacttttagcactcattctaccacttatcattttaatgattggcttgtttagctttaatacttatgctgatagtttcatcctattacaaacttcagatttatcagtatcattattaactatattaattggtcatattttaatggcttttgtagtggagtttggtttccgttcttacttacaaaatattcttgaaacaagaatgaacacattttttgcgagtattgtcgttggtcttatttattcagtattt

SEQ ID NO: 1630 - protein, 111 aa, Artificial Sequence
  Description of Artificial Sequence: synthetic amino acid sequence
VCILVFKHRKEQLAGLKFSISLKVIERLLLALILPLIILMIGLFSFNTYADSFILLQTSDLSVSLLTILIGHILMAFVVEFGFRSYLQNILETRMNTFFASIVVGLIYSVF

SEQ ID NO: 1631 - DNA, 1119 bp, Artificial Sequence
  Description of Artificial Sequence: synthetic nucleic acid sequence
atgacaaattattctacttatgtagattggagaagaacgtttcatcaatatcctgaactttcagatgaagaatatgaaactacagaaaagttacgaaaaatactcaaaagttatggtatacgtatactggaggtacctttaaaaacaggtttagtagcagaaattgggcaaggagaggaaatgatagcagtaagaacagatattgatgctttgcctatagaagaacaagtgaagcatgaatttacatcaaagtatcaaggtgcaatgcatgcatgtggtcatgatattcatatggcaagtatattagctactggtattcaactaaaagagattgaagatgaattaaatggacgcgttcgattaatatttcaacctgctgaagaattaggacatggtgcatttgaaatcataaatactggagtacttaaaggagctaaagcagtacttggttttcataattatcccactttaaaagttggtgaatttgctattaaatcgggtgcaattacctctgctgtcgatcgttttgagtttaatgttaaaggtaaaggtgcgcatgctgcaaaacctgagcaaggaaatgatccagtcatcgtcgtaggacaacttatcaatagtttacaaactattgtgagtcgaaatttatcagcttttgatagtgcagttgtaacaatcggtgaaatttcttgtggtaacacatggaatgttatagctgacaaagcttatatacagggcactgttcgttcattcgatgaggatatacgtcattatattgaaaataggatgaaaaatattgctgatggtttaagtcgtgtttttaatgtggatattgatttaacttattcaagactacctggtgcagtagtaaatgatgcacatctaacacaagaagcaatcgaggtcgctaaaaatgttggctatcatgtatcaatgctcgatgaaccggttactattggagaggatttttcaggttatacagaagaataccccggtgttttcgcatttattggctccgacagtaaatatgatttacatcatcctaaatatcatccagatgagcgtattttggaaaaagttcctcaatatttcgttcagctcgttcaacgtttattgacataa

SEQ ID NO: 1632 - protein, 372 aa, Artificial Sequence
  Description of Artificial Sequence: synthetic amino acid sequence
MTNYSTYVDWRRTFHQYPELSDEEYETTEKLRKILKSYGIRILEVPLKTGLVAEIGQGEEMIAVRTDIDALPIEEQVKHEFTSKYQGAMHACGHDIHMASILATGIQLKEIEDELNGRVRLIFQPAEELGHGAFEIINTGVLKGAKAVLGFHNYPTLKVGEFAIKSGAITSAVDRFEFNVKGKGAHAAKPEQGNDPVIVVGQLINSLQTIVSRNLSAFDSAVVTIGEISCGNTWNVIADKAYIQGTVRSFDEDIRHYIENRMKNIADGLSRVFNVDIDLTYSRLPGAVVNDAHLTQEAIEVAKNVGYHVSMLDEPVTIGEDFSGYTEEYPGVFAFIGSDSKYDLHHPKYHPDERILEKVPQYFVQLVQRLLT

SEQ ID NO: 1633 - DNA, 882 bp, Artificial Sequence
  Description of Artificial Sequence: synthetic nucleic acid sequence
atgtcagctcaagatccgcgcaataaatttaaaactgataattatgaaaaacaagaacaagaagttccaggtatacaagctaaaatgtcaccacaaccagattgtggggaagattcttatcatggccaccatcgattagatggctttaaaatactagtgactggtggcgattcagcaattggacgtgcggcagcaattgcttatgctaaagaaggtgcagatgtagcgattaattatttaccaagtgaacaacaagatgccgatgatgtaaaacagattattgaaaatgttgggcaaaaagctatcttaattcctggtgatattagagatgaacaattcaactatgacatggttgaaaaggcttatcagcaattaggtggtttagacaatgtaacgttggttgctggtcatcaactttatcaagatgaattatcggagtttaaaactcaagattttaccgaaacgtttgaaacgaatgtctatccggtattttggacagtccaaaaagcgcttgagtatttacaaccaggaggctcgattacaacaacatcttcagttcaaggttataatcctagtccaattcttcatgattatgctgcaacgaaagctgcaattatatctttaacaaagagtttttcagccgaacttggccctaaaggtattcgtgttaactgtgttgcacctggaccgttttggtcaccacttcaaattgtcggtggacaaccacaaagcgctatacctacttttggacaaaacacaccgttaggacgtgccggccagccagttgaatgtgctgggacatatgtgttattagcctctgatgatgcaagttatattaccggtcaagtatatggtgtgactggtgggactcaaatagattaa

SEQ ID NO: 1634 - protein, 293 aa, Artificial Sequence
  Description of Artificial Sequence: synthetic amino acid sequence
MSAQDPRNKFKTDNYEKQEQEVPGIQAKMSPQPDCGEDSYHGHHRLDGFKILVTGGDSAIGRAAAIAYAKEGADVAINYLPSEQQDADDVKQIIENVGQKAILIPGDIRDEQFNYDMVEKAYQQLGGLDNVTLVAGHQLYQDELSEFKTQDFTETFETNVYPVFWTVQKALEYLQPGGSITTTSSVQGYNPSPILHDYAATKAAIISLTKSFSAELGPKGIRVNCVAPGPFWSPLQIVGGQPQSAIPTFGQNTPLGRAGQPVECAGTYVLLASDDASYITGQVYGVTGGTQID

SEQ ID NO: 1635 - DNA, 323 bp, Artificial Sequence
  Description of Artificial Sequence: synthetic nucleic acid sequence
gtgaaaaaaataaaagctgaaacactttcagatatgcaaaattataaattacttagtggaagtattatacctaggccgatagcatttgtaactactcaaaatttaaaaggggatatcaacgcagccccgtttagtttttttaatgtagttaatcatacaccacctatgattgcaattgctgttcaacgtacaaagggaaatagaaaagacacctcaataaatatagaacaatcaggtgagtttgtagtgcatattactgatgaggctattgttaatgatgtgaatgaaactgctgccccgttagaatatggtgttaatgagtg

SEQ ID NO: 1636 - protein, 108 aa, Artificial Sequence
  Description of Artificial Sequence: synthetic amino acid sequence
  MOD_RES (108): variable amino acid
VKKIKAETLSDMQNYKLLSGSIIPRPIAFVTTQNLKGDINAAPFSFFNVVNHTPPMIAIAVQRTKGNRKDTSINIEQSGEFVVHITDEAIVNDVNETAAPLEYGVNEX

SEQ ID NO: 1637 - DNA, 411 bp, Artificial Sequence
  Description of Artificial Sequence: synthetic nucleic acid sequence
atgcacaaatataataatcaaaaatataaagagggaaatacagtgcctgtgcatgttcaacacatgattgctcaattcatgataagtgggaaatttgaaagacatttgaataaaatgcgaaagatatatagagataaacttgattatattttaaaacgattaaagccctacaatactcaaataaagattgaaggcgcactaactggaatgcattttacaataactgttaataatggattgtcaatgaaacaatgtttaaaaaatgcgaaaaaaaataatttaaaattaaaaccttatcattacgaaaattattctaaagtttatccaaaatttattttaggatttggggggataaaaaaagaagaattagaagatcatgttaatgcattaattcattcactcgttatataa

SEQ ID NO: 1638 - protein, 136 aa, Artificial Sequence
  Description of Artificial Sequence: synthetic amino acid sequence
MHKYNNQKYKEGNTVPVHVQHMIAQFMISGKFERHLNKMRKIYRDKLDYILKRLKPYNTQIKIEGALTGMHFTITVNNGLSMKQCLKNAKKNNLKLKPYHYENYSKVYPKFILGFGGIKKEELEDHVNALIHSLVI

SEQ ID NO: 1639 - DNA, 435 bp, Artificial Sequence
  Description of Artificial Sequence: synthetic nucleic acid sequence
gtgatgaaaaatatttggttgaatttcaaagaaagtctgattatgactatgaatatcttacccaccatattatcaataggtttaatttgcttgttactcgcagaatatacagtgattttcgattatttagcatatgttttttatccattaacttggatacttcaaataccagattcctttttaactgcaaaaggcgcagctattggtataacagaaatgtttttgccttcattaattgtagtcgaagcaccattaatcactaaatttataattgctgttacttctgtttctacaattatattcttttcagctagtgtgcctagtattctctctactgatatacccatccgcataagagatttagtggttatatggtttgagagaactgtattgagtttaattatagtaacacctatcgcatatatttttttataa

SEQ ID NO: 1640 - protein, 144 aa, Artificial Sequence
  Description of Artificial Sequence: synthetic amino acid sequence
VMKNIWLNFKESLIMTMNILPTILSIGLICLLLAEYTVIFDYLAYVFYPLTWILQIPDSFLTAKGAAIGITEMFLPSLIVVEAPLITKFIIAVTSVSTIIFFSASVPSILSTDIPIRIRDLVVIWFERTVLSLIIVTPIAYIFL

SEQ ID NO: 1641 - DNA, 468 bp, Artificial Sequence
  Description of Artificial Sequence: synthetic nucleic acid sequence
gtgagaatgggagatcgttttgtcgtggaatcaattgatcgtttaggtcgtaattatgatgaagtcattaataccgttaattatcttaaagagaaagaagtacaattgatgattaccagtctaccaatgatgaatgaagtcattggtaatccattattagataaatttatgaaagatttaattatacagatattagcaatggtttcagaacaagaaagaaatgaaagtaaacgtcgacaagctcaagggattcaagttgcgaaagagaaaggcgtatataaaggacgacctttattatattctcccaatgcgaaagatcctcaaaaacgtgttatctatcatcgtgttgtagaaatgttagaggaaggcaaagcgattagtaaaattgcgaaagaagtgaatattacaagacaaactgtttatagaattaaacacgataacgatgatttgggttctgttgcaaagtaa

SEQ ID NO: 1642 - protein, 155 aa, Artificial Sequence
  Description of Artificial Sequence: synthetic amino acid sequence
VRMGDRFVVESIDRLGRNYDEVINTVNYLKEKEVQLMITSLPMMNEVIGNPLLDKFMKDLIIQILAMVSEQERNESKRRQAQGIQVAKEKGVYKGRPLLYSPNAKDPQKRVIYHRVVEMLEEGKAISKIAKEVNITRQTVYRIKHDNDDLGSVAK

SEQ ID NO: 1643 - DNA, 420 bp, Artificial Sequence
  Description of Artificial Sequence: synthetic nucleic acid sequence
atgattagggtgtaccctaaatatataattgagtttaaaataaaaaacagtaaattaagatggaaatttcatatccttgctttccttatcactataaatatttgtaaaaaaggtgatttttttatatacgatattttattattgaattataaaaaaatatatgcgataggtgttactataattaaactcaatacagttctctcaaaccatataaccactaaatctcttatgcggatgggtatatcagtagagagaatactaggcacactagctgaaaagaatataattgtagaaacagaagtaacagcaattataaatttagtgattaatggtgcttcgactacaattaatgaaggcaaaaacatttctgttataccaatagctgcgccttttgcagttaaaaaggaatctggtatttga

SEQ ID NO: 1644 - protein, 139 aa, Artificial Sequence
  Description of Artificial Sequence: synthetic amino acid sequence
MIRVYPKYIIEFKIKNSKLRWKFHILAFLITINICKKGDFFIYDILLLNYKKIYAIGVTIIKLNTVLSNHITTKSLMRMGISVERILGTLAEKNIIVETEVTAIINLVINGASTTINEGKNISVIPIAAPFAVKKESGI

SEQ ID NO: 1645 - DNA, 456 bp, Artificial Sequence
  Description of Artificial Sequence: synthetic nucleic acid sequence
atggtaagaagaatagaagatcacatctcatttttagaaaaatttattaatgatgttaatacattaacggcaaagttacttaaagacttgcaaactgagtatggcatatcagctgagcaatctcatgtgttaaatatgcttagtatagaggcgttaactgtggggcaaattacagagaaacaaggtgttaataaagctgctgttagtcgaagagtcaaaaagttgctcaatgctgaattagttaaattagaaaaacctgattccaatactgaccaacgtcttaaaataattaaattatctaataaaggaaaaaaatatattaaagagagaaaagcgattatgagccatattgctagtgatatgacgagtgactttgacagtaaggaaattgaaaaagttagacaggttttagaaattatcgactatcgtatacaatcttatacttctaaactttga

SEQ ID NO: 1646 - protein, 151 aa, Artificial Sequence
  Description of Artificial Sequence: synthetic amino acid sequence
MVRRIEDHISFLEKFINDVNTLTAKLLKDLQTEYGISAEQSHVLNMLSIEALTVGQITEKQGVNKAAVSRRVKKLLNAELVKLEKPDSNTDQRLKIIKLSNKGKKYIKERKAIMSHIASDMTSDFDSKEIEKVRQVLEIIDYRIQSYTSKL

SEQ ID NO: 1647 - DNA, 1407 bp, Artificial Sequence
  Description of Artificial Sequence: synthetic nucleic acid sequence
atgagtagaggtgataaaatgagtcaatgcccaaattgtggtcatcaagtgaaagatgatacatcgcaatgtccaaactgtgggcaactattaactaagaagaaaaaaagaaagattaaagaccaatcatctcaatcgagtaatgagaattctaccaatatacgtcttcgtaaaattgtgccgataggtattagtgtatttatcttaatacttattatcgtgttatttttccttttaagaaattataattcgcctaatgcacaagctaagatattagttaatgctgtagataataatgattcacaaaaagttgctacattattgagtactaaaaataaaaaagtagacgatgttgaagcgcaacaatatattaattatgtaaaaaaagaagtaggtattaagaagtatattcgagatatcaataatactgtagataaattgaataaaagtaattcaagcgtggcatcttatatacaaacgaaaagtggacaagatgtacttaagataagtaaaaatggtacaaagtatttaatttttgataatatgagtttcacagctccgactaaaaagccaattattaaacctaaagtagaaactaaatatgaatttagaacaagtggtaaaaagaaaactgtcattgctgaagcaaataaaaatacacctttgggtgaatttattcctggtacatatcatttaccagctaagaaaattacagaaaacggtacattcaatgggcatttaaattttgactttagagaaagccactctgaaaccgtagatgtagctgaagattatgatcaatcatttatcaatatcaaatttaagggtgcgaataaattaagtgataaatcagaaaaagttcaaatcaatgaccgtacattcacttattctcattctaaagaatttggtccttatccaaaaacaaaagatataacgatttctgcaactggtaaggcaaaaggtaagacgtttagttctgagacgaaaacaattagtgcagacgatttgaaagataatacgaaagttacattggaatttgatagtgataaaataaatagctatgttgagaagaaagaaaaagaagaaaatagtttgaaaaataaattaactgaattttttactggttatgcaacggctatgaattcagcatttaatatgaatgattttaactttatatcgagttattttaaaaagaattcgtctatatacacatcaatgaaaagtaatttccaaaatcgaacgaacgtgactatgatatctccgcaagtgttaagtgttcatcgaaacggacatactgtaagaacaactattcaacatatcgatcatattggtaattatataaataaagattatgaattagaaatagataatgatgatagtaatatgcagttggttaaagaattataa

SEQ ID NO: 1648 - protein, 468 aa, Artificial Sequence
  Description of Artificial Sequence: synthetic amino acid sequence
MSRGDKMSQCPNCGHQVKDDTSQCPNCGQLLTKKKKRKIKDQSSQSSNENSTNIRLRKIVPIGISVFILILIIVLFFLLRNYNSPNAQAKILVNAVDNNDSQKVATLLSTKNKKVDDVEAQQYINYVKKEVGIKKYIRDINNTVDKLNKSNSSVASYIQTKSGQDVLKISKNGTKYLIFDNMSFTAPTKKPIIKPKVETKYEFRTSGKKKTVIAEANKNTPLGEFIPGTYHLPAKKITENGTFNGHLNFDFRESHSETVDVAEDYDQSFINIKFKGANKLSDKSEKVQINDRTFTYSHSKEFGPYPKTKDITISATGKAKGKTFSSETKTISADDLKDNTKVTLEFDSDKINSYVEKKEKEENSLKNKLTEFFTGYATAMNSAFNMNDFNFISSYFKKNSSIYTSMKSNFQNRTNVTMISPQVLSVHRNGHTVRTTIQHIDHIGNYINKDYELEIDNDDSNMQLVKEL

SEQ ID NO: 1649 - DNA, 648 bp, Artificial Sequence
  Description of Artificial Sequence: synthetic nucleic acid sequence
atgaaaaaaatgatattaatcaatgtgattactatcattgtcctagttgttattggtgtgttaggcttttggttctggcataacacaacaagttatgtgacaactgacaatgcaaaagttgatggagatcaaataaaaatctcaagtcctgcatctggacaaattaaatctcttaatgttaagcaaggagacaaacttgataaaggtgataaagtagcagaagttttagcacaaggccaagatgggcaatcaaaagatatgaacatcaaaatgccacaaaaaggtactattgttaaaacagatggtatcgaaggttctatgactcaagcagggaacccaattgcatatgcatataatttagatgatctatatataactgctaatgtagatgaaaaagatatttctgacgtggaaaaaggcaacgacgttgatgtagatatcgacggtcaaaaagcatcaatcaaaggtaaggttgaagaagtaggccaagcgactgcagctagcttttcattgatgccatcatcaaatagcgacggtaactatacgaaagtttctcaggtagtacccgtaaaaatctctttagattctaatccatctaaaaatgttgtcccaggtatgaacgctgaagttaaaattcataaaaattaa

SEQ ID NO: 1650 - protein, 215 aa, Artificial Sequence
  Description of Artificial Sequence: synthetic amino acid sequence
MKKMILINVITIIVLVVIGVLGFWFWHNTTSYVTTDNAKVDGDQIKISSPASGQIKSLNVKQGDKLDKGDKVAEVLAQGQDGQSKDMNIKMPQKGTIVKTDGIEGSMTQAGNPIAYAYNLDDLYITANVDEKDISDVEKGNDVDVDIDGQKASIKGKVEEVGQATAASFSLMPSSNSDGNYTKVSQVVPVKISLDSNPSKNVVPGMNAEVKIHKN

SEQ ID NO: 1651 - DNA, 915 bp, Artificial Sequence
  Description of Artificial Sequence: synthetic nucleic acid sequence
atgacagcgaccttcattattatatatattgtagtagcgctcatactcattggttttattaatttctttttaattaagcgtaaaagaaaaaataaagacaaaagagtggaacaacgttcgacaatagattctaagagagaaagcaatcaatctaaatttaaagcaagcgatttagaacaaacaactaagtcaaatactgacccaacgcaatcaaacgatattgaagatgaaaaacgaaaaaatcactttgactcagaaatagataatgcatctcaatctatcaatacagatagtaaagaggatagaaacgcgttaagtcataagaaccaagaggaagatgacgcatcgaacgatgtgttgaaccctatcgatccaaattctactgaaggtagagttaatgaaagaattaaaaatcaagagtctaactttatttttggtaaaggcataactagaggtaaaattttagcggcaatgttatttggtatgtttatcgcgattctaaaccaaactctattaaatgtggcattgcctaaaataaatacagagtttaatatttctgcctcaactggtcaatggttaatgactggttttatgttagtgaatggtatattaatacctattagtgcctttttatttaataaatattcttatagaaaattatttattataggtttagcactatttacattaggttccttagtttgtgcaatctcatttaatttcccaattatgatgagtggacgtgtattacaagccataggcgcaggtatattgatgccgttaggttctaacgttattgttaccattttcccacctgaaaaacgcggtgtggcaatggggacaatgggtattgcaatgatattagcacctgcaatcggtccaacactttcaggttacatagtgttgcgttactag

SEQ ID NO: 1652 - protein, 304 aa, Artificial Sequence
  Description of Artificial Sequence: synthetic amino acid sequence
MTATFIIIYIVVALILIGFINFFLIKRKRKNKDKRVEQRSTIDSKRESNQSKFKASDLEQTTKSNTDPTQSNDIEDEKRKNHFDSEIDNASQSINTDSKEDRNALSHKNQEEDDASNDVLNPIDPNSTEGRVNERIKNQESNFIFGKGITRGKILAAMLFGMFIAILNQTLLNVALPKINTEFNISASTGQWLMTGFMLVNGILIPISAFLFNKYSYRKLFIIGLALFTLGSLVCAISFNFPIMMSGRVLQAIGAGILMPLGSNVIVTIFPPEKRGVAMGTMGIAMILAPAIGPTLSGYIVLRY

SEQ ID NO: 1653 - DNA, 672 bp, Artificial Sequence
  Description of Artificial Sequence: synthetic nucleic acid sequence
atgggacatagcttaggagaatattcaagcttagttgctagtggtgtattatcttttgaagatgcggttagaattgtgcgtaaacgtggccaacttatggctcgagcgtttcctaacggtgttggaggtatggcagcagtattaggtttggattatgatgatgttgataagatatgtcaaacgttatctacaaaagaacagttaattgaacctgctaatattaactcaccaggtcaaatcgtggtgtctggacataaatctttaattgatgaattagtagaaaagggcaaagaacttggtgctaaacgcgttcttccattagctgtttccggtccttttcattcttcaatgatgaaagttattgaagaggattttgctaatttcattaatcaatttgaatggcataatgctaattatccagttgttcagaatgttaatgcaaagggagaaaccgatgctgaagtaattaaacgcaatatggttaaacaattatattcacctgttcaatttattcaatcaacggagtggttgattaatcaaggtgtcgatcactttattgaaattggaccgggaaaagtattatctggacttatcaaaaaaataaatcgagatgtaaaaatcacttcaattcaaacactcgaagatgtgaaaggatggaataatcatgaataa

SEQ ID NO: 1654 - protein, 223 aa, Artificial Sequence
  Description of Artificial Sequence: synthetic amino acid sequence
MGHSLGEYSSLVASGVLSFEDAVRIVRKRGQLMARAFPNGVGGMAAVLGLDYDDVDKICQTLSTKEQLIEPANINSPGQIVVSGHKSLIDELVEKGKELGAKRVLPLAVSGPFHSSMMKVIEEDFANFINQFEWHNANYPVVQNVNAKGETDAEVIKRNMVKQLYSPVQFIQSTEWLINQGVDHFIEIGPGKVLSGLIKKINRDVKITSIQTLEDVKGWNNHE

SEQ ID NO: 1655 - DNA, 516 bp, Artificial Sequence
  Description of Artificial Sequence: synthetic nucleic acid sequence
gtggtaagtcagtttggttctgtagatgtattggttaacaatgcagggataactaaagacaacttacttatgcgtatgaaagaacaagaatgggatgacgtgattgatacgaacttaaaaggtgtgtttaactgtattcaaaaagtaacgccacaaatgttgcgtcaacgtagtggtgcaatcattaatctaactagtattgttggtgcaatgggtaatcctggacaagcaaactatgttgcaacaaaagcaggtgtcattggattaacaaaaactgcagcacgagaactagcatcacgaggtattacagtgaacactgtagcacctggtttcatcgtttcagacatgacaaatgctttaagtgatgatttgaaggatcaaatgttagagcaaattcctttaaaacgttttggagaagatacagatatagctaatactgttgccttcctagcttctgataaagctaaatatattacaggccaaacaattcatgttaacggtggaatgtatatgtaa

SEQ ID NO: 1656 - protein, 171 aa, Artificial Sequence
  Description of Artificial Sequence: synthetic amino acid sequence
VVSQFGSVDVLVNNAGITKDNLLMRMKEQEWDDVIDTNLKGVFNCIQKVTPQMLRQRSGAIINLTSIVGAMGNPGQANYVATKAGVIGLTKTAARELASRGITVNTVAPGFIVSDMTNALSDDLKDQMLEQIPLKRFGEDTDIANTVAFLASDKAKYITGQTIHVNGGMYM

SEQ ID NO: 1657 - DNA, 738 bp, Artificial Sequence
  Description of Artificial Sequence: synthetic nucleic acid sequence
gtggctaaccagaaaaagaaagaaatggtacatgattttcaacaaaaatttactgataaaatgaagtcgttaggattacgttttaaaaatattgatttatatcaacaggcattctctcattcaagttttattaatgactttaatatgaatcgtttagaacacaacgaacgcttagaatttttaggtgatgcggtattagaattgacggtttcacgctatctttttgacagacatcctcatttaccagaaggtaatttgacaaagatgcgcgcaacaattgtttgtgaaccttcacttgtgatatttgcgaataagattaaattaaacgaactgattttattaggtaaaggtgaagagaagacaggaggcagaacaagaccttcccttatttcagatgcatttgaagcttttgtaggtgcactgtatttagatcaaggtttagattcagtatggacatttgctgaaaaagtcatctttccgtatgtagaagatgacgagcttgttggtgtcgtagactttaaaacacagttccaagaatatgtgcatagccaaaataaaggagatgtgacataccaattaattaaagaagagggtcccgcacatcatagactatttacatcggaagtgattttagaaaataaagcagttgcagagggtaaaggaaagacaaagaaagaatccgaacaaaaggcagcagaacaagcgtataaactaatgaaaaataaaaaatcattataa

SEQ ID NO: 1658 - protein, 245 aa, Artificial Sequence
  Description of Artificial Sequence: synthetic amino acid sequence
VANQKKKEMVHDFQQKFTDKMKSLGLRFKNIDLYQQAFSHSSFINDFNMNRLEHNERLEFLGDAVLELTVSRYLFDRHPHLPEGNLTKMRATIVCEPSLVIFANKIKLNELILLGKGEEKTGGRTRPSLISDAFEAFVGALYLDQGLDSVWTFAEKVIFPYVEDDELVGVVDFKTQFQEYVHSQNKGDVTYQLIKEEGPAHHRLFTSEVILENKAVAEGKGKTKKESEQKAAEQAYKLMKNKKSL

SEQ ID NO: 1659 - DNA, 2655 bp, Artificial Sequence
  Description of Artificial Sequence: synthetic nucleic acid sequence
gtggaaccgttaaaagaagaggcggccattgctaaagaatataagcaattatctaaagagatggagcaaagtgatgtcatcgttacagtatctgacattgatcattatactgaagataatcagcgattagatgagcgtttaaatcacctaaagagtcaacaggctgagaaagaaggtcaacaagctcaaatcaatcagttactacaaaaatataaaggtaaacgtcaacaaaacgattatgacattgaaaagttaaattatgaattagttaaagcaactgagaattatgagcaattatcaggtaagctaaatgtattagaagaacgaaagaaaaaccaatcagaaacaaatgcaagatatgaggaagaattagataatttagaatcacaaattgattctattaaaaatgaaaaagcccaaaatgaaaaattattagctgagttaaaaaataagcaaaagcaattaaacaaggaagttcaagaattagagtcacttctttatatatccgatgaacaacacgacgaaaaactagaagaaattaaaaatagttattatacattgatgtcagaacaatcagatgttaataatgatataagatttttagaacatacaatcaatgaaaatgaagcaaaaaaatcacgattagattcgcgtttagtagaggctttcaatcaacttaaagacattcaacaaaatattactcaaacacaaaaggaataccaaagttctaagaaatctatggaaaaagtagaacaaaatattcaacaattagaacaacagttgacagattctaaaagacttctatctgaatatgaaaataaactatatcaagcctatcgttataatgaaaagttaaaatcaagaattgatagtttagctactcaagaggaagattacacgtatttctttaatggtgtaaagcacattttgaaagcaaaagataaagaattaagaggaattcatggtgcggttgcagaagtgattaacgttccttcagaaatgacacaagcgattgaaaccgccttaggtgcatcgttacagcacgttattgttgataatgaaaaagacggtcgccaagcaatccagtacttgaagcaaagaggtttaggtcgtgctacttttttaccattaaacgtgattcaaccaagacatgtagctgctgacattaaagatgtagctcgtggttcacaagggttcattaatattgcatctgatgccataaatgtatctgctaaatatcaaaacatcattgaaaatttattaggtaataccatcattgtagaaaatttaaaacatgcaaatgaacttgcacgtgccattcgatatcggacaagaatagtaactttagaaggtgatgttgtaaatcctggtggttccatgacaggaggaggagcacgtaaaacaaaaagtatattgtcacaaaaagatgaattatcaacaatgcgaaatcaacttgaagattatcaacgacaaacagcagaatttgaacgtcagtttaaagaacaaaaaacacaagctgaacaattaagtgaacaatattttagtgcaagtcagcagtacaacaatttaaaagaacaagtacatcatcacgaattagaactggatagactaaaaacacaagaagcacatcttaaaaatgaacatgaagagtttgaatttgaaaaaaatgatggatatcaaagtgataaaagtaaagaaacattaaaagaaaaacaaaatcatttaattgagatacaacaacaattgaagcaactagaaagtgatattgaaagatatacacaattatcaaaagaaggaaaagcttcgacacatcaaacacaacaacaactacatcaaaaacaatctgatttagctgttgttaaagagcgaattaaatcgcaaaagcaagtttatgaacgtttagataaacaacttagcgattcagaacgtcaaaaaattgaagtaaatgaaaaaatcaaattgtttaattcagatgaaatgatgggtaaagatgcttttgaaaagttgaaagagcaaattcagcaacaagaaaatgtaagacaaaatttaaatcaacaacttagtgagattaaacagcaacgtaaagatcttaatgagaaaatcgaaataaatgaaagtcagcttcaaaaatgtcatcaagatatactttctatagaaaatcattatcaagatattaaagcaaaacaatcaaagctagatgtattaatcaaccatgcaatagatcatttaaatgacacgtatcaactcacagtagaacgtgcaagaatggaatatgattctgatgaaactattgacaatttgcgtaaaaaagtaaaattaacgaagatgacaatcgatgaattaggtcctgtaaatttaaatgcaatagaacaatttgaagagttgaatgaacgatacacatttttaaatgagcaacgaacagatttaagagaagcaaaagaaaccttagaacaaatcattcatgaaatggataaagaagttgaaggtcgttttaagacaacatttcatgcggttcaagatcattttacgacagtgtttaagcaattatttggtggtggacaagcagaacttcgtttaactgaagatgactatttgtctgctggcgttgatatcatcgtacaaccgccaggaaaaaaattacaacatctttcatta

SEQ ID NO: 1660 - protein, 885 aa, Artificial Sequence
  Description of Artificial Sequence: synthetic amino acid sequence
VEPLKEEAAIAKEYKQLSKEMEQSDVIVTVSDIDHYTEDNQRLDERLNHLKSQQAEKEGQQAQINQLLQKYKGKRQQNDYDIEKLNYELVKATENYEQLSGKLNVLEERKKNQSETNARYEEELDNLESQIDSIKNEKAQNEKLLAELKNKQKQLNKEVQELESLLYISDEQHDEKLEEIKNSYYTLMSEQSDVNNDIRFLEHTINENEAKKSRLDSRLVEAFNQLKDIQQNITQTQKEYQSSKKSMEKVEQNIQQLEQQLTDSKRLLSEYENKLYQAYRYNEKLKSRIDSLATQEEDYTYFFNGVKHILKAKDKELRGIHGAVAEVINVPSEMTQAIETALGASLQHVIVDNEKDGRQAIQYLKQRGLGRATFLPLNVIQPRHVAADIKDVARGSQGFINIASDAINVSAKYQNIIENLLGNTIIVENLKHANELARAIRYRTRIVTLEGDVVNPGGSMTGGGARKTKSILSQKDELSTMRNQLEDYQRQTAEFERQFKEQKTQAEQLSEQYFSASQQYNNLKEQVHHHELELDRLKTQEAHLKNEHEEFEFEKNDGYQSDKSKETLKEKQNHLIEIQQQLKQLESDIERYTQLSKEGKASTHQTQQQLHQKQSDLAVVKERIKSQKQVYERLDKQLSDSERQKIEVNEKIKLFNSDEMMGKDAFEKLKEQIQQQENVRQNLNQQLSEIKQQRKDLNEKIEINESQLQKCHQDILSIENHYQDIKAKQSKLDVLINHAIDHLNDTYQLTVERARMEYDSDETIDNLRKKVKLTKMTIDELGPVNLNAIEQFEELNERYTFLNEQRTDLREAKETLEQIIHEMDKEVEGRFKTTFHAVQDHFTTVFKQLFGGGQAELRLTEDDYLSAGVDIIVQPPGKKLQHLSL

SEQ ID NO: 1661 - DNA, 468 bp, Artificial Sequence
  Description of Artificial Sequence: synthetic nucleic acid sequence
atgatatgtgcatatagtggcgtgaatcgctctactttttatgatcattttcaagataaatatcaattactagataagatccaaaattatcatttaaacaaatatatatctttactacaatctttctataacgattttcatcatatcaaaacagatcaaaaaaaattatataaatttttcttattgatagccaaatatattaaacgtaaagaagcgttctacagagcaacacttgtaacatatcctaataaagatattgcattagattacattaacgccactaaaacatgttatgaaaaagtcatgaatagatatgaaacctcaataaataataaacgtatgtttatcatttattcagtcggtggtcaagcaggtgtatttatcgattggttacgtaatggatgcatcgaatctcctcaagaggtcgctcaagttcttttagctaatacaattaaattacaacgataa

SEQ ID NO: 1662 - protein, 155 aa, Artificial Sequence
  Description of Artificial Sequence: synthetic amino acid sequence
MICAYSGVNRSTFYDHFQDKYQLLDKIQNYHLNKYISLLQSFYNDFHHIKTDQKKLYKFFLLIAKYIKRKEAFYRATLVTYPNKDIALDYINATKTCYEKVMNRYETSINNKRMFIIYSVGGQAGVFIDWLRNGCIESPQEVAQVLLANTIKLQR

SEQ ID NO: 1663 - DNA, 1125 bp, Artificial Sequence
  Description of Artificial Sequence: synthetic nucleic acid sequence
atgattaatcaaaaacgtttattagattgttttctagaattagtgcaaattgattcggaaacagggcacgaagaaacaattcaaccttatcttaaagatacgtttgaaaaaatggggctccatgttattgaagatgaagcttcaaaaaataatagattaggtgctaacaatcttatttgtacgttaaaaagtaatataagtcatcagaatgtgccgaaaatttattttacaagccacatggatactgtcgttccaggaaaaaacatccaacctgtagtaaaagaagatggatacgtttatagcgatggaactacgatactcggggcggacgataaagccggtcttgcggcaataattgaagcgattaaacaaattaaggaatcaaatttgccacacggacagattcaaataattattaccgtgggagaggaatctggattagtaggtgctaaagcaatagatactcgccttcttgatgcagatttcggctatgctgtagatgcaagtaaagatgttggaactactgttatcggtgctccaactcaagtaaagatttatacaactataaaagggaaaaccgcccatgcaagcacacctaaaaaaggtattagcgcaataaatattgcatcaaaagcaatcagtcgaatgaaattgggacaagtcgatgcattaacaacagccaatataggtaaatttcacggaggttgtgccactaatattatagctgatgaagtcactttagaggcagaagcacggtcacatgatgatcaaagcattaataaacaagtgaaacatatgaaagagactttcgaaacgacagcaaatgaattaggcggtcaagctgaagtgttagttgaaaaaagttatccgggatttgaagttagtgaagctgacaaagtaacacaatatgctatatctagtgcattagccctcggtctaaaaggtgatacttgtattgctggtggtggttcagacggcaacatcatgaatcaatatggcattccttctgtgattttaggagtaggatatgaaaacatacatactacttcggaaagaatagcaataaaggatatgtatatgctcacaagacaaataataaaaattattgagctagtagctgaataa

SEQ ID NO: 1664 - protein, 374 aa, Artificial Sequence
  Description of Artificial Sequence: synthetic amino acid sequence
MINQKRLLDCFLELVQIDSETGHEETIQPYLKDTFEKMGLHVIEDEASKNNRLGANNLICTLKSNISHQNVPKIYFTSHMDTVVPGKNIQPVVKEDGYVYSDGTTILGADDKAGLAAIIEAIKQIKESNLPHGQIQIIITVGEESGLVGAKAIDTRLLDADFGYAVDASKDVGTTVIGAPTQVKIYTTIKGKTAHASTPKKGISAINIASKAISRMKLGQVDALTTANIGKFHGGCATNIIADEVTLEAEARSHDDQSINKQVKHMKETFETTANELGGQAEVLVEKSYPGFEVSEADKVTQYAISSALALGLKGDTCIAGGGSDGNIMNQYGIPSVILGVGYENIHTTSERIAIKDMYMLTRQIIKIIELVAE

SEQ ID NO: 1665 - DNA, 1407 bp, Artificial Sequence
  Description of Artificial Sequence: synthetic nucleic acid sequence
atgacacaacaaattggagtagtgggtttagcagtaatggggaaaaacctagcttggaatattgaatcacgtggttatagtgtttctgtttataaccgatcaagacaaaaaactgatgaaatggttaaagaatcgcctggaagagaaatttacccaacatactcattagaagaatttgtagaatctttagagaaacctcgtaagattttattaatggtaaaagctggacctgcaacagatgccactatagatggtttattacctttattagacgatgatgatattttaattgatggtggtaatactaattaccaagatacgattcgtcgaaataaagctttagctgaaagtagtattaactttattggtatgggagtttctggtggagaaatcggcgcactcacgggcccttctttaatgccaggtggtcaaaaagatgcttataacaaagtcagcgatatcttggacgcaattgctgctaaggcacaagatggtgcttcatgtgtaacttacattggccctaatggtgcaggacattatgttaagatggtacacaatggtatcgaatatgcagatatgcaattaattgctgaaagttatgcaatgatgaaagatttattaggcatgtcacataaagaaatttctcaaacttttaaagaatggaatgctggagaacttgaaagttatttaatagaaattacaggtgatattttcaataaattagatgatgacaatgaagcacttgtagaaaaaatattagatactgcaggtcaaaaaggcacaggtaaatggacttcaattaacgcactagaattaggtgttcctttaacaatcattacagaatctgtatttgcgagattcatctcatcaattaaagaagaacgtgttactgcttctaaatctttaaaaggacctaaagcacattttgaaggcgataaaaaaacattcttagaaaaaatacgtaaggcactttatatgagtaaaatatgctcatatgcacaaggtttcgctcaaatgagaaaagccagtgaagataatgagtggaatttgaaattaggcgaattagcaatgatttggcgtgaaggttgtattattcgtgcacaattcctacaaaaaattaaagatgcctacgataataatgaaaacttacaaaacttattattagacccttacttcaaaaacattgttatggaatatcaagatgcactacgtgaagtagtagctactagcgtgtacaatggcgtgccaacacctggtttttcagcaagtataaattattatgatagttatcgctcagaggatttacctgcaaacttaattcaagcacaacgtgattactttggcgcacatacttatgaacgtaaagaccgtgaaggtattttccatacacaatgggtagaagaataa

SEQ ID NO: 1666 - protein, 468 aa, Artificial Sequence
  Description of Artificial Sequence: synthetic amino acid sequence
MTQQIGVVGLAVMGKNLAWNIESRGYSVSVYNRSRQKTDEMVKESPGREIYPTYSLEEFVESLEKPRKILLMVKAGPATDATIDGLLPLLDDDDILIDGGNTNYQDTIRRNKALAESSINFIGMGVSGGEIGALTGPSLMPGGQKDAYNKVSDILDAIAAKAQDGASCVTYIGPNGAGHYVKMVHNGIEYADMQLIAESYAMMKDLLGMSHKEISQTFKEWNAGELESYLIEITGDIFNKLDDDNEALVEKILDTAGQKGTGKWTSINALELGVPLTIITESVFARFISSIKEERVTASKSLKGPKAHFEGDKKTFLEKIRKALYMSKICSYAQGFAQMRKASEDNEWNLKLGELAMIWREGCIIRAQFLQKIKDAYDNNENLQNLLLDPYFKNIVMEYQDALREVVATSVYNGVPTPGFSASINYYDSYRSEDLPANLIQAQRDYFGAHTYERKDREGIFHTQWVEE

SEQ ID NO: 1667 - DNA, 1656 bp, Artificial Sequence
  Description of Artificial Sequence: synthetic nucleic acid sequence
atgaaaagaaattggtggaaagaagcagttgcatatcaagtatatccacgaagttttaatgatagtaatggagatggaataggtgatctacctggattaattgaaaaattagattatctagaaaatttaggaatagatgtcatttggttaagcccaatgtatccatcaccaaacgatgataatggatatgatattagtgactacaaaggcattatgagtgaatttggtacaatgaacgattttgatcaattgttatcaagcatacatcaaagagggatgaaattaatattagacttagtggttaatcacacatcagatgaacacccttggtttattgaatcaaaatctagtaaaacaaatgcaaaaagagattggtatatttgggcagatcctaaaccggatggatctgaacctaataactgggaaagtatctttaatggttcaacttgggagtttgacgaatcgactaagcaatactatttccatttatttagcaaaaagcagccagatttaaattgggaaaatccagatgtaagacaagctgtgtttgaaatgatgaattggtggtttgaaaaaggtattgacggatttagagttgatgccattactcatattaaaaagaattttgaagcaggagatttacctgtacctgatggcaaaaaatttgctccagcatttgatgtagatatgaatcagccaggaatacaagaatggctccaagaaatgaaagataaatcgttaagtcggtatgacattatgactgtaggcgaggctaatggtgttactcctaatgatgctgaagaatgggtaggagaagaaaatgggaaatttaatatgatattccagtttgaacatcttggtttatggagtactggcgatacgaaattcgatgttaaatcctataaacaagtcttaaatcgttggcaaaagcaactagaaaatgtaggttggaatgctttatttatcgaaaaccatgatcaaccacgtcgtgtttcaacctggggtgatgataaaaattattggtatgaatcagcaactagtcacgctactgcctactttttacaacagggcacaccttttatttaccaaggtcaagaaataggtatgactaattatccatttgaaagcattgaaagtttcaacgatgtcgcagtgaaaactgaatatcaaatagtcaaaaaagaaggtggagatgtcaatcaattactagataaatataaaatggaaaaccgagacaatgcaaggactccaatgcaatggaataattctatcaatgctggattcactactggtaagccatggtttcatgtaaaccctaactatacagaaattaatgttaaacaacaactaaatgataagttttcgatactttcttattataaagcgttaattcaactaaaaaaatctgatttgatttacacctacggtaagtttaatatggtcgatgctgaaaataagcaggtttttgcatatacacgcacatttaaaaacaatactgtattaattgtagccaatctcacaaatgaagtatcagaactaaacctaccttttgaattagatatttcatctgtagatataaaattgcataattatcacttaaatgatataaatttagaccatattaaaccttatgaatcattcgtcgttgaaatataa

SEQ ID NO: 1668 - protein, 551 aa, Artificial Sequence
  Description of Artificial Sequence: synthetic amino acid sequence
MKRNWWKEAVAYQVYPRSFNDSNGDGIGDLPGLIEKLDYLENLGIDVIWLSPMYPSPNDDNGYDISDYKGIMSEFGTMNDFDQLLSSIHQRGMKLILDLVVNHTSDEHPWFIESKSSKTNAKRDWYIWADPKPDGSEPNNWESIFNGSTWEFDESTKQYYFHLFSKKQPDLNWENPDVRQAVFEMMNWWFEKGIDGFRVDAITHIKKNFEAGDLPVPDGKKFAPAFDVDMNQPGIQEWLQEMKDKSLSRYDIMTVGEANGVTPNDAEEWVGEENGKFNMIFQFEHLGLWSTGDTKFDVKSYKQVLNRWQKQLENVGWNALFIENHDQPRRVSTWGDDKNYWYESATSHATAYFLQQGTPFIYQGQEIGMTNYPFESIESFNDVAVKTEYQIVKKEGGDVNQLLDKYKMENRDNARTPMQWNNSINAGFTTGKPWFHVNPNYTEINVKQQLNDKFSILSYYKALIQLKKSDLIYTYGKFNMVDAENKQVFAYTRTFKNNTVLIVANLTNEVSELNLPFELDISSVDIKLHNYHLNDINLDHIKPYESFVVEI

SEQ ID NO: 1669 - DNA, 678 bp, Artificial Sequence; identical to SEQ ID NO: 955
  Description of Artificial Sequence: synthetic nucleic acid sequence

SEQ ID NO: 1670 - protein, 225 aa, Artificial Sequence; identical to SEQ ID NO: 956
  Description of Artificial Sequence: synthetic amino acid sequence

SEQ ID NO: 1671 - DNA, 302 bp, Artificial Sequence
  Description of Artificial Sequence: synthetic nucleic acid sequence
atgaataaaatcttaaaaatattaataacttctattattgttatcattattaccttaacagtttggacttttagtgtgattacttatcagaaacacaagagtgagaaaatcatcaatcacgttatagaacgtaagggttgggataaaaaaataaaaaatgaaaaaatgagttttaatattataatgggatatgctgaaaaagatattgtttttaaagatcaaccatatagtgagtatgagtataacgtgacaccagcaccatggacagatgataaagaatataaggtgtggggggaaacaga

SEQ ID NO: 1672 - protein, 101 aa, Artificial Sequence
  Description of Artificial Sequence: synthetic amino acid sequence
  MOD_RES (101): variable amino acid
MNKILKILITSIIVIIITLTVWTFSVITYQKHKSEKIINHVIERKGWDKKIKNEKMSFNIIMGYAEKDIVFKDQPYSEYEYNVTPAPWTDDKEYKVWGETX

SEQ ID NO: 1673 - DNA, 891 bp, Artificial Sequence
  Description of Artificial Sequence: synthetic nucleic acid sequence
gtgaaagttttggacgttatcaagcaaatacaacaggcaattgtatatattgaggatcgtttgttagagccttttaatttgcaagaattaagtgattacgttggtctttctccgtatcatttggatcaatcttttaagatgatagttggtcagtccccagaggaatatgcgcgtgcacgtaaaatgacaatagcagcaaacgatgtagttaatggagctagtcgattaatggatgttgctaagaaatatcgttatgcgaattctaatgatttcgcaaatgattttagcgattttcatggtatctcacctattcaagctacaacaaaaaaagatgaactaaaaatacagcaacgactgtatataaaattatcaacgactgaaaatgcaccctatacatacagacttcaagagactgatgatatttctttagttggctattcaagatttattcctactgagcaattatcaaatccatttaatattccagactttttagaggatctattagtagatggttatattaaagaacttaaacgttataatgatacgagcccgtatgaattatttgtagtcagctgtcctctggaacaaggtttagaaatatttgttggtgttccgagtgaacgttacccttcacatcttgaaagcagatttttacctggtcgccattatgcattgtttaatttacaaggtgaaattgattatgctacaaacgaggcttggtattatattgagtctagcttgcaacttactttaccttatgagcgaaatagtttatatgttgagatttatccacttgatatttcatttaatgacccattcactaagattcaattatggttgcctattaaacaagaaatctatgatttagatgaaggttatcaaaattaa

SEQ ID NO: 1674 - protein, 296 aa, Artificial Sequence
  Description of Artificial Sequence: synthetic amino acid sequence
VKVLDVIKQIQQAIVYIEDRLLEPFNLQELSDYVGLSPYHLDQSFKMIVGQSPEEYARARKMTIAANDVVNGASRLMDVAKKYRYANSNDFANDFSDFHGISPIQATTKKDELKIQQRLYIKLSTTENAPYTYRLQETDDISLVGYSRFIPTEQLSNPFNIPDFLEDLLVDGYIKELKRYNDTSPYELFVVSCPLEQGLEIFVGVPSERYPSHLESRFLPGRHYALFNLQGEIDYATNEAWYYIESSLQLTLPYERNSLYVEIYPLDISFNDPFTKIQLWLPIKQEIYDLDEGYQN

SEQ ID NO: 1675 - DNA, 1398 bp, Artificial Sequence
  Description of Artificial Sequence: synthetic nucleic acid sequence
atgactcaaaagtatagatatcctacttttttagaatctatttctactattttagttatggttgtcgttgtagtaattggttttgttttctttaatgtcccgatacaaatattattattaatttcttcagcttatgcagcattgattgcacatagagtgggattaaaatggaaggatttagaagaggggattactcatcgattgagcacggcgatgccagctatctttattattttagctgttggaatcattgtaggaagttggatgtattctggaacagttccagcgttaatttactatggacttaaatttttaaacccaagttatttattagtatctgcatttataatcagtgcaatgacttcaatcgctacaggaacggcttggggatcggcatctacagcaggcattgcactcatatcaattgctaatcaattaggtgtgccagcaggtatggctgctggtgccattattgcaggggcggtttttggtgataaaatgtctccattatctgatactacaaatttggcagctcttgtaactaaagttaatatttttgctcacattaaatcgatgatgtggacaacaatccctgcttcaataataggattggctatatggtttattgttggattacaatataagggagacgcaaatacacaacaaattcaaaatctattaaaagaattaacaacaatttataacttgaatttttgggtatggatcccacttattatcatagttttatgtttaatatttagaatctctacagtaccgtcaatgcttatctctagtatcagtgctttagttattggaacattcgatcatcaatttaatatgaaagatggttttaaagcttcttttgatggatttaatcatacaatgctacaccagtctcatatttcagataatgctaagacgttgattgagcagggtggtatgatgagtatgactcaaatcattgtaactatattttgtggttatgcttttgctggtattgttgaaaaggcaggttgtttagacgtaattttagagacaatagctaaaggcgtaaagtcagttggaacactaatattaataactgtagtttgtagtattatgctagtatttgcagctggagttgcttcaatagttattattatggtaggcgtacttatgaaagatatgttcgaaaagatgaatgtctcaaagtcagtgttatctcgtacacttgaagattcaagtacaatggtattgccactcattccatggggcacatctggtatatattatgcacaccaacttaatgtttcagttgatcagttctttatatgggcaatcccatgttacttatgtgcattcattgcaataatttatggctttacaggtataggaattaaaaaaataagtagaaaataa

SEQ ID NO: 1676 - protein, 465 aa, Artificial Sequence
  Description of Artificial Sequence: synthetic amino acid sequence
MTQKYRYPTFLESISTILVMVVVVVIGFVFFNVPIQILLLISSAYAALIAHRVGLKWKDLEEGITHRLSTAMPAIFIILAVGIIVGSWMYSGTVPALIYYGLKFLNPSYLLVSAFIISAMTSIATGTAWGSASTAGIALISIANQLGVPAGMAAGAIIAGAVFGDKMSPLSDTTNLAALVTKVNIFAHIKSMMWTTIPASIIGLAIWFIVGLQYKGDANTQQIQNLLKELTTIYNLNFWVWIPLIIIVLCLIFRISTVPSMLISSISALVIGTFDHQFNMKDGFKASFDGFNHTMLHQSHISDNAKTLIEQGGMMSMTQIIVTIFCGYAFAGIVEKAGCLDVILETIAKGVKSVGTLILITVVCSIMLVFAAGVASIVIIMVGVLMKDMFEKMNVSKSVLSRTLEDSSTMVLPLIPWGTSGIYYAHQLNVSVDQFFIWAIPCYLCAFIAIIYGFTGIGIKKISRK

SEQ ID NO: 1677 - DNA, 744 bp, Artificial Sequence
  Description of Artificial Sequence: synthetic nucleic acid sequence
atgggccgaattggaatgaaagatatagatgaatataaagaagtggttgatttaattaataaaagagatcatttagtttttgaaggggttttcacacattttgcgagtgctgatgaacctggaagttctatgaatgaacaatatattttgttcaaagagatggttaatcaagttgagaaaccaatttatattcattgtcaaaattctgctggatcactactcatggatggtcaattttgtaatgcaataagattaggaatctctctttatggatactatccttcagaatatgttaaagataatgtgaaagttcatttaagaccgagtgcgcagttagtatcagaaaccgttcaagtcaaaacgcttaaagttggggaaactgttagttatggacgtacatttattgctgatgaagaaatgacaattgcaattttacctattgggtatgccgacggatatttaagatcgatgcaaggtgcattcgtcaatgttaacgggagtcaatgtgaagtcattggacgcatttgtatggaccaaatgatagttaaggttccttctcatgtaaaaacgggtgaaaaagtaatacttatggataatcacgttgattcaccacaatcagctgaagccgtagcaaataaacaaggtacaattaactacgaagtattatgtaatttatcaagacgtcttccaagaatatattattatgataataatgaagaggttactaacgaattgttaaaatag

SEQ ID NO: 1678 - protein, 247 aa, Artificial Sequence
  Description of Artificial Sequence: synthetic amino acid sequence
MGRIGMKDIDEYKEVVDLINKRDHLVFEGVFTHFASADEPGSSMNEQYILFKEMVNQVEKPIYIHCQNSAGSLLMDGQFCNAIRLGISLYGYYPSEYVKDNVKVHLRPSAQLVSETVQVKTLKVGETVSYGRTFIADEEMTIAILPIGYADGYLRSMQGAFVNVNGSQCEVIGRICMDQMIVKVPSHVKTGEKVILMDNHVDSPQSAEAVANKQGTINYEVLCNLSRRLPRIYYYDNNEEVTNELLK

SEQ ID NO: 1679 - DNA, 351 bp, Artificial Sequence
  Description of Artificial Sequence: synthetic nucleic acid sequence
atgttaatttatttattaagtttatttactggtatcattggtcctttgattatttggttactcaagcgtaaagagtcccgacttattgatgtatctgggaaaacgtatctgaactattttatttcttatactatctattcaacagtaggcgtgatatgtatgtttatgattgttcctttaatgaatataagtgaaagtttagccatcttattattaattttgctgctggtggtagtcttcatcttattggcattgttaataatgtcatttgtgtgtacaattattgcttgcgtaaaatatatgtctggcaaaacttacactatcccactcacgataccttttataaaataa

SEQ ID NO: 1680 - protein, 116 aa, Artificial Sequence
  Description of Artificial Sequence: synthetic amino acid sequence
MLIYLLSLFTGIIGPLIIWLLKRKESRLIDVSGKTYLNYFISYTIYSTVGVICMFMIVPLMNISESLAILLLILLLVVVFILLALLIMSFVCTIIACVKYMSGKTYTIPLTIPFIK

SEQ ID NO: 1681 - DNA, 447 bp, Artificial Sequence
  Description of Artificial Sequence: synthetic nucleic acid sequence
atgaaaaaaatcaaaacaatctcgacattggtagctggacttggtatagcatttctaggtcacacaacacatgcagatgcggctgaaaataacaatcaacaacaaagtacatataactatagtacaactgaagtatcattttctaattcaggaaatttatatacttctggccaatgtacttggtatgtttatgataaaactggtggaaaaatcggatcaacatgggggaatgcaaatagctgggcaactgcagctcaagcagcaggattcactgtaaataatacacctgaagaaggtgcaattatgcaatcatctgaaggtgctttcggacatgttgctttcgttgaaagtgtcaataatgatggttctattactgtatcagaaatgaactatgatggtggtccattcgctataagcacacgaacaatctctgccagtgaatatagt

SEQ ID NO: 1682 - protein, 149 aa, Artificial Sequence
  Description of Artificial Sequence: synthetic amino acid sequence
MKKIKTISTLVAGLGIAFLGHTTHADAAENNNQQQSTYNYSTTEVSFSNSGNLYTSGQCTWYVYDKTGGKIGSTWGNANSWATAAQAAGFTVNNTPEEGAIMQSSEGAFGHVAFVESVNNDGSITVSEMNYDGGPFAISTRTISASEYS

SEQ ID NO: 1683 - DNA, 1812 bp, Artificial Sequence
  Description of Artificial Sequence: synthetic nucleic acid sequence
atgagtgaaggtttacctttgagagaagaagttccggtaaaagaaacttgggatttgaaagatttatttacaagtgatcaagcattctatcaaacattggaacaagtagtacaaatgtctttagattttaatcatacatattatcagaaacttaataacatagaaacaatagaaaaggcattagatgaatatgaaaggatacttatagaaatagatcgtttatataattatccagaacttagattaagcgttgatacgtctaatgaagaagcacaaaaagttaacgcaaaacttaatacgacttctggaaaacttgctggtttattatcttttgttgattccgagattttggagttacccgatgagataataagcgaattgaggtctcaaacaaaataccctcattttattaaacaacttcaagatcgtaagccttatcaattatctgctgatgttgaaaaagtattagctacattaacaccaacattgagaagtccgtttgaattgtatggtactacaaagagtttggatattaattttgaatcgtttgattatgagggtgttacctatccattggattatgcaacatttgaaaatgaatatgaagatcatccatctcctgaatttagacgtaaaagttttagagcttttagtgatgcattacgacaatatcaacatacgacggccgcaacatataatatgcaagtccaacaagaaaagattgaagcggatttacgaggatatgattctgttattgattatctactacaagatcaagaagtaacaaaagatatgttcgatagacaaattgatgtcattatgagtgatttagccccagttatgcaaaagtatgcaaaaattattcaacgtgtacataacctggataaaatgcgatttgaggatttaaaaatttcaatagaccctaactttgaaccagaaatatcaattgaagaatcgaaaaaatacatttatggagcgctcaaagtacttggtgatgattatgtcaaaatgttagagtctgcctatgattaccgttggattgattttgctcagaataaaggaaaagatactggagcatattgtgcaagtccatacattacacattcatatgtatttatttcatggactgggaaaatggctgaaacattcgttcttgcgcatgaattaggacatgcaggtcattttacattagcgcagaatcatcaaaatttgttggaatctgaagcgtctatgtattttgtagaagcaccttccacaatgaatgaaatgttgatggcaaattacttatttaatagtagtaataatcctcgatttaaacgttgggttattggttcgattttatctcgaacttattatcataatatggttacccaccttttagaagcagcttatcaacgtgaagtgtatagccgagtcgacaatggagagtcattaactgccccactgctaaatgaaataatgttgaacacttataaagcatttttcggtgacactgttgaaatgacagatggggttgaattaacatggatgagacaaccacattattatatgggattgtactcatatacgtactctgctggattgacaattggtacagttgtatcacaatgtatcaagaaagaaggtcaacctgctgttgatcgctggttaaaaacgctacaagctggtggtagtcaatctccaattgaattggcgcaaatagctggcgttgatattacgactgacgcccctttaaaagagacaattaactatatttcaaatttagtagatgaattagaagtattaacatatcaaataaaagaaaattcataa

SEQ ID NO: 1684 - protein, 603 aa, Artificial Sequence
  Description of Artificial Sequence: synthetic amino acid sequence
MSEGLPLREEVPVKETWDLKDLFTSDQAFYQTLEQVVQMSLDFNHTYYQKLNNIETIEKALDEYERILIEIDRLYNYPELRLSVDTSNEEAQKVNAKLNTTSGKLAGLLSFVDSEILELPDEIISELRSQTKYPHFIKQLQDRKPYQLSADVEKVLATLTPTLRSPFELYGTTKSLDINFESFDYEGVTYPLDYATFENEYEDHPSPEFRRKSFRAFSDALRQYQHTTAATYNMQVQQEKIEADLRGYDSVIDYLLQDQEVTKDMFDRQIDVIMSDLAPVMQKYAKIIQRVHNLDKMRFEDLKISIDPNFEPEISIEESKKYIYGALKVLGDDYVKMLESAYDYRWIDFAQNKGKDTGAYCASPYITHSYVFISWTGKMAETFVLAHELGHAGHFTLAQNHQNLLESEASMYFVEAPSTMNEMLMANYLFNSSNNPRFKRWVIGSILSRTYYHNMVTHLLEAAYQREVYSRVDNGESLTAPLLNEIMLNTYKAFFGDTVEMTDGVELTWMRQPHYYMGLYSYTYSAGLTIGTVVSQCIKKEGQPAVDRWLKTLQAGGSQSPIELAQIAGVDITTDAPLKETINYISNLVDELEVLTYQIKENS

SEQ ID NO: 1685 - DNA, 753 bp, Artificial Sequence
  Description of Artificial Sequence: synthetic nucleic acid sequence
gtgccattatctaaattctttttatctggtacttggaacccaactggttcatcaccagaatttggaatttgggcactcatcatcggcacattgaaaattactgttattgctacaatcgtagcagttccgattggtttaggagcagctatctaccttaatgaatatgcatctgatcgttcacgtagaatcattaaaccaatattagaaattttggctgggattcctacaattgtatttggcttctttgctttgacatttgttacacctatattgagaaatctaattcctaacttgggagagtttaattcaatcagtcccggtattgttgtgggtataatgattgtccctatgattacaagtatgagtgaagatgcaatgtcatctgtacctgataaaattcgtgaaggtgcatttggattaggcgcaactaaatttgaagtcgctacaaaagttgtattaccagctgcgacttctggcgttgttgcttcaattgtattaggtatatcaagagcaataggtgaaacaatgatcgtttctttagctgctggtagttcaccaacatcatctctaagtttaactagttcaattcaaacgatgacaggatatattgttgaaattgctacaggtgatgcagcatttggttctgatatttactacagtatttacgctgtaggttttacacttttcattttcactttaattatgaatttattatcacaatggatctctaaacgattcagagaggagtattaa

SEQ ID NO: 1686 - protein, 250 aa, Artificial Sequence
  Description of Artificial Sequence: synthetic amino acid sequence
VPLSKFFLSGTWNPTGSSPEFGIWALIIGTLKITVIATIVAVPIGLGAAIYLNEYASDRSRRIIKPILEILAGIPTIVFGFFALTFVTPILRNLIPNLGEFNSISPGIVVGIMIVPMITSMSEDAMSSVPDKIREGAFGLGATKFEVATKVVLPAATSGVVASIVLGISRAIGETMIVSLAAGSSPTSSLSLTSSIQTMTGYIVEIATGDAAFGSDIYYSIYAVGFTLFIFTLIMNLLSQWISKRFREEY

SEQ ID NO: 1687 - DNA, 885 bp, Artificial Sequence
  Description of Artificial Sequence: synthetic nucleic acid sequence
atgtctacacattcaaatactgctaacaaaacattgattgataaagatgccgtagaaaaaaaaatttcttctcgtgataggaaaaactcggtaaacaaatggttatttttattatgtacattaattgggctcattgttttagtagcactattaattcaaactttcgttaaaggggcgggacatctaactcccgaatttttcactaatttttcatcttcaacaccagcagatgctggtattaaaggggctttagtaggttctatttggttaatcttaagtattattccaattagtatcattttaggaataggtacagcaatttatttagaagaatacgcaagagacaatatttttacacaaatcgtaaaggtgagtatatctaatttagctggtgttccttcaattgttttcggtttactaggttatacattatttgtaggcgcggcaggtttaggtaatagcgtgctagccgctgcgcttacaatgtcactactaatcttgcctgttattatcgttgctagtcaggaagctatcagagcagttcctagttcagtcagagaagcatcatatggtcttggtgctaataaatggcaaacaattagaagagttgttttacctgcagcattacctggtattttaacaggtttcattttatctttatcacgcgcattaggagaaacagcaccacttgtaatgataggtatacctacgatacttttagcaacaccaagtggattactcgaccaatttctctgcgttaccaactcaaatttatacatgggcaaaaatgcctcaagcagaattccaaaacgttgcatcagcaggtattatcgttctactcgttatcttattattgatgaacactgtagcgatacttcttcgtaa

SEQ ID NO: 1688 - protein, 294 aa, Artificial Sequence
  Description of Artificial Sequence: synthetic amino acid sequence
MSTHSNTANKTLIDKDAVEKKISSRDRKNSVNKWLFLLCTLIGLIVLVALLIQTFVKGAGHLTPEFFTNFSSSTPADAGIKGALVGSIWLILSIIPISIILGIGTAIYLEEYARDNIFTQIVKVSISNLAGVPSIVFGLLGYTLFVGAAGLGNSVLAAALTMSLLILPVIIVASQEAIRAVPSSVREASYGLGANKWQTIRRVVLPAALPGILTGFILSLSRALGETAPLVMIGIPTILLATPSGLLDQFLCVTNSNLYMGKNASSRIPKRCISRYYRSTRYLIIDEHCSDTSS

SEQ ID NO: 1689 - DNA, 876 bp, Artificial Sequence
  Description of Artificial Sequence: synthetic nucleic acid sequence
atggctaattcacaagtagcagaaaaagagaaactagacgcacaaacaaataatcaagactcagttgccacaatagtaactactgaaaacaataagaaaaatacaattccagacagtgaaaagaagattgtttattcaactcaaaatctagatttatggtatggagaaaatcatgcgttacaaaacattaatttagatatattggaaaataatgtaactgcaataatcggaccttctggatgtggtaaatctacatacatcaaagctttaaatagaatggtcgaattagttccatctgtgaaaactgcaggtaaaattttgtatcgtgaccaaaatatatttgatgcaaagtattctaaagaaaagctacgtactaacgttggaatggtctttcaacaacctaacccattccctaagtcaatttatgataatattacttatggccctaagactcacggtattaaaaacaaaaaaattctagatgaaatcgtagaaaaatcattacgtggcgctgcaatatgggatgaattaaaagatagattgcatacaaatgcttatggattatcaggtggacaacaacaacgtgtttgtatagctagatgtttagcaattgaaccagatgtcattttaatggatgaacctacatcagcattagatcctatttctacgttaagagttgaagaacttgtacaagaattaaaagaaaattactcaattatcatggttacgcacaacatgcaacaagctgcgcgtgtttcagataaaactgctttcttcttaaatggatatgtcaatgaatatgatgatactgataaaatcttttcaaatcctgccgacaaacaaactgaagattatatatctggtcgttttggataa

SEQ ID NO: 1690 - protein, 291 aa, Artificial Sequence
  Description of Artificial Sequence: synthetic amino acid sequence
MANSQVAEKEKLDAQTNNQDSVATIVTTENNKKNTIPDSEKKIVYSTQNLDLWYGENHALQNINLDILENNVTAIIGPSGCGKSTYIKALNRMVELVPSVKTAGKILYRDQNIFDAKYSKEKLRTNVGMVFQQPNPFPKSIYDNITYGPKTHGIKNKKILDEIVEKSLRGAAIWDELKDRLHTNAYGLSGGQQQRVCIARCLAIEPDVILMDEPTSALDPISTLRVEELVQELKENYSIIMVTHNMQQAARVSDKTAFFLNGYVNEYDDTDKIFSNPADKQTEDYISGRFG

SEQ ID NO: 1691 - DNA, 321 bp, Artificial Sequence
  Description of Artificial Sequence: synthetic nucleic acid sequence
atgccaaactatttgtggattaccattcttggtatgattttattaactgtattttacacacttgtattaaataaatggttccagtctgcaatcattacttttgtagttttagcagtacttgccttttttataccaaattttcaaaacatttcatatcaaccactgcttggatatgcaggattcttaggcataatgagcttaatcataagctttcttatttggtatttttctagaaactggagaaaaaatcgtagaaaaataaaattggaaaaagagattcgcaaatatgatgatgaagagtcacttcgtcgtcataaataa

SEQ ID NO: 1692 - protein, 106 aa, Artificial Sequence
  Description of Artificial Sequence: synthetic amino acid sequence
MPNYLWITILGMILLTVFYTLVLNKWFQSAIITFVVLAVLAFFIPNFQNISYQPLLGYAGFLGIMSLIISFLIWYFSRNWRKNRRKIKLEKEIRKYDDEESLRRHK

SEQ ID NO: 1693 - DNA, 1020 bp, Artificial Sequence
  Description of Artificial Sequence: synthetic nucleic acid sequence
gtgaaaggatgccaacatatgtttaaaatgataatttataaactttcacaaatgattgtcgtactatttatattaactacaatcacatttatattaatgaaactctctccaggtaatcctgtagacaaaattttacatcttgatatttcgcatgtatctaatgagcaaatagaaacgacagagaataagcttggcttaaataatcctatttttattcaatggtgggactggttaaatcaattgtttcattttgatttaggaacaagttatcaaacaagcgagcctgtaattagggaaatagcaaattatcttggtcctacacttattattacttttggtacgcttatagtgtcattagttatttctataccattagggattatagcagcggtttactaccataaaatttgggataggataatccgtgttatgacatcattatccgtaagcctaccatcattttttatcggtcttatcttattatatatatttagcttgaagttgaatattttaccaacttcagatgaggggcgtttcgtttcatatattttaccaataattaccatgagtattggaatgtgtgcttattatattcgatttattcgttctactttattagaacaatatcaaacacctatagttgaatcgtctcgtctcagaggtatgcccgaaagatatatactttttcaagatatccttaaacctacgatactaccaatcatacctctattaggattatccattggtagtttgataggtggaacagtagtcattgaaaatttatttgatattcctgggttaggctattttttagttgacagtataaagtcgagagattatccagtcattcaaggttgtgtattatttattggtttctttgtagtgattataaacacaattgcagatttactttcattacttatcgatcctaaacaacgttatgctattactcagaaagaaacatcaaagtttaaatggtttaattcacatagaaaagaaggtcgtaacgatgaagtttaa

SEQ ID NO: 1694 - protein, 339 aa, Artificial Sequence
  Description of Artificial Sequence: synthetic amino acid sequence
VKGCQHMFKMIIYKLSQMIVVLFILTTITFILMKLSPGNPVDKILHLDISHVSNEQIETTENKLGLNNPIFIQWWDWLNQLFHFDLGTSYQTSEPVIREIANYLGPTLIITFGTLIVSLVISIPLGIIAAVYYHKIWDRIIRVMTSLSVSLPSFFIGLILLYIFSLKLNILPTSDEGRFVSYILPIITMSIGMCAYYIRFIRSTLLEQYQTPIVESSRLRGMPERYILFQDILKPTILPIIPLLGLSIGSLIGGTVVIENLFDIPGLGYFLVDSIKSRDYPVIQGCVLFIGFFVVIINTIADLLSLLIDPKQRYAITQKETSKFKWFNSHRKEGRNDEV

SEQ ID NO: 1695 - DNA, 720 bp, Artificial Sequence
  Description of Artificial Sequence: synthetic nucleic acid sequence
atgagtatgaatcatttacttggcacagatgattacggacgtgatttattcagtcgtttagtcgtgggctctcgtgcaacattgtttgttacactacttactttacttttcactgtagtggttggagtacctttagggttacttgcaggctataaaaaaggttggattgatacgattatcatgcgaattattgatataggattaagcataccagaattcgttattatgattgccttagcaagtttttttcatcctagtctttggaatttagtaatagctattacaatcataaaatggatgaattatactcgcgtgacaagagggattgtcaataccgaaatgaatcaatcgtatatacagatggcacaattttttaatgtctcaactttgaatatcttatttaaacacttattaccaaaagttttaccatctatatttgttattatgatagttgattttggaaaaatcattttatacattagttcattatcatttttaggtttaggtgcacaaccaccatctccagagtggggggcaatgttacaagcagggcgtgaatttattacttcacatcctatcatgattatcgctccagcatctttgatatcaggtacaatattgatatttaatttaactggtgatgctgtaagagatcgtttattagaacaaagaggtgtaaaagttgaaacttttaacaataaaaaatctaaacatcaatga

SEQ ID NO: 1696 - protein, 239 aa, Artificial Sequence
  Description of Artificial Sequence: synthetic amino acid sequence
MSMNHLLGTDDYGRDLFSRLVVGSRATLFVTLLTLLFTVVVGVPLGLLAGYKKGWIDTIIMRIIDIGLSIPEFVIMIALASFFHPSLWNLVIAITIIKWMNYTRVTRGIVNTEMNQSYIQMAQFFNVSTLNILFKHLLPKVLPSIFVIMIVDFGKIILYISSLSFLGLGAQPPSPEWGAMLQAGREFITSHPIMIIAPASLISGTILIFNLTGDAVRDRLLEQRGVKVETFNNKKSKHQ

SEQ ID NO: 1697 - DNA, 600 bp, Artificial Sequence
  Description of Artificial Sequence: synthetic nucleic acid sequence
atgagtttcgatgaatttaaaatgcaaggtcaaaatacttctggtatcaagcaacttttaggtaaacatatcggctatatctctcaaaattatgctcaaagttttaatgaatatactcgtttggataaacaacttatagctatatatcgttatcattttaatgtttctaaggataatgcattgaaaaagataaaaaaagctttaacttgggttaacttaaatgatgaatcaatcattaataaatatagtttccaactttcaggaggacaattagagcgagttaatattgctagcgttttaatgttagatccagaattaattattgcagatgaacctgttgcatctttagatgtagtgaacggtcatcaaataatgcaactccttcaacacattgttaaagatcatcataatactgtattacttatcactcataacatgaatcatgtcctcaaatatgctgattattttaatgtaatgagaaatggcatgatgattgaatctggagaaatagacaaattatttaatcaccatcatcttcatcggtatacagaacaattattaaactatagaagcaagctgcaaaaggaggacaacatctaa

SEQ ID NO: 1698 - protein, 199 aa, Artificial Sequence
  Description of Artificial Sequence: synthetic amino acid sequence
MSFDEFKMQGQNTSGIKQLLGKHIGYISQNYAQSFNEYTRLDKQLIAIYRYHFNVSKDNALKKIKKALTWVNLNDESIINKYSFQLSGGQLERVNIASVLMLDPELIIADEPVASLDVVNGHQIMQLLQHIVKDHHNTVLLITHNMNHVLKYADYFNVMRNGMMIESGEIDKLFNHHHLHRYTEQLLNYRSKLQKEDNI

SEQ ID NO: 1699 - DNA, 699 bp, Artificial Sequence
  Description of Artificial Sequence: synthetic nucleic acid sequence
atgattcaatttgatcatgtagattattcatatcatcgaaaacagcctgttttaaaagatattaatataagtattcaacgtggtgaaaaaataggggttttaggggaaagcggtgctggaaaaagtactattggttctttaatattaggtcaattaaagccaacaaaaggaaaaataagtatcgattcaggaaaggttctacctatttttcaacatgcgacagaaagttttgatcgtcaattcacgattgaacagtctttgagagagccacttttattttatcgacaattaatacgacaaaatatcaaaaatatcattcttaactatttaattgaatttaatttgtctacagatctaataacaaagtttcctcaagaggtaagtggtgggcaactacaaagattaaatattatacgttctctcttagcacaaccagatatattggtttgtgatgaaataacttcgaacttagacgtcatggccgaacaaaatgtaatcaatattttacttaacgaaaaaaacattcaaaataaaacactaatcgtcatctcgcatgatttatctgttttacaaaggttaacgaataggataatagttatcaaagacggtcaaatagtagatgattttaaaagtaaagatttatttagccataaaagacatccatatacaaaactattaattcaaacgtatgaatattga

SEQ ID NO: 1700 - protein, 232 aa, Artificial Sequence
  Description of Artificial Sequence: synthetic amino acid sequence
MIQFDHVDYSYHRKQPVLKDINISIQRGEKIGVLGESGAGKSTIGSLILGQLKPTKGKISIDSGKVLPIFQHATESFDRQFTIEQSLREPLLFYRQLIRQNIKNIILNYLIEFNLSTDLITKFPQEVSGGQLQRLNIIRSLLAQPDILVCDEITSNLDVMAEQNVINILLNEKNIQNKTLIVISHDLSVLQRLTNRIIVIKDGQIVDDFKSKDLFSHKRHPYTKLLIQTYEY

SEQ ID NO: 1701 - DNA, 1047 bp, Artificial Sequence
  Description of Artificial Sequence: synthetic nucleic acid sequence
atggatcaagcaatagcgtttggagacgaacgacttactttacaagatgctttaaatgttacaggtagtgttgatgaagcggcattaaatgagttatttaatgacattgtaaaaagtgatgttaaagccgcatttaatagatatcatcattttatttcagaaggtaaagaagtcaacagactcattaatgatatgatttactttgttagagatacaattatgaataaaacgtctaacgaatccgttcattttgaatcacttattcatttcgacttagatatgttatacaggatgatagatatcatcaatgatacactagtatccattaggttcagtgtaaatcaaagtgttcattttgaagtgttgctagttaaacttgcagaaatgattaagacacagcctcaaactgtacaaaatgtagcaacagcatcggtagctaatgaaccagataatgagatgttattacaacgtttagaacaacttgaaaatgagcttaaaaccttaaaagaacaagggatcaaaactaataaagttagtcaacaacctaagaaaccaacacgtacgattcaacgatctaaaaatacgttttctatgcaacaaatagcgaaagtattagacaaagcaaacaaagatgatatcaaattgttgaagaaccattggcaagaagtgattgatcatgcaaaaagtaatgataaaaagtctttagtaagtttgctactgaattcagaaccagtagcagctagtgaagatcatgtgttagttaaatttgatgaagaaattcattgtgaaatagtaaataaagatgatgaaaagagaaacaatattgaaagtgtagtttgtaatatagttaataaaactgtcaaagtagttggagtgccggctgaccaatggctgagagtgagagcagagtacttacaaaatcgtaacaccaatgaaacacatcaaagcgaaaaacaaagcacacaacagtctcaacaaatagatattgctcaaaaagctaaagacttatttggtgaggaaactgtacacttagttgatgaagactga

SEQ ID NO: 1702 - protein, 348 aa, Artificial Sequence
  Description of Artificial Sequence: synthetic amino acid sequence
MDQAIAFGDERLTLQDALNVTGSVDEAALNELFNDIVKSDVKAAFNRYHHFISEGKEVNRLINDMIYFVRDTIMNKTSNESVHFESLIHFDLDMLYRMIDIINDTLVSIRFSVNQSVHFEVLLVKLAEMIKTQPQTVQNVATASVANEPDNEMLLQRLEQLENELKTLKEQGIKTNKVSQQPKKPTRTIQRSKNTFSMQQIAKVLDKANKDDIKLLKNHWQEVIDHAKSNDKKSLVSLLLNSEPVAASEDHVLVKFDEEIHCEIVNKDDEKRNNIESVVCNIVNKTVKVVGVPADQWLRVRAEYLQNRNTNETHQSEKQSTQQSQQIDIAQKAKDLFGEETVHLVDED

SEQ ID NO: 1703 - DNA, 597 bp, Artificial Sequence
  Description of Artificial Sequence: synthetic nucleic acid sequence
atgcattatccagaacctatatcaaagcttatcgatagttttatgaaactgccaggcattggaccaaagacggctcaacgtctggcttttcatactttagatatgaaagaagacgatgttgttaagtttgctaaagcactagttgatgttaaaagagaacttacctattgtagtgtttgtgggcatattacagaaaatgatccttgttatatatgtgaagataaacagcgagatcgttctgtcatatgtgtagttgaagatgacaaggatgtcatagcaatggaaaaaatgcgtgaatataaaggtttatatcacgtgcttcatggttcgatttcaccaatggatggtattgggcctgaagacatcaatatacctgcattagttgaacgcctcaaaaacgatgaggtgaaagagcttatattagctatgaatcctaacctagaaggcgagtctactgcaatgtatatatctaggttggttaaaccaattgggattaaagtcacaagactggcacaaggtttatctgtaggcggcgatttagaatatgctgatgaagtgactttatctaaagcaattgcaggtagaacggaaatgtaa

SEQ ID NO: 1704 - protein, 198 aa, Artificial Sequence
  Description of Artificial Sequence: synthetic amino acid sequence
MHYPEPISKLIDSFMKLPGIGPKTAQRLAFHTLDMKEDDVVKFAKALVDVKRELTYCSVCGHITENDPCYICEDKQRDRSVICVVEDDKDVIAMEKMREYKGLYHVLHGSISPMDGIGPEDINIPALVERLKNDEVKELILAMNPNLEGESTAMYISRLVKPIGIKVTRLAQGLSVGGDLEYADEVTLSKAIAGRTEM

SEQ ID NO: 1705 - DNA, 345 bp, Artificial Sequence; identical to SEQ ID NO: 765
  Description of Artificial Sequence: synthetic nucleic acid sequence

SEQ ID NO: 1706 - protein, 114 aa, Artificial Sequence; identical to SEQ ID NO: 256
  Description of Artificial Sequence: synthetic amino acid sequence

SEQ ID NO: 1707 - DNA, 312 bp, Artificial Sequence
  Description of Artificial Sequence: synthetic nucleic acid sequence
gtgttatacagaaaaatggttgctaaaataaaacttaaacgcctatacaaaccctattcacaaactttatttttgttgttcattttaaaatatttttactattttactataatccttgttttttattccaaatactttacatcatccttgggtaaagaaggattgattcttatcctcattaataataaatgtaattataaaagcctttccgtgaactcaataagtctgaattctaaaaagcgaaacagaaatcttatcatattcttctttgtttcaatccattaccgaaccccaacttgctttgtctgttga

SEQ ID NO: 1708 - protein, 103 aa, Artificial Sequence
  Description of Artificial Sequence: synthetic amino acid sequence
VLYRKMVAKIKLKRLYKPYSQTLFLLFILKYFYYFTIILVFYSKYFTSSLGKEGLILILINNKCNYKSLSVNSISLNSKKRNRNLIIFFFVSIHYRTPTCFVC

SEQ ID NO: 1709 - DNA, 441 bp, Artificial Sequence
  Description of Artificial Sequence: synthetic nucleic acid sequence
atgggtgaagttaaacatttacaaatcaattacaaaacagatgagcttttcgctgatttcagagaatttggtaacaagaacctatatatgattgaggagttaaagggacaaatgattgatgcaagttccgattctcctttttatggaatttttgttggtaataaattagttgcgagaatggcattacttgataaaggagaagtagaagaaacctatttccctaatagcaatgactatattcttctttggaaattagaagtattagatacgtaccaaagacgtggatatgctaagcaactattaaactttgctaaagaaaataaaaaaccaattaaagctattgctagaaataactcaaaagaattctttttaaaacagggttttaaagatgtagaaaccaaaaatcctgaggggcacgacatcttaatatggaatccataa

SEQ ID NO: 1710 - protein, 146 aa, Artificial Sequence
  Description of Artificial Sequence: synthetic amino acid sequence
MGEVKHLQINYKTDELFADFREFGNKNLYMIEELKGQMIDASSDSPFYGIFVGNKLVARMALLDKGEVEETYFPNSNDYILLWKLEVLDTYQRRGYAKQLLNFAKENKKPIKAIARNNSKEFFLKQGFKDVETKNPEGHDILIWNP

SEQ ID NO: 1711 - DNA, 1614 bp, Artificial Sequence
  Description of Artificial Sequence: synthetic nucleic acid sequence
atgaagtgtaatacgttaaagttaactgaacaggatcagttcattaataaaataaaaaatagtgaatctcaaattacatctttttatgaatatgatgcagcgaaaaaggaaagcttttatagaagattaaaaacacctaataatggaagggaatttcatttatcacgagtgattaaatcttacatgaatgaattaaagttaacacatcagcagctgaataacatagatgctttagctgatggtgcaaaagtagtgattggtggacaacaagctggtctttttgggggtccactgtatacgtttcataagattttctcaattataactttaagtcgtcaactttctgaggaatatgatactcctattgtacctgtgttttggattgcaggtgaggaccatgattttgaagaggtgaatcatacgtatgcattcaataataaagaaactaccttgaaaaaagtaaagtatcatacgatgacaccaccagatagtaatgtttcaagatatactcctgataagaacgaattaaaagcatcattaaatcacttttttaaagaaatgaaggaaactgtacatactcaagatgtttatcaaatgtgcgtcaatattattaatcaatttgattcatggattgatatttttaagggattgatacatgaagtgtttaaggattatgggattttacttattgatgctcaataccctgaattaagacagatggagaaaccgttgtttaaagagatattagaaaagaggaatcaagtcgatcaatcttttcgtgaaactcagatacgaacaactcaacaacaacttccatcaatgatacaaacagagacaaacacacatttatttatccatgaagacggaatgagacagcttttaaattttgatggcacttattttaaactgaataaaactgagaaacgttacacgaaacaaaatttattagatattatagaaagagagcctgaaagaatttctaataatgttgttactcgtccagttgtagaggaatggttgtttaacacagtagcatttatcggaggtccaagcgaaatcaaatattgggcagaattaaaaggtgtttttgatacgttaaatgtagaaatgcctattgttatgccaagattaagaatcacgtatttgtatgctagaactaaaaagttattaaaacaatataatttatcgatagagtctgtcattgctaatggagtagaacaggaacgtcaacgttttgttcgtgaaaaagcatcaaataattttataaatgaagtagaagaaatgaaaattcagcaacaagaactttataacaatttattcacctatgtggaaaataatcatgacaaccaacttcttttagaaaaaaataatcaaattcatctcaatcagtacgattatttaatcaaacggtacttactgaatattgaaagagaaaatgatataagtatgcgacagtttagagaaattagtgaaacactccatccaatgggtggtctacaagaaagagtttggaatccacttcaaattatgaatgattttgggatagatgtgttcagtccctccacctatccaccactttcttactcgtttgatcatttgattataaatccttga

SEQ ID NO: 1712 - protein, 537 aa, Artificial Sequence
  Description of Artificial Sequence: synthetic amino acid sequence
MKCNTLKLTEQDQFINKIKNSESQITSFYEYDAAKKESFYRRLKTPNNGREFHLSRVIKSYMNELKLTHQQLNNIDALADGAKVVIGGQQAGLFGGPLYTFHKIFSIITLSRQLSEEYDTPIVPVFWIAGEDHDFEEVNHTYAFNNKETTLKKVKYHTMTPPDSNVSRYTPDKNELKASLNHFFKEMKETVHTQDVYQMCVNIINQFDSWIDIFKGLIHEVFKDYGILLIDAQYPELRQMEKPLFKEILEKRNQVDQSFRETQIRTTQQQLPSMIQTETNTHLFIHEDGMRQLLNFDGTYFKLNKTEKRYTKQNLLDIIEREPERISNNVVTRPVVEEWLFNTVAFIGGPSEIKYWAELKGVFDTLNVEMPIVMPRLRITYLYARTKKLLKQYNLSIESVIANGVEQERQRFVREKASNNFINEVEEMKIQQQELYNNLFTYVENNHDNQLLLEKNNQIHLNQYDYLIKRYLLNIERENDISMRQFREISETLHPMGGLQERVWNPLQIMNDFGIDVFSPSTYPPLSYSFDHLIINP

SEQ ID NO: 1713 - DNA, 432 bp, Artificial Sequence
  Description of Artificial Sequence: synthetic nucleic acid sequence
atgttcatgggagaattcgatcatcaattggatacaaaaggacgtatgattataccgtccaaatttcgttatgatctaaatgaacgttttattatcacaagaggccttgataaatgtttatttggttacactctagaagagtggcagcaaattgaagagaagatgaaaaccttacctatgacaaaaaaagacgcgcgtaaatttatgcgtatgttcttctcaggtgctgtagaagtagaattagataaacaagggcgtattaatattccgcaaaatttaagaaaatatgccaatttaagtaaggaatgtacagtaattggtgtctcaaatcgtatagagatttgggacagagaaacttggaatgatttctatgatgaatctgaagaaagtttcgaagacattgctgaagatttaatagattttgatttttaa

SEQ ID NO: 1714 - protein, 143 aa, Artificial Sequence
  Description of Artificial Sequence: synthetic amino acid sequence
MFMGEFDHQLDTKGRMIIPSKFRYDLNERFIITRGLDKCLFGYTLEEWQQIEEKMKTLPMTKKDARKFMRMFFSGAVEVELDKQGRINIPQNLRKYANLSKECTVIGVSNRIEIWDRETWNDFYDESEESFEDIAEDLIDFDF

SEQ ID NO: 1715 - DNA, 915 bp, Artificial Sequence; identical to SEQ ID NO: 649
  Description of Artificial Sequence: synthetic nucleic acid sequence

SEQ ID NO: 1716 - protein, 304 aa, Artificial Sequence; identical to SEQ ID NO: 650
  Description of Artificial Sequence: synthetic amino acid sequence

SEQ ID NO: 1717 - DNA, 426 bp, Artificial Sequence
  Description of Artificial Sequence: synthetic nucleic acid sequence
atgactaatcaaaaccaaattgaacaacgattctataatattattgaaaatgctgatcaatattatctctacttatatgattggcgtgtgattgaaagtgaatctaatgagagcgactttaaagacgttgatatatggattaactttgaagatgaagcgttaatagatgaatatatttgtgtgattgctaaagttgatgatgaaggtggcaatattaatcatatgatttctcaaaacttacgtcacaaatatgtttggtctacaccgttcttgatgagagttgaggagaactttagaccatacatgcacattatggaacatgactttaaaaagggcccattgaaaatcagaatgaaatataatgcagtatatttagttgaaatatataaaaaagataaaataaataaaaggcgtagcacaacttaa

SEQ ID NO: 1718 - protein, 141 aa, Artificial Sequence
  Description of Artificial Sequence: synthetic amino acid sequence
MTNQNQIEQRFYNIIENADQYYLYLYDWRVIESESNESDFKDVDIWINFEDEALIDEYICVIAKVDDEGGNINHMISQNLRHKYVWSTPFLMRVEENFRPYMHIMEHDFKKGPLKIRMKYNAVYLVEIYKKDKINKRRSTT

SEQ ID NO: 1719 - DNA, 474 bp, Artificial Sequence
  Description of Artificial Sequence: synthetic nucleic acid sequence
atgactgctaatgattggatagaccggttggaattaatttcgcatcctgaaggcggatattttaaagaaacaatgagaggcgacggtaaaggaagagcgtcttttagcagtatttattttctattaacacagcgcgatatatcacattttcatagaatagatgcagatgaagtatggtattatcatgctggtcagacgttgaagattcatatgataacccctaaaggtgaatatcatactgttaaattaggtagagatatagattgtggtgagtgtttacaatattgtgtgccaaaagggacaatttttgcttctactttagatagtgcagagggatatagtctagttggatgtatgtgtcaacctggatttgaatacgagcattttgaacttttaacacaagaatatttgattcgtcaatatccacaatatgaaagcataataaaaagattagctatatctcaagaagattaa

SEQ ID NO: 1720 - protein, 157 aa, Artificial Sequence
  Description of Artificial Sequence: synthetic amino acid sequence
MTANDWIDRLELISHPEGGYFKETMRGDGKGRASFSSIYFLLTQRDISHFHRIDADEVWYYHAGQTLKIHMITPKGEYHTVKLGRDIDCGECLQYCVPKGTIFASTLDSAEGYSLVGCMCQPGFEYEHFELLTQEYLIRQYPQYESIIKRLAISQED

SEQ ID NO: 1721 - DNA, 600 bp, Artificial Sequence
  Description of Artificial Sequence: synthetic nucleic acid sequence
gtgactgtgaaagtaaaatatatagacaaacgtcactggcgtcgcctggtagagagagaatatacagaggttaaagttaataataatagatttaaaggtattataggcttggtcacgatgaaaaaggttcgtgagcctttagaggtgacggtagttggacaaaacataatagttgcagatgacaattataaatggttacagatactaccggataagaagcggtatagtatgactgtcatgtttgataataaagggaatccattagaatactactttgacattaatataaagaacattactcaaaaaggaaatgcacgtaccatcgatttatgtttagacgttctcgttctacctaatggtgagtatgaacttgtagatgaagatgatttaatgtacgcactacaaaataaacaaatttcaaagaagcaatatcatgaggcatatattatcgcccatcaattaatgattgaaatagaagataatttttcagaaatacaagataaggttatgcgttgttatcataaaatcaatcataaagcacagaaaatgaaacataaacgtccctataaagctaaaaagaaatcacaccgacgacattaa

SEQ ID NO: 1722 - protein, 199 aa, Artificial Sequence
  Description of Artificial Sequence: synthetic amino acid sequence
VTVKVKYIDKRHWRRLVEREYTEVKVNNNRFKGIIGLVTMKKVREPLEVTVVGQNIIVADDNYKWLQILPDKKRYSMTVMFDNKGNPLEYYFDINIKNITQKGNARTIDLCLDVLVLPNGEYELVDEDDLMYALQNKQISKKQYHEAYIIAHQLMIEIEDNFSEIQDKVMRCYHKINHKAQKMKHKRPYKAKKKSHRRH

SEQ ID NO: 1723 - DNA, 327 bp, Artificial Sequence
  Description of Artificial Sequence: synthetic nucleic acid sequence
gtgaaagatgatttaaacgatgattttgaagattctttagagtatttggagccattagatcatgatgcatatattgtgaggttaaactttactggtgaaaatacgactgagcctatcatatcttatatgacgacgacgcataacatagatgtgaatattcttgaagcagatattaagaatactaaaaacggttcgtttggatttttagttattcacataccacatataagtgaagaacatttcaagcaatttaaacataatcttcacacaaaagctaatctttttagtaggtatggctggggaaagagatttaacgaaaacacctga

SEQ ID NO: 1724 - protein, 108 aa, Artificial Sequence
  Description of Artificial Sequence: synthetic amino acid sequence
VKDDLNDDFEDSLEYLEPLDHDAYIVRLNFTGENTTEPIISYMTTTHNIDVNILEADIKNTKNGSFGFLVIHIPHISEEHFKQFKHNLHTKANLFSRYGWGKRFNENT

SEQ ID NO: 1725 - DNA, 315 bp, Artificial Sequence
  Description of Artificial Sequence: synthetic nucleic acid sequence
atggggagagtagcatgtcgagcagattatgttatttttactccagataatcctgctaacgatgatcctaaaatgttgacagctgaattagctaaaggtgcaacgcataacaattatatagagtttgatgaccgtgcagaaggtattagacacgcgattgatattgctgaaccaggtgatacagttgttttggcctcaaaaggtcgagagccttatcaaattatgcctggtcatgttaaagtcccacatcgcgatgacttaattggcttaaaagcagcatatcaaaaatttggtggtggacctcttgaggattaa

SEQ ID NO: 1726 - protein, 104 aa, Artificial Sequence
  Description of Artificial Sequence: synthetic amino acid sequence
MGRVACRADYVIFTPDNPANDDPKMLTAELAKGATHNNYIEFDDRAEGIRHAIDIAEPGDTVVLASKGREPYQIMPGHVKVPHRDDLIGLKAAYQKFGGGPLED

SEQ ID NO: 1727 - DNA, 1347 bp, Artificial Sequence
  Description of Artificial Sequence: synthetic nucleic acid sequence
atgcattttgttgcaattagcataaatcatcgaacagctgatgtaacattaagagagcaagttgcttttagagatgatgccttacgattagcacatgaagatttatatgaaactaaagcaattttagaaaatgtcattttatctacatgtaatcgtactgaagtatacgctattgttgatcaagttcatacaggacgttattatatacaaagatttttagcgcgctcttttggatttgaggtagatgatattaaagatatgtcggaagttaaagtgggggacgatgcagttgaacatttattgcgtgtcacttctggcttagattcaattgtgcttggtgaaacacaaattttaggacaaatgcgcgatgcatttttcttagcgcaaaatactggtacaactggaacgatttttaatcatttatttaaacaagcgattacttttgctaaaaaagcacacagtgaaacagacattgcagataatgctgtgagtgtttcttatgctgctgttgaattagctaaaaaggtatttggaaaattaaaaagtaaacatgctgtcgttattggagcaggggaaatgggtgaattatcactcttaaatcttttaggttctggaatttcaaatgtaacaattgttaatcggacattatctaaagctaaaattttagccgaaaaacacaatgtttcatatgattcactttcagcattaccatctttattagaaacaacggacatagtaattagttctacaagtgctgaagactatatcatcactaattctatggtgaaaacaatttcagaaactagaaaactggattcattagttctgattgatattgcggttccacgagacattgaaccagggattgatgcaattacaaatatttttaattatgatgttgatgatttgaaagatttggtagatgccaatttaagagaacgtcaattagctgctgaaactattgcaggacaaatacctgaggagattgattcacacaacgaatgggttaatatgcttggtgttgtacctgtaatcagagctttacgtgaaaaagctatgaatatccaagcagaaactatggaaagtattgatcgtaaattgccagatctctctgaaagagaacgtaaagtcatttcgaaacatacaaaaagtattatcaatcaaatgttaaaagatcctatcaaacaggctaaggaattaagtactgataaaaaaagtaatgaaaaattagagctatttcaaaacatatttgatattgaagccgaagatcctcgtgaaaaagcaaagttagaaaaagagagtagagcaaaggaaatcttagcgcatcgaatatttagttttgaataa

SEQ ID NO: 1728 - protein, 448 aa, Artificial Sequence
  Description of Artificial Sequence: synthetic amino acid sequence
MHFVAISINHRTADVTLREQVAFRDDALRLAHEDLYETKAILENVILSTCNRTEVYAIVDQVHTGRYYIQRFLARSFGFEVDDIKDMSEVKVGDDAVEHLLRVTSGLDSIVLGETQILGQMRDAFFLAQNTGTTGTIFNHLFKQAITFAKKAHSETDIADNAVSVSYAAVELAKKVFGKLKSKHAVVIGAGEMGELSLLNLLGSGISNVTIVNRTLSKAKILAEKHNVSYDSLSALPSLLETTDIVISSTSAEDYIITNSMVKTISETRKLDSLVLIDIAVPRDIEPGIDAITNIFNYDVDDLKDLVDANLRERQLAAETIAGQIPEEIDSHNEWVNMLGVVPVIRALREKAMNIQAETMESIDRKLPDLSERERKVISKHTKSIINQMLKDPIKQAKELSTDKKSNEKLELFQNIFDIEAEDPREKAKLEKESRAKEILAHRIFSFE

SEQ ID NO: 1729 - DNA, 624 bp, Artificial Sequence
  Description of Artificial Sequence: synthetic nucleic acid sequence
gtgccactaggttctatatttgacgtttttttctctttaacttggattattatatcaatttcgttgatattgaatttgattaaagtaatgaatttttctgtttttttccttaatttgattggatttatcctaatgagtttaaatacttttcagcctgaacattatcaaacgcaaattcaacaaattgcagtaattaatgaattattacttgttcatatagcacttgcagtattaagttatgcattttttgcaatcgcatttgtaaattcattactctacattattcaatatcgaaatttaaaggagaaaaatttcgatcaaaattactttagaattggtagtgttgctactttagaaaccatcgttttctattcaacacttgttgcatggattatccttatattaagtacgattttaggtgcacaatggggtatctttgcagtcggtaaacaaatatttatagatccaaaagtaatattttcaacaattattaatttattatatggtgtttatattttcattagaataaaaaaatggatatcacaaagaaatcttatctactttaacattatattattttgtttgtgtatgattaatttattctttttaactcattttagataa

SEQ ID NO: 1730 - protein, 207 aa, Artificial Sequence
  Description of Artificial Sequence: synthetic amino acid sequence
VPLGSIFDVFFSLTWIIISISLILNLIKVMNFSVFFLNLIGFILMSLNTFQPEHYQTQIQQIAVINELLLVHIALAVLSYAFFAIAFVNSLLYIIQYRNLKEKNFDQNYFRIGSVATLETIVFYSTLVAWIILILSTILGAQWGIFAVGKQIFIDPKVIFSTIINLLYGVYIFIRIKKWISQRNLIYFNIILFCLCMINLFFLTHFR

SEQ ID NO: 1731 - DNA, 927 bp, Artificial Sequence
  Description of Artificial Sequence: synthetic nucleic acid sequence
atgcgtaaattaattgttgggtcgcgaagaagtaaattagcgctaacacaaagtcaacaatttatagataaattaaaatttatcgatccgtctttggatattgaaataaaagaaattgtaactaaaggcgacaaaattgtagataaacaattatccaaagttggaggtaaaggactttttgttaaggaaatccaaaatgaattatttaataaagagatagatatggcgattcattctctaaaagatgtaccaagtatgattcctgacggtcttaccttaggatgtattcctgatagagaaattccttttgatgcctatatagcaaaaaatcatataccattacaagaattgtctgagggcagcattgtaggtacaagttctttacgtcgtggcgctcaaattttatcaaaatacccacatttaaaaattaagtggattcgtggaaacattgatactcgattaaaaaaattagagactgaagattatgatgctattatattagctgctgctggattaaaacgcatgggttggtcagataatattgttacgacttatcttgatcgagatatattactgccagctatagggcagggtgcacttggtattgagtgtaggagtgatgacaaagaacttttagatttactatctaaagtacacaatcatgatgtagcacaatgtgtgactgctgaacgtacttttctatcagaaatggatggcagttgtcaggttcctataggtggatatgcaacaattgctcaagataaccaaattgaatttacaggactgattatgtctccagatggtaaggaaagatatgagcatacagcattgggtactgatcctgtaaaattgggtatagaagtgagtcaagtacttaaaaaacaaggtgcttatgacataattaaaaaattaaacgaagcagaataa

SEQ ID NO: 1732 - protein, 308 aa, Artificial Sequence
  Description of Artificial Sequence: synthetic amino acid sequence
MRKLIVGSRRSKLALTQSQQFIDKLKFIDPSLDIEIKEIVTKGDKIVDKQLSKVGGKGLFVKEIQNELFNKEIDMAIHSLKDVPSMIPDGLTLGCIPDREIPFDAYIAKNHIPLQELSEGSIVGTSSLRRGAQILSKYPHLKIKWIRGNIDTRLKKLETEDYDAIILAAAGLKRMGWSDNIVTTYLDRDILLPAIGQGALGIECRSDDKELLDLLSKVHNHDVAQCVTAERTFLSEMDGSCQVPIGGYATIAQDNQIEFTGLIMSPDGKERYEHTALGTDPVKLGIEVSQVLKKQGAYDIIKKLNEAE

SEQ ID NO: 1733 - DNA, 681 bp, Artificial Sequence
  Description of Artificial Sequence: synthetic nucleic acid sequence
atgaaaccagttatagttatgacgcagacgaatgaagttcatagtcatttagttgatattatccataagccttttatccaactaaaacaacttcattttaatgaaaaattgcttgatcatagctacgactggcttattttttcgtctaaaaacgcagtaaaatacttttatccttatttaaaaaacgttaaagttaaaaaggtagctgttataggtgataagacagctcagtattgtaatgaattaggtattagtgtcgactttgtgccacgtgatttttctcaagaaggctttttggacgagtttaagattagcgaacaacatttattgttgccctcaagtgaaaaagcacgtcctaaattagttcaacaattgagcaaatataatgaagtcgttaaaattgatttatatagaccagtaccgaattttaaaaatataagtcaagttaagtctcttgttagaaaacatcaaatagacgcagtgactttttctagttcctctgcagttgaattttatttcaaagaggacaatgtgcctgaatttgatcattattttgctatcggtaagcaaactgctaggaccattttaaaattcaatacatctgtaaaagtggcaaataaacaaacattagattcacttattgataaaataatagaaagtagggaacaaaatgaaatttga

SEQ ID NO: 1734 - protein, 226 aa, Artificial Sequence
  Description of Artificial Sequence: synthetic amino acid sequence
MKPVIVMTQTNEVHSHLVDIIHKPFIQLKQLHFNEKLLDHSYDWLIFSSKNAVKYFYPYLKNVKVKKVAVIGDKTAQYCNELGISVDFVPRDFSQEGFLDEFKISEQHLLLPSSEKARPKLVQQLSKYNEVVKIDLYRPVPNFKNISQVKSLVRKHQIDAVTFSSSSAVEFYFKEDNVPEFDHYFAIGKQTARTILKFNTSVKVANKQTLDSLIDKIIESREQNEI

SEQ ID NO: 1735 - DNA, 933 bp, Artificial Sequence
  Description of Artificial Sequence: synthetic nucleic acid sequence
atgcgtgatttagtaagagaaactcatgttagaaaagaagatttaatatatccaatatttgtagttgagcaagatgatataaaaagtgaaattaaatcactaccaggcatataccaaattagtttaaatttattgcatgaagagattaaagaggcatatgatttaggtattagagcaatcatgttcttcggtgtgccaaatgacaaagacgacattggatctggtgcatatgatcataatggagttgttcaagaagcgacacgaatatctaagaatttatataaggatttacttattgttgcagatacttgtctttgtgaatacacagaccacggacactgtggcgttattgacgatcatacgcatgatgtagacaatgataaatcacttccattacttgtaaaaacagctatttctcaagttgaagctggagctgacatcattgctccaagtaatatgatggatggttttgttgctgaaattcgtgaaggccttgatcaagcgggatatcaaaatattcctatcatgagttatggtattaaatatgcatcaagctttttcggtccattcagagatgctgcagattcagcaccttcttttggggatagaaaaacctatcaaatggatcctgcaaaccgtttagaggcattaagagaattggaaagtgatcttaaagaaggttgcgatatgatgatagttaaaccatctttaagttatctagatattattagagatgtaaaaaataatacgaacgtgccagtcgtagcatacaacgttagtggagaatatagtatgacaaaagcagcagcgttaaatggttggatagatgaagagaaaattgttatggaacaaatgatatctatgaaacgtgcaggtgctgatttaataattacttattttgcaaaagatatctgtcgttatttagataaatag

SEQ ID NO: 1736 - protein, 310 aa, Artificial Sequence
  Description of Artificial Sequence: synthetic amino acid sequence
MRDLVRETHVRKEDLIYPIFVVEQDDIKSEIKSLPGIYQISLNLLHEEIKEAYDLGIRAIMFFGVPNDKDDIGSGAYDHNGVVQEATRISKNLYKDLLIVADTCLCEYTDHGHCGVIDDHTHDVDNDKSLPLLVKTAISQVEAGADIIAPSNMMDGFVAEIREGLDQAGYQNIPIMSYGIKYASSFFGPFRDAADSAPSFGDRKTYQMDPANRLEALRELESDLKEGCDMMIVKPSLSYLDIIRDVKNNTNVPVVAYNVSGEYSMTKAAALNGWIDEEKIVMEQMISMKRAGADLIITYFAKDICRYLDK

SEQ ID NO: 1737 - DNA, 535 bp, Artificial Sequence
  Description of Artificial Sequence: synthetic nucleic acid sequence
atggagcaagctgagaaattaatgcctggcggtgttaacagtcccgtaagagcatttaaatcagtagacacaccagctatttttatggatcatggtgaaggatctaaaatatatgatattgatggaaatgaatacattgattatgtgctaagttggggcccattaattctgggacataaaaatcaacaagttatatccaaattacatgaagcagtagataaaggtacaagcttcggcgcttcaacacttcaagaaaataaacttgctgaacttgtgattgaccgtgtaccttcaattgaaaaagtaagaatggtttcctcaggaactgaagctactttagacacacttcgtttagctaggggttatacaggacgtaataaaattataaaatttgaagggtgttatcatggacacagtgattctttattgattaaagcaggatcaggtgttgcaacactaggtttacctgattcaccaggcgtccctgaaggtattgctaaaaacactatcacggtgccatataatgatttatgcc

SEQ ID NO: 1738 - protein, 179 aa, Artificial Sequence
  Description of Artificial Sequence: synthetic amino acid sequence
  MOD_RES (179): variable amino acid
MEQAEKLMPGGVNSPVRAFKSVDTPAIFMDHGEGSKIYDIDGNEYIDYVLSWGPLILGHKNQQVISKLHEAVDKGTSFGASTLQENKLAELVIDRVPSIEKVRMVSSGTEATLDTLRLARGYTGRNKIIKFEGCYHGHSDSLLIKAGSGVATLGLPDSPGVPEGIAKNTITVPYNDLCX

SEQ ID NO: 1739 - DNA, 1347 bp, Artificial Sequence
  Description of Artificial Sequence: synthetic nucleic acid sequence
atgaaggcccgaaatattaaaaagaaagtacgttactatactgtaaaccatgattcaattatgagatttaaaaatgttaacgtgagtttctttaatacgacacatagcattcctgatagcttaggcgtatgtattcatacttcgtatggttctatagtttatactggagagtttaagtttgatcaaagtttgcatggacattatgctccagacttgaaacgaatggcagaaattggtgatgagggtgtgttcgcattaatcagtgattcaacagaagctgaaaagcctggatataacacgcctgaaaatattattgaacatcacatgtatgatgcttttgccaaggttaaaggtagacttattgtatcatgctatgcttcaaacttcgttcgtattcaacaagtgcttaacattgcaagtcaacttaatcgtaaagtgtcatttttaggtcgttcacttgaaagttcgtttaacatagcacgtaaaatgggatactttgatataccaaaagatttattaatacctattaacgaagtggaaaattatcctaaaaatgaagtgattattattgctacaggtatgcaaggtgaaccagtagaagcattaagtcaaatggctcgcaaaaagcataaaattatgaacatagaagaaggagattcaatattcctagcaattactgcttcagctaatatggaggttattattgcagatacattaaatgagttagtgcgtgctggagcacatataattccaaacaacaagaaaattcatgcgtcaagtcatggttgtatggaagaattgaaaatgatgttaaatattatgaaacctgaatattttgtacctgttcaaggtgaatttaaaatgcagattgcacatgccaaattagcagcagaaaccggtgtagcacctgagaaaattttcttagttgaaaaaggcgacgtgattagttataacggtaaagatatgattttaaatgaaaaagttcaatcaggtaatatacttattgatgggattggcgttggtgacgtaggtaatatcgtattaagagacagacatctattagccgaagacggtatttttattgcggttgtgacattagatcctaaaaatcgacgtattgctgcaggacctgaaattcaatcaagaggcttcgtctatgttagagaaagtgaagaacttttgaaagaggctgaagaaaaagtacgtaaaattgtagaggaaggtcttcaagaaaaacgaatagaatggtcagaaatcaagcaaaatatgagagatcaaatcagtaagttactatttgagagtacaaaacgccgtccaatgattattccagtcatatcggagatctaa

SEQ ID NO: 1740 - protein, 448 aa, Artificial Sequence
  Description of Artificial Sequence: synthetic amino acid sequence
MKARNIKKKVRYYTVNHDSIMRFKNVNVSFFNTTHSIPDSLGVCIHTSYGSIVYTGEFKFDQSLHGHYAPDLKRMAEIGDEGVFALISDSTEAEKPGYNTPENIIEHHMYDAFAKVKGRLIVSCYASNFVRIQQVLNIASQLNRKVSFLGRSLESSFNIARKMGYFDIPKDLLIPINEVENYPKNEVIIIATGMQGEPVEALSQMARKKHKIMNIEEGDSIFLAITASANMEVIIADTLNELVRAGAHIIPNNKKIHASSHGCMEELKMMLNIMKPEYFVPVQGEFKMQIAHAKLAAETGVAPEKIFLVEKGDVISYNGKDMILNEKVQSGNILIDGIGVGDVGNIVLRDRHLLAEDGIFIAVVTLDPKNRRIAAGPEIQSRGFVYVRESEELLKEAEEKVRKIVEEGLQEKRIEWSEIKQNMRDQISKLLFESTKRRPMIIPVISEI

SEQ ID NO: 1741 - DNA, 2238 bp, Artificial Sequence
  Description of Artificial Sequence: synthetic nucleic acid sequence
atgattgatagcttttttaattatctttttggtatgagtcgatatttaacttatattttagtacttattgcaacaatttttataacatactctaagcaaatacctagaactcgacgtagtatcggtgcaatagttttacaattagctttgttatttatagcgcaattgtattttcatttttcacataatatcacttctcaaagagagcctgtactgtcctttgtttataaagcttatgaacaaacacattttccaaattttgggggaggcttaataggtttttatttacttaaactatttatacctctcatatctattgtaggtgtaataataattactatcctattactagcttcgagtttcattttattacttaatttaagacatagagatgttacaaaaagtttattcgacaacctcaagtcatcaagtaatcatgcatctgagtcaataaaacaaaaaagagaacaaaataagattaaaaaagaagaaaaagcccaattaaaagaggcaaaaattgaacgaaaaaaacaaaaaaaatcacgtcagaataataatgtcattaaagatgttagtgattttccagagatttctcagtcagacgatattccaatatatggtcataatgagcaagaagataaaagaccaaatactgctaaccaacgtcaaaaacgtgttttggataatgaacaatttcaacaatcattaccaagtaccaaaaatcaatcaataaataataatcagccatctacaaccgctgaaaacaatcaacaacaaagtcaggctgaaggctcaatatctgaagctggtgaagaagccaatattgagtatacggtgccacctttatccttattaaaacagcctactaaacaaaaaactacttcaaaagctgaagtccaacgtaaaggtcaggttttagaatctacactaaaaaactttggagttaatgctaaagtaacacaaattaaaatcggtcctgcagttacgcaatatgaaattcaaccagcgcaaggtgttaaagtaagtaaaatagtcaatctccataatgacattgcattagctttggctgcgaaagatgtacgaatagaagcacctattccaggtcgctctgcggtaggaattgaggttcccaatgataaaatctcacttgtcactctaaaagaagttttagaagataagttcccatctaagtataaattagaagtcggcattggtagagatatttctggtgatccaatatcaattcaattaaatgaaatgcctcacttactcgttgctggttcaacaggaagcggtaaatcagtttgtattaatggtattataacgagtatattactcaacacaaaaccgcacgaagttaaacttatgttaatcgatcctaaaatggtagagttaaatgtttacaatggtattcctcatttacttataccggttgtaacaaacccacataaagcgtctcaagctttagaaaaaattgtttcagaaatggaacgtcgttatgatttgtttcaacattcatcgacacgaaatattgaaggatataaccaatatatacgcaaacagaatgaagaacttgatgaaaaacaacctgagttaccgtatatcgtcgtaatagtggatgaattggctgatttaatgatggttgcaggtaaagaagtagaaaatgctatccaacgtattactcaaatggctagagcagcgggtatacacttaattgtagctactcaaagaccttccgttgatgttattactggtattattaaaaataacattccatcaagaattgcgttcgctgtaagttctcaaactgactctagaacaataattggtgctggtggagctgaaaagctacttggtaaaggtgatatgctatatgttggtaacggagaatctactacaacccgaattcaaggtgcttttttaagtgatcaagaagtgcaagatgttgttaattatgttgtagagcaacagaaagcaaattatgttaaagaaatggaaccagatgcacctgtagataaatcagaaatgaagagtgaggatgctttatatgatgaagcttatttatttgtaatagaaaagcaaaaagctagtacttctttattacaacgacaatttagaatcggttataatcgagcttcaaggctcatggatgatttggaacgtaaccaagttattggtccacaaaaaggaagtaaacctagacaaatattagttgatttagaaaatgacgaggtgtaa

SEQ ID NO: 1742 - protein, 745 aa, Artificial Sequence
  Description of Artificial Sequence: synthetic amino acid sequence
MIDSFFNYLFGMSRYLTYILVLIATIFITYSKQIPRTRRSIGAIVLQLALLFIAQLYFHFSHNITSQREPVLSFVYKAYEQTHFPNFGGGLIGFYLLKLFIPLISIVGVIIITILLLASSFILLLNLRHRDVTKSLFDNLKSSSNHASESIKQKREQNKIKKEEKAQLKEAKIERKKQKKSRQNNNVIKDVSDFPEISQSDDIPIYGHNEQEDKRPNTANQRQKRVLDNEQFQQSLPSTKNQSINNNQPSTTAENNQQQSQAEGSISEAGEEANIEYTVPPLSLLKQPTKQKTTSKAEVQRKGQVLESTLKNFGVNAKVTQIKIGPAVTQYEIQPAQGVKVSKIVNLHNDIALALAAKDVRIEAPIPGRSAVGIEVPNDKISLVTLKEVLEDKFPSKYKLEVGIGRDISGDPISIQLNEMPHLLVAGSTGSGKSVCINGIITSILLNTKPHEVKLMLIDPKMVELNVYNGIPHLLIPVVTNPHKASQALEKIVSEMERRYDLFQHSSTRNIEGYNQYIRKQNEELDEKQPELPYIVVIVDELADLMMVAGKEVENAIQRITQMARAAGIHLIVATQRPSVDVITGIIKNNIPSRIAFAVSSQTDSRTIIGAGGAEKLLGKGDMLYVGNGESTTTRIQGAFLSDQEVQDVVNYVVEQQKANYVKEMEPDAPVDKSEMKSEDALYDEAYLFVIEKQKASTSLLQRQFRIGYNRASRLMDDLERNQVIGPQKGSKPRQILVDLENDEV

SEQ ID NO: 1743 - DNA, 714 bp, Artificial Sequence
  Description of Artificial Sequence: synthetic nucleic acid sequence
atgtcggaaatgagtgcaatctatagagtaaaacaatacattttaaatttaatcaaagatggtgaactaaccaatggaagtaaattacctagtaatttgtcaattgcgagagcattaaatgttaaaacagatgatgtttatgatggtatagatgagttgattactgaacaagtagtaacggataattttgaagaggggactagcgtaaaagtaaagccccctttctattacccgttaaataaaattattagtatagggactatgattaaagaagcgggttatgaagcaggaacagaatatctgaatcttgacgagcaacctgcaactattttagatgctgaacatttaggtatagaaacaaaagaacctataacaattattgagagactaaggactgctaatcataagcctgtcgtatattgtttagacaaaatagcaaaaacttatctaacttgtacagattatcaacagagtagtggttcaatgttagaagctattaaagcatctacaaatcatcaaatcatgcatgcagaaatggatttagaagcaattagttacgaaccccatatctctgaagtgcttaatgcttcacctcacgaagggcttatgttacttaaagtagtacattatgacgaaaagcatcaaccaattttgtattctttaaattatattaagagtagtttagttaaattcactattactaaaagtgaataa

SEQ ID NO: 1744 - protein, 237 aa, Artificial Sequence
  Description of Artificial Sequence: synthetic amino acid sequence
MSEMSAIYRVKQYILNLIKDGELTNGSKLPSNLSIARALNVKTDDVYDGIDELITEQVVTDNFEEGTSVKVKPPFYYPLNKIISIGTMIKEAGYEAGTEYLNLDEQPATILDAEHLGIETKEPITIIERLRTANHKPVVYCLDKIAKTYLTCTDYQQSSGSMLEAIKASTNHQIMHAEMDLEAISYEPHISEVLNASPHEGLMLLKVVHYDEKHQPILYSLNYIKSSLVKFTITKSE

SEQ ID NO: 1745 - DNA, 837 bp, Artificial Sequence
  Description of Artificial Sequence: synthetic nucleic acid sequence
atggaagataataaagcacagtattcatttcttcagttaatgaattatatgtttaaacaagaaccctatcgatatatagcgacaggtcaattagaacaaattccacaagtgacttctgaaagtctatacgatacatatctatccatggtacaaaatgatgattgtgccatatatgttgtaggaaatattaacaaagaggaagtaacgcaactaattctagataagtttgcaattaagcctttctatttagaaaataaagaaagtactgaaatcacaccttcttttgatcaaccgcaatatataattgaaaaagacgatgttgaccaagctaaattgaatttgggatatcgctttccatcttattatgggaaaagtaattactatgcatttatagtattaaatatgatgtttggaggagatccttcctcagtactatttaatgaagtcagagaaaagcaaagtttggcatactctatacattcacaaattgatggtaaaaacggatttttatttgttttaagtggtgtttctgctgagaaatatgagcaagcaaaagatactgtcatcaaagagtttgataagataaaaaatggagattttgattctaataaaattgaattagctaaaaaaatcattatttcccatagacacgaagcatcagatagacctaaaagtataattgaaatactacataatcaattattattaaaccgacagcaaactgatcaagattttataaatgcagttaatcaagtgacgaaaaaagatgttattaaattggcaaatgaagctgttctagatacaatttatgtactaacgaaaggagaccaacactga

SEQ ID NO: 1746 - protein, 278 aa, Artificial Sequence
  Description of Artificial Sequence: synthetic amino acid sequence
MEDNKAQYSFLQLMNYMFKQEPYRYIATGQLEQIPQVTSESLYDTYLSMVQNDDCAIYVVGNINKEEVTQLILDKFAIKPFYLENKESTEITPSFDQPQYIIEKDDVDQAKLNLGYRFPSYYGKSNYYAFIVLNMMFGGDPSSVLFNEVREKQSLAYSIHSQIDGKNGFLFVLSGVSAEKYEQAKDTVIKEFDKIKNGDFDSNKIELAKKIIISHRHEASDRPKSIIEILHNQLLLNRQQTDQDFINAVNQVTKKDVIKLANEAVLDTIYVLTKGDQH

SEQ ID NO: 1747 - DNA, 324 bp, Artificial Sequence
  Description of Artificial Sequence: synthetic nucleic acid sequence
atgtaccaggaacaaccaggatataaattaatgtttaatactttaagggctatgtattccaagcacccgatacgggtggatatcgctggtagtgttgaaagcatttatgaaataacaaaagatgatttatatctatgctatgagacattttatcatccctctaatatggtgttgtttgtggtaggcgatgttagtcctcaatcgataattaaacttgtagaaaagcatgaaaatcaaagaaataaaacttatcaaccacgtattgaacgtgcgcaaattgatgagcctagagagataaatcacggtttgtttctgagaaaatga

SEQ ID NO: 1748 - protein, 107 aa, Artificial Sequence
  Description of Artificial Sequence: synthetic amino acid sequence
MYQEQPGYKLMFNTLRAMYSKHPIRVDIAGSVESIYEITKDDLYLCYETFYHPSNMVLFVVGDVSPQSIIKLVEKHENQRNKTYQPRIERAQIDEPREINHGLFLRK

SEQ ID NO: 1749 - DNA, 510 bp, Artificial Sequence
  Description of Artificial Sequence: synthetic nucleic acid sequence
atgctaggttttaaaaatgaaccattagatgaaagtgcaactaaatttgttcaaagagatttggaaatgacatttttctacgaattggtttttggagaggaaacggagttttatcaacaacttttaaataaagatttaatagatgaaacattcggttatcaatttgtattggaaccgagctacagtttttcaattattactagtgcaacacaacagcctgatctatttaaacaattaataatggatgaattaagaaaatataaaggaaaccttaaagatcaagaagcatttgatttgttgaaaaagcaatttattggagaattcatatcaagtttaaattctccagaatatattgctaatcaatatgcaaaactctatttcgagggagtgagtgtatttgatatgcttgatatcgtagaaaatattacgttagagagtgtaaatgaaacttccgaattattcttgaactttgaccaacttgttgatagtcgtttggagatggaaaataga

SEQ ID NO: 1750 - protein, 170 aa, Artificial Sequence
  Description of Artificial Sequence: synthetic amino acid sequence
MLGFKNEPLDESATKFVQRDLEMTFFYELVFGEETEFYQQLLNKDLIDETFGYQFVLEPSYSFSIITSATQQPDLFKQLIMDELRKYKGNLKDQEAFDLLKKQFIGEFISSLNSPEYIANQYAKLYFEGVSVFDMLDIVENITLESVNETSELFLNFDQLVDSRLEMENR

SEQ ID NO: 1751 - DNA, 318 bp, Artificial Sequence
  Description of Artificial Sequence: synthetic nucleic acid sequence
atgaatattttgatgtttataaaaatgaatgatattgccataaacggacttatgttgctcatttctcacgcaattatgatattagaagctatctatttttatcctcgttttaaaatatctaaattggctggattgatgagtttcatatgggtgacgatcaatgacgtaatagattacatatacggacaatatccctactatgattttatcgccaaacatttaattgaagtaggggtattggcttatagtctcactatcatttcgtatattttatttttaaaattacaaaagtggttgaaagttaaaacatttgattaa

SEQ ID NO: 1752 - protein, 105 aa, Artificial Sequence
  Description of Artificial Sequence: synthetic amino acid sequence
MNILMFIKMNDIAINGLMLLISHAIMILEAIYFYPRFKISKLAGLMSFIWVTINDVIDYIYGQYPYYDFIAKHLIEVGVLAYSLTIISYILFLKLQKWLKVKTFD

SEQ ID NO: 1753 - DNA, 1071 bp, Artificial Sequence
  Description of Artificial Sequence: synthetic nucleic acid sequence
atggcagaacgtggccatgaagttcactttattacctcaaacataccctttagaatacgcaaacctttacctaacatgacgttccaccaagttgaagtcaatcaatatgccgtattccaatatccaccatacgatattacattaagtacaaaaatttctgacgttatacaagaatatgatttagacatattgcatatgcattatgctgtacctcacgctgtatgtggtatattagcgaaacaaatgtcaggtaaaaacgtcaaaattatgacaacactacatggcactgatataactgtgttaggttatgaccatactttacaaaacgcgataaaatttggcatagaacaaagtgatattgtaacaagtgttagccattctctagcacagcaaacttatgaaattatcaatactaaaaaggaaatcatccctatatataattttataagggaaaatgaattcccaactcggcataatgaagaattaaaagattgttatggtatttcacctgaagaaaaggtattgatacatgtttctaatttcagaaaagtaaaacgtattgatacagtgattgagacatttgcaaaagttcatgagagtataccatccaagttgatacttttaggagatggtccagaattaatcgatatgcgacataaagcacgagaacttgatgttgaaacacacgtactctttttaggcaaacaaaatgacgtaagcgcattctaccaactatctgatttagtactactcttaagtgagaaagaaagttttggattaactctcttagaagcaatgaaaacaggcgtcttacctatagggagtcatgcaggtggtattaaagaggtcatcagacatgaagaaactggatttatagtagatataggggatagtacacaagctgcaaaatatgctattaaacttttatcaaatccagagttatatcaaaaaatgcaatcacaaatgctgaaagatattgaagcaagatttagttcagatttaattactgaccaatatgaaaactattatcgaaagatgctagaacaaggtgagaacaacaatgagtcatga

SEQ ID NO: 1754 - protein, 356 aa, Artificial Sequence
  Description of Artificial Sequence: synthetic amino acid sequence
MAERGHEVHFITSNIPFRIRKPLPNMTFHQVEVNQYAVFQYPPYDITLSTKISDVIQEYDLDILHMHYAVPHAVCGILAKQMSGKNVKIMTTLHGTDITVLGYDHTLQNAIKFGIEQSDIVTSVSHSLAQQTYEIINTKKEIIPIYNFIRENEFPTRHNEELKDCYGISPEEKVLIHVSNFRKVKRIDTVIETFAKVHESIPSKLILLGDGPELIDMRHKARELDVETHVLFLGKQNDVSAFYQLSDLVLLLSEKESFGLTLLEAMKTGVLPIGSHAGGIKEVIRHEETGFIVDIGDSTQAAKYAIKLLSNPELYQKMQSQMLKDIEARFSSDLITDQYENYYRKMLEQGENNNES

SEQ ID NO: 1755 - DNA, 1017 bp, Artificial Sequence
  Description of Artificial Sequence: synthetic nucleic acid sequence
gtggggaaagaacacggtacgatcaacgtggtctttcaaaatgacaattatgaaattactacattcagatctgaagatgaatacatcgatcatcgtaggccaagtgaagtgtattttgtaagagacttatatcaagatgttcaacgtagagattttacaatgaatgctatagcaatggatttaaattaccggttgtatgattattttaatggtcaacaagatataaacaatcgagtaattcgtactgttggtgtaccaagtgaaaggttttcagaagacgcgcttcgtatcattagaggattacgttttcaatcacaacttaattttcaaattgattcagacacattacatgcaatgtcttctcagatttcagatatacaatatttatccgttgaacgtgtagtagtagagcttaaaaaacttatcatgggaaacaatgttaaacaaagttttgaagtcatgcaaaacatgaaagcatttaattatataccttttttcaaatcatttgagatgtctcatcttcatatagatgagcccatcacatttgaactttggattgcaatcttaatcgtccaacaaccaaaagatatacaattaagcaccttgaaaatcagcaatcaagaaaaagcaactatcaaaaaatgggttacactcatccaaacattgcctaagatacagtcaaagcaatctttaataacattagtatatgattacaatttaaatgatattgaaatcctattatcattacatcatttgcttaaacaaaatgggcttacaacagccaatcatttaatcattaatgaaataagtattcgcgaagcaaatgaaaaattacctatccattgcagaaaagaattggcaataaatggtaaagatatactcaatcatacgaataaaaattcaggaccatggctaaaagatacacttagagaaatagaaatcgcagtcatatcaaatcaaatagtcaacactaaagaagaaatattagaatgggtggatgcacatgtcaaaatatag

SEQ ID NO: 1756 - protein, 338 aa, Artificial Sequence
  Description of Artificial Sequence: synthetic amino acid sequence
VGKEHGTINVVFQNDNYEITTFRSEDEYIDHRRPSEVYFVRDLYQDVQRRDFTMNAIAMDLNYRLYDYFNGQQDINNRVIRTVGVPSERFSEDALRIIRGLRFQSQLNFQIDSDTLHAMSSQISDIQYLSVERVVVELKKLIMGNNVKQSFEVMQNMKAFNYIPFFKSFEMSHLHIDEPITFELWIAILIVQQPKDIQLSTLKISNQEKATIKKWVTLIQTLPKIQSKQSLITLVYDYNLNDIEILLSLHHLLKQNGLTTANHLIINEISIREANEKLPIHCRKELAINGKDILNHTNKNSGPWLKDTLREIEIAVISNQIVNTKEEILEWVDAHVKI

SEQ ID NO: 1757 - DNA, 942 bp, Artificial Sequence
  Description of Artificial Sequence: synthetic nucleic acid sequence
atgttgtatgaacatcaatcaaattacatatcagggcaatatattgccgatcaactcaatatttctagagcaggtgtcaaaaaagttattgacctattaaaagaagatggttgtgatatcaagtcaataaaccacaaaggccatcaactgaattcattacctgatcagtggtatagcggtattgtaaaacctattctcgatgaacttggcctttttaatcatctagaagtttatcacactgtagattcaacacaattaaaagcaaagagagcactcgttggaaataaagatacttttttaattttgagcgatgaacaaaccgaaggtagaggtagattcaatcgtaattgggaatcatctaaaggaaaaggcttatggatgtcactagtgctaagacctgacgtacctttttctatgatacctaaatttaatttatttattgctttaggtattagagatgctattcaacaattttcgaacgaacgtgtaacaattaaatggccaaatgatatatatattggtaataaaaaaatttgcggatttttaactgaaatggttgcaaattatgatgaaatagaagcaataatttgtggtataggtataaatatgaatcatgttgaaagtgattttgacgaggatattaaagataaagcaacaagtatacgcatgcattccgatagtataattaatagatatacttttttaactgcattattaactcaaattatacatcgctttgatcaatttttacatcaaacttttgagtcaattcgagaagaatatattcacgctacaaatatatggcatcgtcaacttaaattcactgaaaataatcatcaatttttgggggaagccatagatattgattcagatggattccttattgttaaagatgaaaaaggtcaattacatcgacttatgagtgcagatatagatttataa

SEQ ID NO: 1758 - protein, 313 aa, Artificial Sequence
  Description of Artificial Sequence: synthetic amino acid sequence
MLYEHQSNYISGQYIADQLNISRAGVKKVIDLLKEDGCDIKSINHKGHQLNSLPDQWYSGIVKPILDELGLFNHLEVYHTVDSTQLKAKRALVGNKDTFLILSDEQTEGRGRFNRNWESSKGKGLWMSLVLRPDVPFSMIPKFNLFIALGIRDAIQQFSNERVTIKWPNDIYIGNKKICGFLTEMVANYDEIEAIICGIGINMNHVESDFDEDIKDKATSIRMHSDSIINRYTFLTALLTQIIHRFDQFLHQTFESIREEYIHATNIWHRQLKFTENNHQFLGEAIDIDSDGFLIVKDEKGQLHRLMSADIDL

SEQ ID NO: 1759 - DNA, 1674 bp, Artificial Sequence
  Description of Artificial Sequence: synthetic nucleic acid sequence
atgatacgtaccgatttagaaattccaccgtttatccaagccttaacttctatagaagaagaaatgttagtacaggcaccttattttaatgaggtcgcagatgacatttatcaacttatcaaagactgtgtttttgttgcacataatatctcatttgatcttaattttataaaaaaagcttttgaaaaatgtaatattcaatttaaacctaaaagagtaatggatactttagaattgtttaaaatcgcattccctacagacaaaagctaccagttaagtgcattggctgaatctcatcatataccattaaataatgcacatagagcagatgaagatgcaacaacaactgctaaattgatgattaaagcttttgagaagttcgagcaattgcatttagatacacaaaaacaactgtactatttaagtaaaaatctcaagtatgatctttatcatattttgtttgaaatggttagaaattatcaaactaaaccgcctaacaaccaatttgaacaatttgaacaaattatttaccgtaaacaaattgatttaaaaaaaccggctgtcaattttgatggtaccttaaaagatttatataaaaatgtcactcaatcattaaatcttacatatcggccacaacagttatacctagccgaaattatacttgatcagttgatgcatagtgataaggcaatgattgaagctcctttgggtagtggaaagtctcttgcttacctgcttgcagcaacaatgtataatattgagaccggtcgtcatgtaatgatttcaacaaatacaaaattattacaaagtcagctattagagaaagacataccattactcaatgatgttttagattttaaaattaacgcgtcattaatcaaaagtaaaaatgattatatatctcttggtcttatcagccaaattcttaaagacgatacaaataattatgaagtaagtattcttaaaatgcagttacttatttggataactgaaacaaatactggggacatacaggaattaaatcttaaaggtggacaaaaaatgtatgttgaccaaaaaattgaaacatacgttccagttcgtcatgatatccattattataattatataaaaagaaatgctcaaaacatacaaattggtatcactaatcatgcgcacttaattcattcagacagtgaaaacactatatatcaactatttgatgattgcatcatcgatgaagcacatagattgcctgactatgcgctaaatcaagttactaatgatttaaattattcagatgttaaatatcaattaggacttattggcaaaaatgaaaatgaaaaactacttaaagcagtagacaaacttgagcaacaacgtattttagagaaactagatattgcacctatagacgtttttggactgaaaataaatatcaatgagttacatgatttaaatgagcaactattcactacaatttataatattattcaaacatcagacgtttatgatgatgacattcataagtatcattacgtttatgactttgaaacgggtgagattttaaaagatttacgtgcaatcatagataaattaaataaaacgatagaaatttttaacggaatgaatcacaaaacaatcaagtctgtacggaaacaattattatacttacatgacaaatttaaacttata

SEQ ID NO: 1760 - protein, 558 aa, Artificial Sequence
  Description of Artificial Sequence: synthetic amino acid sequence
MIRTDLEIPPFIQALTSIEEEMLVQAPYFNEVADDIYQLIKDCVFVAHNISFDLNFIKKAFEKCNIQFKPKRVMDTLELFKIAFPTDKSYQLSALAESHHIPLNNAHRADEDATTTAKLMIKAFEKFEQLHLDTQKQLYYLSKNLKYDLYHILFEMVRNYQTKPPNNQFEQFEQIIYRKQIDLKKPAVNFDGTLKDLYKNVTQSLNLTYRPQQLYLAEIILDQLMHSDKAMIEAPLGSGKSLAYLLAATMYNIETGRHVMISTNTKLLQSQLLEKDIPLLNDVLDFKINASLIKSKNDYISLGLISQILKDDTNNYEVSILKMQLLIWITETNTGDIQELNLKGGQKMYVDQKIETYVPVRHDIHYYNYIKRNAQNIQIGITNHAHLIHSDSENTIYQLFDDCIIDEAHRLPDYALNQVTNDLNYSDVKYQLGLIGKNENEKLLKAVDKLEQQRILEKLDIAPIDVFGLKININELHDLNEQLFTTIYNIIQTSDVYDDDIHKYHYVYDFETGEILKDLRAIIDKLNKTIEIFNGMNHKTIKSVRKQLLYLHDKFKLI

SEQ ID NO: 1761 - DNA, 312 bp, Artificial Sequence
  Description of Artificial Sequence: synthetic nucleic acid sequence
gtgtataatggtataaatgttatgtatataattatatggaggcattatatgaagagtatgaagcaaatcgctgatgaattaaacgtaacaaagatgactgtttataataatgctaagaaagcaaatgtgaaatttcaaaaaattgaaaatgtaaattatttatcttccgaagatgaagttatagtagctaatagaataaaaaaaaatcaaaataaaactgattacttcgataatgaaaaaaaggtagaaaccaaacccaacaatgataatcttgtaaaaatgaaacgattaaacatttatataaccaattag

SEQ ID NO: 1762 - protein, 103 aa, Artificial Sequence
  Description of Artificial Sequence: synthetic amino acid sequence
VYNGINVMYIIIWRHYMKSMKQIADELNVTKMTVYNNAKKANVKFQKIENVNYLSSEDEVIVANRIKKNQNKTDYFDNEKKVETKPNNDNLVKMKRLNIYITN

SEQ ID NO: 1763 - DNA, 519 bp, Artificial Sequence
  Description of Artificial Sequence: synthetic nucleic acid sequence
atgacgaaaagtgggaaacaacgcccatggagagaaaagaagatagataatgtaagttatgcagatatactggaaattttaaaaataaaaaaggcttttaatgtaaaacaatgtggtaacgtcttagagttcaagccgactgatgaaggttatttgaagttacataagacatggttttgtaagtcgaaactctgcccagtttgtaattggaggcgtgctatgaaaaatagttatcaagctcaaaaagtgattgaagaagttgttaaagaaaaaccaaaagcgcgttggttatttttaacactttcaacgaaaaatgcgatagatggggatactttagaacaaagtttgaaacatttaacgaaagcatttgataggttaagtagatataaaaaagtgaagcaaaatcttgttgggtttttgcgttcaacggaagtaacagttaataaaaatgatggtagttataatcaacaattcggaacctacacagtcgcaaaaaagtatgatagaagaattgattaa

SEQ ID NO: 1764 - protein, 172 aa, Artificial Sequence
  Description of Artificial Sequence: synthetic amino acid sequence
MTKSGKQRPWREKKIDNVSYADILEILKIKKAFNVKQCGNVLEFKPTDEGYLKLHKTWFCKSKLCPVCNWRRAMKNSYQAQKVIEEVVKEKPKARWLFLTLSTKNAIDGDTLEQSLKHLTKAFDRLSRYKKVKQNLVGFLRSTEVTVNKNDGSYNQQFGTYTVAKKYDRRID

SEQ ID NO: 1765 - DNA, 330 bp, Artificial Sequence
  Description of Artificial Sequence: synthetic nucleic acid sequence
atgttaaaagaagatatgaagttgccaaaatcttatatttttgaaattgcttccaactggaagaaaattggtatttcaaatgccaaacaagcatatgaatatgcattacaagttaatcaacctaaaaattacgaaacacattctaatgataaacgacagaacaatcgtggaagacaaaatcaatttttatccaaagaaaagacacctaaatggcttcaaaatagggacgatcaagaagaaaataaagaaataaatgatgacactctcgaagaagatcgacaagcatttcttgaaaagttaaatcaaaagtggaaggaggaagataactaa

SEQ ID NO: 1766 - protein, 109 aa, Artificial Sequence
  Description of Artificial Sequence: synthetic amino acid sequence
MLKEDMKLPKSYIFEIASNWKKIGISNAKQAYEYALQVNQPKNYETHSNDKRQNNRGRQNQFLSKEKTPKWLQNRDDQEENKEINDDTLEEDRQAFLEKLNQKWKEEDN

SEQ ID NO: 1767 - DNA, 900 bp, Artificial Sequence; identical to SEQ ID NO: 1191
  Description of Artificial Sequence: synthetic nucleic acid sequence

SEQ ID NO: 1768 - protein, 299 aa, Artificial Sequence; identical to SEQ ID NO: 1192
  Description of Artificial Sequence: synthetic amino acid sequence

SEQ ID NO: 1769 - DNA, 1938 bp, Artificial Sequence
  Description of Artificial Sequence: synthetic nucleic acid sequence
atgaatcaaattaatattcaatttccagatggtaatacaaaagaatttgataaagggactactacagaagacatcgctcaatcaattagtccaggattaagaaaaaaagcagttgcgggaaaattcaatggtcaacttgtagatttaacacgccctttagaacaagatggagctattgaaattattactcctgggagtgaagaagcgttagaagtacttcgtcattcaacagctcatttaatggcacaagcattaaaacgtttatacggagacgttaaatttggagttggacctgtaatagaaggcggattctattatgattttgatatggatgataaggtttcatcggatgattttgataaaattgagaaaacaatgaaacaaattgtgaacgaaaatcataaaattgtaagagaagtagttagtaaagaaaaagcaaaagacttcttcaaggatgacccttataaattagaacttattgatgcaattcctgaagatgagagtgtaacactttatactcaaggtgaatttactgatttatgtcgaggtgtacacgtaccttctacttctaaaattaaagagttcaaactattatctacagctggtgcttattggcgtggaaatagtgataataaaatgttacaacgaatttatggtacagcattctttgacaaaaaagatttgaaagcacatctaaaaatgttggaagaacgtcgtgagcgtgatcatcgtaaaattggtaaagatttagaattgtttacaaacaatcaactcgttggtgctggtttaccattatggttaccaaatggtgctacaatacgtagggaaatagaacgttatattgtcgataaagaagtaagtatgggatacgatcatgtttacacaccagtattagccaatgttgatttatataaaacatctggtcactgggatcattatcaagaagatatgttcccagcaatgaagttagatgaagacgaagcaatggtcttaagaccaatgaactgtccacatcatatgatgatttataaaaacaaacctcattcttatcgcgaattacctatacgtattgctgaattgggtactatgcatcgttacgaagcaagtggtgcagtatcaggtttacaacgtgttcgaggaatgacattgaatgattcccatattttcgttagacctgatcaaattaaagaagaatttaaacgtgtagttaatatgattcaagatgtgtacaaagattttggttttgaagattatcgcttcagattgagttatagagatcctgaagataagcataagtactttgatgatgatgaaatgtgggaaaaagctgaatccatgcttaaagaagcatcagatgaattaggtttaacttatgaagaagctattggtgaggcagcattctatggacctaagttagatgttcaagtaaaaacagctatgggaaaagaagaaactctatcaacagcacaacttgattttcttttaccagaacgttttgacttaacgtacattggtcaagatggagaacaacatcgtcctgtagttatacaccgtggtgtagtttctactatggaacgttttgttgcatttttaacagaagaaacaaaaggtgcatttccaacttggttggcgcctatgcaagttgaaattattcctgtaaatatagatttacattatgattatgcaagacttttacaagatgaactaaaatcgcaaggtgtccgcgttgaaattgatgaccgtaatgaaaaaatgggatataaaattcgtgaagctcaaatgaaaaaaataccttatcagattgttgtaggtgaccaagaagtagagaatcaagaagtaaatgtaagaaaatatggttctgaaaaacaagaatcagttgaaaaagatgaatttatttggaatgttattgatgaaatccgtttgaaaaagcatagataa

SEQ ID NO: 1770 - protein, 645 aa, Artificial Sequence
  Description of Artificial Sequence: synthetic amino acid sequence
MNQINIQFPDGNTKEFDKGTTTEDIAQSISPGLRKKAVAGKFNGQLVDLTRPLEQDGAIEIITPGSEEALEVLRHSTAHLMAQALKRLYGDVKFGVGPVIEGGFYYDFDMDDKVSSDDFDKIEKTMKQIVNENHKIVREVVSKEKAKDFFKDDPYKLELIDAIPEDESVTLYTQGEFTDLCRGVHVPSTSKIKEFKLLSTAGAYWRGNSDNKMLQRIYGTAFFDKKDLKAHLKMLEERRERDHRKIGKDLELFTNNQLVGAGLPLWLPNGATIRREIERYIVDKEVSMGYDHVYTPVLANVDLYKTSGHWDHYQEDMFPAMKLDEDEAMVLRPMNCPHHMMIYKNKPHSYRELPIRIAELGTMHRYEASGAVSGLQRVRGMTLNDSHIFVRPDQIKEEFKRVVNMIQDVYKDFGFEDYRFRLSYRDPEDKHKYFDDDEMWEKAESMLKEASDELGLTYEEAIGEAAFYGPKLDVQVKTAMGKEETLSTAQLDFLLPERFDLTYIGQDGEQHRPVVIHRGVVSTMERFVAFLTEETKGAFPTWLAPMQVEIIPVNIDLHYDYARLLQDELKSQGVRVEIDDRNEKMGYKIREAQMKKIPYQIVVGDQEVENQEVNVRKYGSEKQESVEKDEFIWNVIDEIRLKKHR

SEQ ID NO: 1771 - DNA, 423 bp, Artificial Sequence
  Description of Artificial Sequence: synthetic nucleic acid sequence
gtgttgtttatgtataaatcaattttattagcagccgatgggtcagaaaatagtttacgttcagcacaggaagttttgaactttatagatgaaaatactatagttactttaattacagttgtaaatgttgaagaatcgaaaacagatgttttacatggtaaacaaggacatagtttaacaaatgaaagagaagacaaattatccagtataactgaactatttgtagaacataatgtaaattatgaagtaaaaattgcacatggtcttcctgcagaaacagtggtttcagttgctaatagtggtaaatatcaagcaattgttttagggtctcgtggtctaaatagtttacaagaaatggtattgggtagcgtcagtcacaaagtggctaaacgttcaaaaattcccgttatcattgtaaaatag

SEQ ID NO: 1772 - protein, 140 aa, Artificial Sequence
  Description of Artificial Sequence: synthetic amino acid sequence
VLFMYKSILLAADGSENSLRSAQEVLNFIDENTIVTLITVVNVEESKTDVLHGKQGHSLTNEREDKLSSITELFVEHNVNYEVKIAHGLPAETVVSVANSGKYQAIVLGSRGLNSLQEMVLGSVSHKVAKRSKIPVIIVK

SEQ ID NO: 1773 - DNA, 432 bp, Artificial Sequence; identical to SEQ ID NO: 951
  Description of Artificial Sequence: synthetic nucleic acid sequence

SEQ ID NO: 1774 - protein, 143 aa, Artificial Sequence; identical to SEQ ID NO: 952
  Description of Artificial Sequence: synthetic amino acid sequence

SEQ ID NO: 1775 - DNA, 372 bp, Artificial Sequence
  Description of Artificial Sequence: synthetic nucleic acid sequence
gtgtatattcattataatcacttagatcctaagcatgcgaatgatgaaaccatggatctgttaaaattattacatttagatcaagttaaggatcatcatccttttgaaatatcaacaggtcaaaagcgtcgtttaagtgttgcaacagcattaagttcaaaggcagagattattttactagatgaaccaacattcggcctagatagtcataatacatttcaacttattaagttatttcaagaacgcgttaatcaaggtcaaacaattatcatggtgacacatgatccagaaattattaaacgatatccaacaagacgattacgcgtggaagatggatgtcttaaagaaatggaaggtgaacacattgtttga

SEQ ID NO: 1776 - protein, 123 aa, Artificial Sequence
  Description of Artificial Sequence: synthetic amino acid sequence
VYIHYNHLDPKHANDETMDLLKLLHLDQVKDHHPFEISTGQKRRLSVATALSSKAEIILLDEPTFGLDSHNTFQLIKLFQERVNQGQTIIMVTHDPEIIKRYPTRRLRVEDGCLKEMEGEHIV

SEQ ID NO: 1777 - DNA, 315 bp, Artificial Sequence
  Description of Artificial Sequence: synthetic nucleic acid sequence
atgatacgtctttccattcgactgagtttgacttcgcttcttttaaaagctaatgttaattcttttctaattatcgatctttctatatcgtttaatgccaaagtagcgttatattcaacaatgtattccttaccgacagcttcccattttatagatactgttatgataattccgagtaaagggacaatggacaagattaacatagtattcgttagacctactgcagcaagaatgattggaaagacaaaagtacctatgatactaccagtacgacttacagattctacaaagccagtagcttgtgaacgtaaatga

SEQ ID NO: 1778 - protein, 104 aa, Artificial Sequence
  Description of Artificial Sequence: synthetic amino acid sequence
MIRLSIRLSLTSLLLKANVNSFLIIDLSISFNAKVALYSTMYSLPTASHFIDTVMIIPSKGTMDKINIVFVRPTAARMIGKTKVPMILPVRLTDSTKPVACERK

SEQ ID NO: 1779 - DNA, 3465 bp, Artificial Sequence
  Description of Artificial Sequence: synthetic nucleic acid sequence
atgaaaaagagaagacaaggaccaattaacaagagagtggattttctatccaacaaggtaaacaagtactcgattaggaagttcacagtaggtacagcttcaatactcgtgggtgctacgttaatgtttggtgccgcagacaatgaggctaaagcggctgaagacaatcaattagaatcagcttcaaaagaagaacagaaaggtagtcgtgataatgaaagctcaaaacttaatcaagtcgatttagacaacggatcacatagttctgagaaaacaacaaatgtaaacaatgcaactgaagtaaaaaaagttgaagcaccaacgacaagtgacgtatctaagcctaaagctaatgaagcagtagtgacgaacgagtcaactaaaccaaaaacaacagaagcaccaactgttaatgaggaatcaatagctgaaacacccaaaacctcaactacacaacaagattcgactgagaagaataatccatctttaaaagataatttaaattcatcctcaacgacatctaaagaaagtaaaacagacgaacattctactaagcaagctcaaatgtctactaataaatcaaatttagacacaaatgactctccaactcaaagtgagaaaacttcatcacaagcaaataacgacagtacagacaatcagtcagcaccttctaaacaattagattcaaaaccatcagaacaaaaagtatataaaacaaaatttaatgatgaacctactcaagatgttgaacacacgacaactaaattaaaaacaccttctatttcaacagatagttcagtcaatgataagcaagattacacacgaagtgctgtagctagtttaggtgttgattctaatgaaacagaagcaattacaaatgcagttagagataatttagatttaaaagctgcatctagagaacaaatcaatgaagcaatcattgctgaagcactaaaaaaagacttttctaaccctgattatggtgtcgatacgccattagctctgaacacatctcaatcaaaaaattcaccacataagagtgcaagtccacgcatgaatttaatgagtttagctgctgagcctaatagtggtaaaaatgtgaatgataaagttaaaatcacaaaccctacgctttcacttaataagagtaataatcacgctaataacgtaatatggccaacaagtaacgaacaatttaatttaaaagcaaattatgaattagatgacagcataaaagagggagatacttttactattaagtatggtcagtatattagaccgggtggtttagaacttcctgcaataaaaactcaactacgtagtaaggatggctctattgtagctaatggtgtatatgataaaactacaaatacgacgacttatacatttactaactatgttgatcaatatcaaaatattacaggtagttttgatttaattgcgacgcctaagagggaaacagcaattaaggataatcagaattatcctatggaagtgacgattgctaacgaagtagtcaaaaaagacttcattgtggattatggtaataaaaaggacaatacaactacagcagcggtagcaaatgtggataatgtaaataataaacataacgaagttgtttatctaaaccaaaataaccaaaatcctaaatatgctaaatatttctcaacagtaaaaaatggtaaatttataccaggtgaagtgaaagtttacgaagtgacggataccaatgcgatggtagatagcttcaatcctgatttaaatagttctaatgtaaaagatgtgacaagtcaatttacacctaaagtaagtgcagatggtactagagttgatatcaattttgctagaagtatggcaaatggtaaaaagtatattgtaactcaagcagtgagaccaacgggaactggaaatgtttataccgaatattggttaacaagagatggtactaccaatacaaatgatttttatcgtggaacgaagtctacaacggtgacttatctcaatggttcttcaacagcacagggggataatcctacatatagtctaggtgactatgtatggttagataaaaataaaaacggtgttcaagatgatgatgagaaaggtttagcaggtgtttatgttactcttaaagacagtaacaatagagaattacaacgtgtaactactgatcaatctggacattatcaatttgataatttacaaaatggaacgtacacagtcgagtttgcgattcctgataattatacgccatctcccgcaaataattctacaaatgatgcaatagattcagatggtgaacgtgatggtacacgtaaagtagttgttgccaaaggaacaattaataatgctgataatatgactgtagatactggcttttatttaactcctaaatacaatgtcggagattatgtatgggaagatacaaataaagatggtatccaagatgacaatgaaaagggaatttcaaatgtcaaagtgacgttaaaaaataaaaatggagataccattgggacaacgacaacagattcaaatggtaaatatgaattcacaggtttagagaacggggattacacaatagaatttgagacgccggaaggctacacaccgactaaacaaaactcgggaagtgacgaaggtaaagattcaaatggtacgaaaacaacagtcacagtcaaagatgcagataataaaacaatagactcaggtttctacaagccaatatataacttaggtgactatgtatgggaagatacaaataaagatggtattcaagacgacagtgaaaaagggatttctggtgttaaagtgacgttaaaagataaaaatggaaatgccattgggacaacgacaacagacgcaagtggtcattatcaatttaaaggattagaaaatggaagctacacagttgagtttgagacaccatcaggttatacaccgacaaaagcgaattcaggtcaagatataactgtagattccaacggtataacaacaacaggtatcattaacggagctgataatctcacaattgatagtggtttctacaaaacaccaaaatatagtgtcggagattatgtatgggaagatacaaataaagatggtatccaagatgacaatgaaaaaggaatttctggtgttaaagtaacgttaaaggatgaaaaaggaaatataattagcactacaacaactgatgaaaatgggaagtatcaatttgataatttagatagtggtaattacattattcattttgagaaaccggaaggcatgactcaaactacagcaaattctggaaatgatgatgaaaaagatgctgatggggaagatgttcgtgtaacgattactgatcatgatgactttagtatagataatggttattttgacgatgattcagacagtgactcagacgcagatagtgattcagactccgacagtgactcggacgcagacagcgattctgacgcagac

SEQ ID NO: 1780 - protein, 1155 aa, Artificial Sequence
  Description of Artificial Sequence: synthetic amino acid sequence
MKKRRQGPINKRVDFLSNKVNKYSIRKFTVGTASILVGATLMFGAADNEAKAAEDNQLESASKEEQKGSRDNESSKLNQVDLDNGSHSSEKTTNVNNATEVKKVEAPTTSDVSKPKANEAVVTNESTKPKTTEAPTVNEESIAETPKTSTTQQDSTEKNNPSLKDNLNSSSTTSKESKTDEHSTKQAQMSTNKSNLDTNDSPTQSEKTSSQANNDSTDNQSAPSKQLDSKPSEQKVYKTKFNDEPTQDVEHTTTKLKTPSISTDSSVNDKQDYTRSAVASLGVDSNETEAITNAVRDNLDLKAASREQINEAIIAEALKKDFSNPDYGVDTPLALNTSQSKNSPHKSASPRMNLMSLAAEPNSGKNVNDKVKITNPTLSLNKSNNHANNVIWPTSNEQFNLKANYELDDSIKEGDTFTIKYGQYIRPGGLELPAIKTQLRSKDGSIVANGVYDKTTNTTTYTFTNYVDQYQNITGSFDLIATPKRETAIKDNQNYPMEVTIANEVVKKDFIVDYGNKKDNTTTAAVANVDNVNNKHNEVVYLNQNNQNPKYAKYFSTVKNGKFIPGEVKVYEVTDTNAMVDSFNPDLNSSNVKDVTSQFTPKVSADGTRVDINFARSMANGKKYIVTQAVRPTGTGNVYTEYWLTRDGTTNTNDFYRGTKSTTVTYLNGSSTAQGDNPTYSLGDYVWLDKNKNGVQDDDEKGLAGVYVTLKDSNNRELQRVTTDQSGHYQFDNLQNGTYTVEFAIPDNYTPSPANNSTNDAIDSDGERDGTRKVVVAKGTINNADNMTVDTGFYLTPKYNVGDYVWEDTNKDGIQDDNEKGISNVKVTLKNKNGDTIGTTTTDSNGKYEFTGLENGDYTIEFETPEGYTPTKQNSGSDEGKDSNGTKTTVTVKDADNKTIDSGFYKPIYNLGDYVWEDTNKDGIQDDSEKGISGVKVTLKDKNGNAIGTTTTDASGHYQFKGLENGSYTVEFETPSGYTPTKANSGQDITVDSNGITTTGIINGADNLTIDSGFYKTPKYSVGDYVWEDTNKDGIQDDNEKGISGVKVTLKDEKGNIISTTTTDENGKYQFDNLDSGNYIIHFEKPEGMTQTTANSGNDDEKDADGEDVRVTITDHDDFSIDNGYFDDDSDSDSDADSDSDSDSDSDADSDSDAD

SEQ ID NO: 1781 - DNA, 450 bp, Artificial Sequence
  Description of Artificial Sequence: synthetic nucleic acid sequence
atgaatatgactgaacaaatttttagagttgtcataccagaagaggaagaaactcaagttaaggatgggaaagctaaaaagattgtgaagaaaacatttcctggatatgtattagttgagttaatcatgacagatgagtcgtggtatgtagttagaaatactcctggagtaacaggatttgtcggatctgcaggtgcaggatcaaaacctaaccctctacttcctgaagaagtacgcttcattcttaagcaaatgggtcttaaagagaaaacaatagatgttgaactcgatgttggggaacaagttcgtatccaatcaggtccttttgctaatcaaattggagaagtacaagagattgaagcggataaattcaagcttactgtacttgttgatatgtttggtcgtgaaacacctgtagaagttgaatttgaccaaattgaaaaattataa

SEQ ID NO: 1782 - protein, 149 aa, Artificial Sequence
  Description of Artificial Sequence: synthetic amino acid sequence
MNMTEQIFRVVIPEEEETQVKDGKAKKIVKKTFPGYVLVELIMTDESWYVVRNTPGVTGFVGSAGAGSKPNPLLPEEVRFILKQMGLKEKTIDVELDVGEQVRIQSGPFANQIGEVQEIEADKFKLTVLVDMFGRETPVEVEFDQIEKL

SEQ ID NO: 1783 - DNA, 612 bp, Artificial Sequence
  Description of Artificial Sequence: synthetic nucleic acid sequence
atgagagtaaaaaaattgataagtcatcttactgtatctagaataacaagtacaagaaacgtaattattgtaataaagagagaaggggttataataatgacaaaatttaactttgatcaagttcacagtgatattcagtttaaaattaaacatcttatggtgtcccaagtaaaaggaacatttaagcaattcgatgttcaattagatggagatattaatgatttaacttcactaaaagcaacagctactattattccaagttcaattgacactcaaaatgaggacagagacaaccatttaagatcaaacgatttctttggtacagaagacaacgataaaatgacatttgtaactaaagaaattaacgaaaatcaagtagttggagatttgacaattaaaggtgaaactcatgaagagacatttgatgttgaatttaatggtgtaagtaaaaatccaatgaatggacaacaagtcactggttttatcgttagtggaacaattaaccgcgaaaaatatggtattaattttaaccaagctttagaaactggtggcgtgatgttaggtaaaaacgtaaaatttgaagcatcagcagaatttagcatcgacaattaa

SEQ ID NO: 1784 - protein, 203 aa, Artificial Sequence
  Description of Artificial Sequence: synthetic amino acid sequence
MRVKKLISHLTVSRITSTRNVIIVIKREGVIIMTKFNFDQVHSDIQFKIKHLMVSQVKGTFKQFDVQLDGDINDLTSLKATATIIPSSIDTQNEDRDNHLRSNDFFGTEDNDKMTFVTKEINENQVVGDLTIKGETHEETFDVEFNGVSKNPMNGQQVTGFIVSGTINREKYGINFNQALETGGVMLGKNVKFEASAEFSIDN

SEQ ID NO: 1785 - DNA, 963 bp, Artificial Sequence
  Description of Artificial Sequence: synthetic nucleic acid sequence
atggattatagagtactactttattataaatatgtaactatagatgaccctgaaacttttgcagccgaacatttgaaattttgtaaggaacatcatttaaaaggaagaatactagtttcaacggaaggcattaatggaacattatctggaacaaaagaagatactgataaatatatagagcatatgcatgcagatagtcgttttgctgatttaacttttaaaattgatgaagctgaaagtcatgcgtttaaaaagatgcacgtgcgtccaagacgtgaaattgttgcacttgacttagaagaagatattaatccacgtgaaattaccggtaaatactattctcctaaagaatttaaagccgcactagaagatgaaaatactgttatattagatgctcgaaatgattatgaatacgatttaggacatttccgtggagctattcgtcctgatataacacgattccgtgacttacctgaatgggtgcgtaataataaagaacaactcgacggaaaaaatattgtcacatattgtacaggtggcattcgttgtgaaaaattttctggttggttagtaaaagaaggatttgaaaacgtaggtcagttgcatggtggtattgctacatacggtaaagaccctgaaactaaagggctatattgggatggtaagatgtatgtatttgatgaacgtattagtgtcgatgtgaatcaaattgataaaacagtcatcggcaaagagcattttgatggtacaccttgtgaacgttatattaattgtgcaaaccctgaatgtaataaacaaattcttgtttctgaagaaaatgaagaaaaatatttaggtgcatgttcgtatgattgtgcaaaacatgagcgcaatcgctacgttgcccgtcatcatattagcaatgaagaatggcaacgtcgtttaaataatttcaaagatgtgcctgaacacacacatgcataa

SEQ ID NO: 1786 - protein, 320 aa, Artificial Sequence
  Description of Artificial Sequence: synthetic amino acid sequence
MDYRVLLYYKYVTIDDPETFAAEHLKFCKEHHLKGRILVSTEGINGTLSGTKEDTDKYIEHMHADSRFADLTFKIDEAESHAFKKMHVRPRREIVALDLEEDINPREITGKYYSPKEFKAALEDENTVILDARNDYEYDLGHFRGAIRPDITRFRDLPEWVRNNKEQLDGKNIVTYCTGGIRCEKFSGWLVKEGFENVGQLHGGIATYGKDPETKGLYWDGKMYVFDERISVDVNQIDKTVIGKEHFDGTPCERYINCANPECNKQILVSEENEEKYLGACSYDCAKHERNRYVARHHISNEEWQRRLNNFKDVPEHTHA

SEQ ID NO: 1787 - DNA, 498 bp, Artificial Sequence
  Description of Artificial Sequence: synthetic nucleic acid sequence
gtgaatgtgcataaaatagatttatcaggcaacaaatttcaaatccaacgatttgttctgttgcaaattgtattggcgctatttacaatactatttacttataaatgggcttatcaaacaacgcatatcattgaacaaaatcttgtcatgaatcttatttttggatttgtaggtttcgcagtactagttattttgcacgagtttattcatcgtattttgttcattatattttctaaaggtgaaaaaccatctttaaaatatgataaaaacaaaattattgtacagttctctcagacttgttttcatcggtggcaatttacaattatcatgatagcaccacttgttatcataagtgcgaccttactagcacttattcatacaggaatatcaagaggaggttgtatacctcttgctaaaccatcaccaaaagttaataatattgctcctaccaaacctgacatgattataacatgtatatttttatggccgacaagttga

SEQ ID NO: 1788 - protein, 165 aa, Artificial Sequence
  Description of Artificial Sequence: synthetic amino acid sequence
VNVHKIDLSGNKFQIQRFVLLQIVLALFTILFTYKWAYQTTHIIEQNLVMNLIFGFVGFAVLVILHEFIHRILFIIFSKGEKPSLKYDKNKIIVQFSQTCFHRWQFTIIMIAPLVIISATLLALIHTGISRGGCIPLAKPSPKVNNIAPTKPDMIITCIFLWPTS

SEQ ID NO: 1789 - DNA, 798 bp, Artificial Sequence
  Description of Artificial Sequence: synthetic nucleic acid sequence
gtgtttgaagggaatatttttaaagttaatcccgcaacaaaagaggttacaacaaaatttcagtctgttaaagataatccggcagcgattaaagtacataaagatggtcgtttatttatctgttatctaggtgattttaagacaactggaggcatatttgcgacaacagaaaaaggtgaacaaatagaagaaattatttctgatttaaatacagaatattgtattgatgacatggtttttgacagtaaaggcggattttatttcactgattttagagggtattctacacaacctttgggcggtgtttactatgtagatccagactttaagacggttacgccaattattcaaaatatttctgtggcgaatggtattgctttaagtacggatgaaaaagtgctatgggtaactgaaactacaactaatcgacttcaccgaatcgcattagaggatgatggcgtgactattgcaccatttggagcgacaataccatattattttacaggtcatgaaggaccggattcttgttgtattgatagtaatgataatttatatgtggctatgtatggccaaggacgtgtattagttttcaataagagaggttatcctataggtcaaattttaatgccaggacgtgatgatggaaagatgttacgtacaacacatccacaatttatacctggtacaaatcaacttataatttgtactaatgatattgaaaaccattctgaaggtggatctatgctttatacagttaatggttttgctaaaggatatgagagttatcaatttcaataa

SEQ ID NO: 1790 - protein, 265 aa, Artificial Sequence
  Description of Artificial Sequence: synthetic amino acid sequence
VFEGNIFKVNPATKEVTTKFQSVKDNPAAIKVHKDGRLFICYLGDFKTTGGIFATTEKGEQIEEIISDLNTEYCIDDMVFDSKGGFYFTDFRGYSTQPLGGVYYVDPDFKTVTPIIQNISVANGIALSTDEKVLWVTETTTNRLHRIALEDDGVTIAPFGATIPYYFTGHEGPDSCCIDSNDNLYVAMYGQGRVLVFNKRGYPIGQILMPGRDDGKMLRTTHPQFIPGTNQLIICTNDIENHSEGGSMLYTVNGFAKGYESYQFQ

SEQ ID NO: 1791 - DNA, 519 bp, Artificial Sequence
  Description of Artificial Sequence: synthetic nucleic acid sequence
atgttagaaacacatagattaaagctagtgaagcctaatttgagttatacagatgaactttatcaattgcatacaaataaggtagctacaaagtatacacctaaaggtattcatcagaataaagtagcaacccaagattttattaaaggatggatgaggcattgggatgaatatcaatttggttacttcattttaattatgagagataatcacgaagtagtggggatagcgggatttgagtatcgtacaattcatcaacaacagtttcttaatgcgtattatagaatctttccatcgtatactggtgttggtttagcttttgagtcaatggaggagattgcccgtcatttaaaaaagcatgataccataacaccaaaattaattcgaacaaatcaatataatacaaattctattaaattagcacaaaaactcggatataattatgatgctaactgggacgatgtaattaataaaggagatcgttgtttttttaacctacaagcgttggataataactaa

SEQ ID NO: 1792 - protein, 172 aa, Artificial Sequence
  Description of Artificial Sequence: synthetic amino acid sequence
MLETHRLKLVKPNLSYTDELYQLHTNKVATKYTPKGIHQNKVATQDFIKGWMRHWDEYQFGYFILIMRDNHEVVGIAGFEYRTIHQQQFLNAYYRIFPSYTGVGLAFESMEEIARHLKKHDTITPKLIRTNQYNTNSIKLAQKLGYNYDANWDDVINKGDRCFFNLQALDNN

SEQ ID NO: 1793 - DNA, 607 bp, Artificial Sequence
  Description of Artificial Sequence: synthetic nucleic acid sequence
gtgactttgatgaaatttcgacgtccaaatcaacatttccaaatcgtagcgcatagaggattacctgaagattatcctgaaaatactattatcgcttatcgacatgcgctcatgttacatatagatatgttggaaattgatgtacattacacaaaagataaagaacttgtcgttatacatgatgatactatcgatcgtacgtcaaatggtaaaggtaaggtttctgattttactttaaaagaattaaaagcgttagattttggtttctataaaggagagaaatttaaaggggagagtataccgacttttgatgaagtgttagatttagcagataacttttcacaaaaattattaatagaaataaaaaagcctagtcagtatccaaatattgaaaatatgattgttgataaattgaaggaaagacaaatatctaaatctaaagtgattttacaatcattcgattttgattgtgtaaaaaaattgtcagcaatgaatttagattatgaattaggtttattaattagtaagaaaaaatattggcacaagttaccaaatttcaaaaaaattgccaaagttgctgattatgctaatcctaattatcaaattg

SEQ ID NO: 1794 - protein, 203 aa, Artificial Sequence
  Description of Artificial Sequence: synthetic amino acid sequence
  MOD_RES (203): variable amino acid
VTLMKFRRPNQHFQIVAHRGLPEDYPENTIIAYRHALMLHIDMLEIDVHYTKDKELVVIHDDTIDRTSNGKGKVSDFTLKELKALDFGFYKGEKFKGESIPTFDEVLDLADNFSQKLLIEIKKPSQYPNIENMIVDKLKERQISKSKVILQSFDFDCVKKLSAMNLDYELGLLISKKKYWHKLPNFKKIAKVADYANPNYQIX

SEQ ID NO: 1795 - DNA, 441 bp, Artificial Sequence
  Description of Artificial Sequence: synthetic nucleic acid sequence
atggttagacatgattttaaagttaaaactgaatggctaggtggacgcgaagaagtaggtaaacttcgaggagatattatcaatgaaaatatatccatcccctcttcactcggtggccaaggagaaggcacaaatccagatgaattactagtaagtgcagcatcatcttgttacatcatttcactcgctgcaacactagaaaagagtggttttactaatgtaaaaattaatcaacagtcaataggtacagcctcgtttgaaaataaaaaatttaaaatggaacgtattacacattatccctcaattaaagtaccctcttctcaaacagaaaagcttaaaagtattttagataaattattagtgattgcagataataattgtatgatatctaatgcaatacggaataatgtcattatttcaattgaacctaatttaatataa

SEQ ID NO: 1796 - protein, 146 aa, Artificial Sequence
  Description of Artificial Sequence: synthetic amino acid sequence
MVRHDFKVKTEWLGGREEVGKLRGDIINENISIPSSLGGQGEGTNPDELLVSAASSCYIISLAATLEKSGFTNVKINQQSIGTASFENKKFKMERITHYPSIKVPSSQTEKLKSILDKLLVIADNNCMISNAIRNNVIISIEPNLI

SEQ ID NO: 1797 - DNA, 1476 bp, Artificial Sequence
  Description of Artificial Sequence: synthetic nucleic acid sequence
atgatttcaacttatgatgctcttatcgtacgaagtcaaacccaagtaacagagcgaattattaatgctgcaacaaatttgaaggtcattgcaagagctggtgtaggtgtggataatattaatatagaagcagcgactttaaaaggtattttagtaattaatgctcctgatggtaatacaatttctgctacagaacattcagtagctatgttgcttgcaatggcacgaaatattcctcaagcacaccaatctttacgtaacaaagaatggaatcgtaaagcatttagaggggttgaactttatggcaaaaccttaggtgttatcggtgctggtaggattggtttgggcgtcgctaaacgtgcgcagagtttcggtatgaaaattttagcgttcgatccttatttaacagaagataaagcgaagtcattagatattcaaattgcaactgttgatgaaattgccgaaaaatccgactttgtaacagttcacacaccattaacacctaaaactcgaggaattgttggttcatctttctttaacaaagctaaacaaaacttacaaatcataaatgttgccagagggggtattatagatgaaactgcacttattgaagcattagataataacttaatagatcgtgcagctattgacgtatttgaacatgaacctcctactgattcccctctcattcaacatgataaaattattgtcacaccacatcttggcgcctctactgtagaagcgcaagagaaggttgcagtctctgtatctgaagaaataattgaaattctaactaaagggaatgttgagcatgctgtgaatgctccaaaaatggatttaagcaaagttgataaaacaactcaaagctttataggtttaagtacaactattggtgagtttgctattcagcttctcgatggtgctccgagtgaaattaaagttaaatatgctggtgacttagcgcaaaatgacactagtttaattacaagaacaattataacgaacatcttgaaagaagatttaggtaatgaagtcaatattattaatgcattagcaatacttaaccaacaaggtgtcacgtataatatagaaaaacaaaagaaacattctggctttagtagttacattgagctagaactagttaatgatcaagataaaatcaaaattggcgcaacggtattcgcaggttttggcccaagaatagtacgtattaatgattactcacttgattttaaacctaaccaatatcaattagtaacatgtcataaagataaacctggtatagtaggacaaacaggcaacctattgggaagtcacggaattaatattgcgtcaatgactttaggacgtaacgatgctggtggagatgctttaatgattctttctattgatcaacaagcaagtgaggaagttataaaaattttaaatgaaacaagcggattcaacaaaattattagcactaagttaacaatttga

SEQ ID NO: 1798 - protein, 491 aa, Artificial Sequence
  Description of Artificial Sequence: synthetic amino acid sequence
MISTYDALIVRSQTQVTERIINAATNLKVIARAGVGVDNINIEAATLKGILVINAPDGNTISATEHSVAMLLAMARNIPQAHQSLRNKEWNRKAFRGVELYGKTLGVIGAGRIGLGVAKRAQSFGMKILAFDPYLTEDKAKSLDIQIATVDEIAEKSDFVTVHTPLTPKTRGIVGSSFFNKAKQNLQIINVARGGIIDETALIEALDNNLIDRAAIDVFEHEPPTDSPLIQHDKIIVTPHLGASTVEAQEKVAVSVSEEIIEILTKGNVEHAVNAPKMDLSKVDKTTQSFIGLSTTIGEFAIQLLDGAPSEIKVKYAGDLAQNDTSLITRTIITNILKEDLGNEVNIINALAILNQQGVTYNIEKQKKHSGFSSYIELELVNDQDKIKIGATVFAGFGPRIVRINDYSLDFKPNQYQLVTCHKDKPGIVGQTGNLLGSHGINIASMTLGRNDAGGDALMILSIDQQASEEVIKILNETSGFNKIISTKLTI

SEQ ID NO: 1799 - DNA, 339 bp, Artificial Sequence
  Description of Artificial Sequence: synthetic nucleic acid sequence
atgctaggatttgcagggggattgggatacagtcattataaagattcaaaatcgaacactgatgtagcttcaaaagagactcagacttccaataaaaacactcatgaagatacaacttcacaaggtaaaatgcaaaatcaagttaatagccaaacaaacgaagtatcaaatgggacatcaactaaaacacttagtgaaaaagcaaagcagttaagagaagcttttaacgtcaatgatgaggaagctcaaattttagcagatgaaatcgatagagcagatgtaaataaagatggcacgattacaacggatgaaatgacgcctacttattttcatatataa

SEQ ID NO: 1800 - protein, 112 aa, Artificial Sequence
  Description of Artificial Sequence: synthetic amino acid sequence
MLGFAGGLGYSHYKDSKSNTDVASKETQTSNKNTHEDTTSQGKMQNQVNSQTNEVSNGTSTKTLSEKAKQLREAFNVNDEEAQILADEIDRADVNKDGTITTDEMTPTYFHI

SEQ ID NO: 1801 - DNA, 504 bp, Artificial Sequence
  Description of Artificial Sequence: synthetic nucleic acid sequence
atggtacttaggacttctttttttaaattcctcaaattccttcatttcttcctcattcatgtcattaaatcgattgatcacttcacctgtacttttgtttactacagcacaaaattttataggagttccggctgcatctcttacaaggtgttcaacataatattcattagcattgcttctatctatatttgttttaaattcaagaacttgttgcttattaatccctttattaatgtaatagttcgagacaatttgttctgcttcttgagcggaaatttgtttttgagctgttttttgtttttgattactattagaatttgttacgctcccattagtttgcatattatccgttttattttgttcttcttttggattgctttctgtttttttttacattttcttgtccacatgctgttaatattattgacgagagtgctaatgttcctaatagtttcaatttcattttatatccctccgtttaaaatgttgttaaagttcacctaa

SEQ ID NO: 1802 - protein, 167 aa, Artificial Sequence
  Description of Artificial Sequence: synthetic amino acid sequence
MVLRTSFFKFLKFLHFFLIHVIKSIDHFTCTFVYYSTKFYRSSGCISYKVFNIIFISIASIYICFKFKNLLLINPFINVIVRDNLFCFLSGNLFLSCFLFLITIRICYAPISLHIIRFILFFFWIAFCFFLHFLVHMLLILLTRVLMFLIVSISFYIPPFKMLLKFT

SEQ ID NO: 1803 - DNA, 345 bp, Artificial Sequence
  Description of Artificial Sequence: synthetic nucleic acid sequence
gtgcctatcaaaattaataatccagtggtagttaacacgagtttagagtgtaaggataattttctaaaacttttggcgttccacaaatcaaccacgactaaatgtcccaaacctcccaaaatgataagtattggaatagtgataatgattaccggatcatttgaaaaatcgattaagttgtttttaaaaagggcgaatcctgcgttgttaaatgcggaaactgaagtgaataaacttaaaaatagacctttacctatgccaaattttggaataaacgataaacatagacaaagtgtaccaaataattcagtggcgatgctgtatatggctagatgtttaataagt

SEQ ID NO: 1804 - protein, 115 aa, Artificial Sequence
  Description of Artificial Sequence: synthetic amino acid sequence
VPIKINNPVVVNTSLECKDNFLKLLAFHKSTTTKCPKPPKMISIGIVIMITGSFEKSIKLFLKRANPALLNAETEVNKLKNRPLPMPNFGINDKHRQSVPNNSVAMLYMARCLIS

SEQ ID NO: 1805 - DNA, 423 bp, Artificial Sequence
  Description of Artificial Sequence: synthetic nucleic acid sequence
atgcaaactaatgggagcgtaacaaattctaatagtaatcaaaaacaaaaaacagctcaaaaacaaatttccgctcaagaagcagaacaaattgtctcgaactattacattaataaagggattaataagcaacaagttcttgaatttaaaacaaatatagatagaagcaatgctaatgaatattatgttgaacaccttgtaagagatgcagccggaactcctataaaattttgtgctgtagtaaacaaaagtacaggtgaagtgatcaatcgatttaatgacatgaatgaggaagaaatgaaggaatttgaggaatttaaaaaaagaagtcctaagtaccataattctggtgaagaaaaaaataaaatgcaagaaaattcttcatcttccgaacaacaagaagtccacaattctgttatataa

SEQ ID NO: 1806 - protein, 140 aa, Artificial Sequence
  Description of Artificial Sequence: synthetic amino acid sequence
MQTNGSVTNSNSNQKQKTAQKQISAQEAEQIVSNYYINKGINKQQVLEFKTNIDRSNANEYYVEHLVRDAAGTPIKFCAVVNKSTGEVINRFNDMNEEEMKEFEEFKKRSPKYHNSGEEKNKMQENSSSSEQQEVHNSVI

SEQ ID NO: 1807 - DNA, 540 bp, Artificial Sequence
  Description of Artificial Sequence: synthetic nucleic acid sequence
atggcaaaggtagcaaaaaaatatgccaaagcattatttgatgtcgctctagatacaaatcaactagatgttgtctatgaagatttagaaacaattagccattcatcgtttgatttcatcaaacaacttaaagcaattgatagtaatccaagcttaactgcaaatcaacgtgaagaatttgtagaaagagtttacaacgaagcaaatccatatgtggtaaatactttaaaagtattagcagataaccgacatatttcaattgtagagaatgtttttaaatcattccaaaatttatataacaaatactacaaacaagattttgcaattattgaatcgacttacgagttaagcgaagatgaaatatcaagaattgtagaacttatcaaaaagcaaactgaattatcaaatgtaattgttaacactaaaatcaatcaagatttaattggtggatttagagttaaggttggaactacagttatggatggtagtgttagaaatgaccttgttcaattacaaagaaaatttgaaagagctaactaa

SEQ ID NO: 1808 - protein, 179 aa, Artificial Sequence
  Description of Artificial Sequence: synthetic amino acid sequence
MAKVAKKYAKALFDVALDTNQLDVVYEDLETISHSSFDFIKQLKAIDSNPSLTANQREEFVERVYNEANPYVVNTLKVLADNRHISIVENVFKSFQNLYNKYYKQDFAIIESTYELSEDEISRIVELIKKQTELSNVIVNTKINQDLIGGFRVKVGTTVMDGSVRNDLVQLQRKFERAN

SEQ ID NO: 1809 - DNA, 1512 bp, Artificial Sequence
  Description of Artificial Sequence: synthetic nucleic acid sequence
atggccataaaagctgaagaaatcagtgcattgcttcgctcacaaattgaaaattatgagtcagaaatgtccgttacagatgttggtacagtactccaaattggtgacggtatcgcattaattcacggacttaacgacgttatggctggtgagctagtagaattccataacggtgttcttggtttagcacaaaaccttgaagaatctaatgtgggtgtggttattttaggaccatatgaagaaattagtgaaggtgacgaagttaaacgtactggccgaattatggaagtaccagtcggagaggaaatgataggaagagttgttaatcctcttggacaacccattgacggacaaggtccaatcaatgcgactaaaactcgtcctgtagagaaaaaagcaactggcgtaatggatcgtaaatctgtagatgaaccattacaaacaggtatcaaagcaattgatgctttagtaccaattggccgtggtcaacgtgaattaatcattggtgaccgtcaaactggtaaaacaactgttgcaattgattcaatcttaaaccaaaaagatcaagatacaatttgtatttatgttgcaataggtcaaaaagattcaacagttcgtgcaaatgttgaaaaattaagacaagcaggtgctttagactacacaatcgttgtatctgcatccgcagctgatccagcaccattactttatattgcaccttattctggtgtaactatgggtgaagagttcatgtttaatggaaaacatgttcttatcgtttacgatgatttaactaaacaagcggcagcataccgtgagctatcattattattacgtagaccaccaggtcgtgaagcatatcctggggacgtgttctacttacacagtagattattagaaagagctgcaaaacttaacgatgatcttggaggcggttcaattactgctttaccaatcattgaaactcaagctggcgatatctcagcatacgttccaacaaatgttatctcaattactgacggacaaatattcttacaatctgatttattcttctcaggtgttagaccagcgattaatgctgggcaatcagtatctcgtgttggtggttcagctcaaattaaagcgatgaaaaaagttgcaggaacattacgtttagacttagcttcatatcgtgagttagaatcatttgcgcaatttggttctgatttagatgaatttacagctaaaaaattagcgcgtggtgaacgtactgttgaagtattaaaacaaggtcaaaataacccactgcctgtagaacatcaagtacttattatttttgctttaactaaaggttacttagatgatattcctgtccaagatatcaatcgttttgaagaggaatttaaccactgggctgagtcaaatgcaactgaattattaaatgaaattagagaaactggtgctttaccagatgctgataaatttgattctgctatcacagaatttaaaaaaggatttaataaatcagaagaataa

SEQ ID NO: 1810 - protein, 503 aa, Artificial Sequence
  Description of Artificial Sequence: synthetic amino acid sequence
MAIKAEEISALLRSQIENYESEMSVTDVGTVLQIGDGIALIHGLNDVMAGELVEFHNGVLGLAQNLEESNVGVVILGPYEEISEGDEVKRTGRIMEVPVGEEMIGRVVNPLGQPIDGQGPINATKTRPVEKKATGVMDRKSVDEPLQTGIKAIDALVPIGRGQRELIIGDRQTGKTTVAIDSILNQKDQDTICIYVAIGQKDSTVRANVEKLRQAGALDYTIVVSASAADPAPLLYIAPYSGVTMGEEFMFNGKHVLIVYDDLTKQAAAYRELSLLLRRPPGREAYPGDVFYLHSRLLERAAKLNDDLGGGSITALPIIETQAGDISAYVPTNVISITDGQIFLQSDLFFSGVRPAINAGQSVSRVGGSAQIKAMKKVAGTLRLDLASYRELESFAQFGSDLDEFTAKKLARGERTVEVLKQGQNNPLPVEHQVLIIFALTKGYLDDIPVQDINRFEEEFNHWAESNATELLNEIRETGALPDADKFDSAITEFKKGFNKSEE

SEQ ID NO: 1811 - DNA, 819 bp, Artificial Sequence
  Description of Artificial Sequence: synthetic nucleic acid sequence
atgaagcaaataacaaaggcgatgaacatggtttctagttcaaaattacgtagagctgagaaaaatactaaatcatttagaccttatatggaaaagatgcaagatgctattacagctgtagctggttcaaatagtacttctaatcatccaatgcttaaatctagagatattaaaagaagtggttacttagtaatcactagtgataaaggcttagccggtgcctatagtacaaatgttttaaaaagcttagtaaacgatatcaattctaaacccaacgacagtagtgaatatagtctaatcgttttaggtcagcaaggtgtagatttcttcaaacatagaggatatgaaattgaaagttctttagttgaagttccagatcaaccttcatttaaatctattcaatctatagctaaacatgctattgatttatttagcgaggaaaacatagatgaattgactatttattacagtcattatgttagtgtcttagaaaataaacctgcaactaaacaagttttaccattatctcaagaagattcaggtcaaggacatggtcaaatgtcttcatacgaatttgaaccagataaagaatctattttaagcgttattttgccacaatacgttgaaagcttaatctacggtacaatcttagatgcaaaagctagtgaacatgcttcacgtatgacagcaatgagaaatgcttcagataatgcgacagaactaatcgatgatttatcattagaatacaatagagcgagacaagctgcgattactcaacaaattactgaaattgttggtggatcatcagctcttgagtaa

SEQ ID NO: 1812 - protein, 272 aa, Artificial Sequence
  Description of Artificial Sequence: synthetic amino acid sequence
MKQITKAMNMVSSSKLRRAEKNTKSFRPYMEKMQDAITAVAGSNSTSNHPMLKSRDIKRSGYLVITSDKGLAGAYSTNVLKSLVNDINSKPNDSSEYSLIVLGQQGVDFFKHRGYEIESSLVEVPDQPSFKSIQSIAKHAIDLFSEENIDELTIYYSHYVSVLENKPATKQVLPLSQEDSGQGHGQMSSYEFEPDKESILSVILPQYVESLIYGTILDAKASEHASRMTAMRNASDNATELIDDLSLEYNRARQAAITQQITEIVGGSSALE

SEQ ID NO: 1813 - DNA, 1413 bp, Artificial Sequence
  Description of Artificial Sequence: synthetic nucleic acid sequence
atgggaattggccgtgtaactcaagttatgggtccagtaatagatgttcgttttgaacataacgaagtacctgagataaataatgcattacacatcgaagttcctaaagaagatggagcgcttcaattaacattagaagttgcacttcaactaggtgacgatgtagttcgtacaattgcaatggactcaactgacggcgttcaaagaggaatggaagttaaagatacaggtagagacataagtgtacctgtcggtgacgtaactctaggaagagtgtttaacgtactaggagaaactattgacttagatgaaaaaattgatgattcagtacgacgtgaccctatccatagacaagctccaggattcgacgaattatcaacaaaagtagaaatcttagaaactggtattaaagtagtagacttattagcaccttacataaaaggtggtaaaattggattatttggtggtgccggtgtaggtaaaaccgtactaatccaagaacttattaataacatcgctcaagaacacggtggtatctcagtattcgctggtgttggtgaacgtacacgtgaaggtaatgatctttactatgaaatgagtgacagtggtgttatcaagaaaactgcaatggtctttggtcaaatgaatgagccacctggtgcacgtatgcgtgtagcattatccggattaacaatggccgaatatttccgagatgaagaaggccaagatgtgttattattcattgataacattttcagattcactcaagctggttcagaagtttctgcgttattaggtcgtatgccatcagctgttggttatcaacctacacttgctacagaaatgggtcaattacaagaacgtataagttcaacaaataaaggttcagttacatcaattcaagctgttttcgtaccagccgatgactatactgaccctgcgccagcaacaacgttcgcacacttagattcaacaacaaacttagagcgtaaattaacagaaatgggtatttatccagctgtagacccgcttgcttctacatctagagctttggaaccttcagtagtaggtcaagagcattatgatgtggcacgtgaagttcaatctactttacaaaaatatagagagttacaagatattattgcgattcttggtatggatgaattatcagatgaagataaacaaactgtggaacgagcacgtagaattcaattcttcttatcacaaaacttccacgttgcagaacaatttactggacaaaaaggttcatatgtacctgttaaaacaacagttgcagacttcagagatattttagatggtaagtatgaccatattcctgaagacgcattccgtttagtaggtagcatggaagacgtaattgagaaagcaaaagatatgggtgttgaagtctaa

SEQ ID NO: 1814 - protein, 470 aa, Artificial Sequence
  Description of Artificial Sequence: synthetic amino acid sequence
MGIGRVTQVMGPVIDVRFEHNEVPEINNALHIEVPKEDGALQLTLEVALQLGDDVVRTIAMDSTDGVQRGMEVKDTGRDISVPVGDVTLGRVFNVLGETIDLDEKIDDSVRRDPIHRQAPGFDELSTKVEILETGIKVVDLLAPYIKGGKIGLFGGAGVGKTVLIQELINNIAQEHGGISVFAGVGERTREGNDLYYEMSDSGVIKKTAMVFGQMNEPPGARMRVALSGLTMAEYFRDEEGQDVLLFIDNIFRFTQAGSEVSALLGRMPSAVGYQPTLATEMGQLQERISSTNKGSVTSIQAVFVPADDYTDPAPATTFAHLDSTTNLERKLTEMGIYPAVDPLASTSRALEPSVVGQEHYDVAREVQSTLQKYRELQDIIAILGMDELSDEDKQTVERARRIQFFLSQNFHVAEQFTGQKGSYVPVKTTVADFRDILDGKYDHIPEDAFRLVGSMEDVIEKAKDMGVEV

SEQ ID NO: 1815 - DNA, 324 bp, Artificial Sequence
  Description of Artificial Sequence: synthetic nucleic acid sequence
atgttaaaaagtaatatccatttttataagtatctttattgcctcttttcgtgtacaatgttatacagtaatcttacgaaggagcttaatatggattatcttggtcagttcgcaattgttcatttaatcttacatgttgtttgtatttgcgtagcttattgggctttaaattccataaaattagaccaattttttaaaaagggctacccattacaagttcaagtttgtatgatttttatttctattttactgggtacggcagtcagtaactttatagttgatttattgcaatattcaactcaagtgaaatacttgataaaataa

SEQ ID NO: 1816 - protein, 107 aa, Artificial Sequence
  Description of Artificial Sequence: synthetic amino acid sequence
MLKSNIHFYKYLYCLFSCTMLYSNLTKELNMDYLGQFAIVHLILHVVCICVAYWALNSIKLDQFFKKGYPLQVQVCMIFISILLGTAVSNFIVDLLQYSTQVKYLIK

SEQ ID NO: 1817 - DNA, 1266 bp, Artificial Sequence
  Description of Artificial Sequence: synthetic nucleic acid sequence
atggataaaatagtaataaatggtggaaatcgtttaacaggtgaagttaatgttgaaggagctaaaaatgctgtattacctgtacttacagcgtcattacttgcttctgaaggacacagtaaactagttaatgtcccagagttaagcgatgttgaaacaatcaataatgtattatctacactcaatgcaaatgtagagtatgataaagataaaaatgcagttaaagttgatgcaactaaaactttaaatgaagaagccccttatgaatatgtgagtaaaatgcgagcaagcatcttggttatgggaccactacttgctcgactagggcatgctattgttgctttgccaggaggatgtgcgattggaacacgtcctatagagcagcacattaaaggatttgaagctttaggtgcagacattcatttagaaaatggaaatatttatgcaaatgctaaagatggattaaagggagcacatattcatttagattttccgagtgtaggtgcaactcaaaatattattatggcagcgtccttggcatcaggaaaatctatcattgagaatgtcgctaaagaacctgaaattgttgatttagctaattatattaatgaaatgggcggtaaaattacaggtgcaggtactgataccattacgatacatggtgttgaaaaactttacggtgttgaacatgcaattataccagatagaattgaagctggaacgttacttatcgcaggtgcaataactcgtggtgacatatttgtacgtggtgcaattaaagaacatatggctagtttaatatataagcttgaagagatgggggtagatcttgaatattatgaagaaggtataagagttacagcaaatggagatttaaatccagtagatgtaaaaactttaccacacccaggtttcccaactgatatgcaatctcaaatgatggctttattattaacagcaaatggacacaaagtgattactgagactgtttttgaaaatagatttatgcacgttgcagaatttagaagaatgaatgcgaatataagtgttgaaggaagaagtgctaaaattgaaggaaaaagccatttacaaggtgctcaagttaaagcaacagatttaagagctgctgcagccttaatcttagctggtttagttgcagagggaactacgcaagtgactgagttaaagcatctagatagaggatacgtcaatttacatggaaaactaaaaagtctaggtgcaaacatagaacgtgtaaatcgataa

SEQ ID NO: 1818 - protein, 421 aa, Artificial Sequence
  Description of Artificial Sequence: synthetic amino acid sequence
MDKIVINGGNRLTGEVNVEGAKNAVLPVLTASLLASEGHSKLVNVPELSDVETINNVLSTLNANVEYDKDKNAVKVDATKTLNEEAPYEYVSKMRASILVMGPLLARLGHAIVALPGGCAIGTRPIEQHIKGFEALGADIHLENGNIYANAKDGLKGAHIHLDFPSVGATQNIIMAASLASGKSIIENVAKEPEIVDLANYINEMGGKITGAGTDTITIHGVEKLYGVEHAIIPDRIEAGTLLIAGAITRGDIFVRGAIKEHMASLIYKLEEMGVDLEYYEEGIRVTANGDLNPVDVKTLPHPGFPTDMQSQMMALLLTANGHKVITETVFENRFMHVAEFRRMNANISVEGRSAKIEGKSHLQGAQVKATDLRAAAALILAGLVAEGTTQVTELKHLDRGYVNLHGKLKSLGANIERVNR

SEQ ID NO: 1819 - DNA, 1266 bp, Artificial Sequence
  Description of Artificial Sequence: synthetic nucleic acid sequence
atggctaatgctttaatagaagatttaaaatggagagggttaatttatcaacaaacagatgaagagggtatcgaagaattattaaataaggaacaggtcactttatattgcggcgcagatcctacagctgatagtttacatattggtcacttgttaccttttttaacattaagacgcttccaagaacatgggcatcgtcctatcgtcttaattggtggaggtactggtatgataggagatccttctggaaagtctgaagagcgcgtgttacaaacagaatcacaagttgaagctaacgtcaaaggcctgtctaatcaaatgcatcgattatttgaatttggcagtgataaaggggcaaaattagttaataataaagattggcttggtcaaatttcgttgattagttttcttagagattatggtaaacatgttggcgttaactatatgctaggaaaagattctattcaaacacgtttagaacatggtatctcttatacagaatttacttatactattttacaagctattgattttggctatttaaatcgtgagttaaattgtaaaattcaagtaggcggatctgatcaatggggtaatattacaagtggtattgaattaatgcgacgaatgtatggacaaactgaggcatatggcctaacaatcccattagtaactaaatcagatgggaagaaatttggtaaatcagagtctggagctgtgtggttagatcctgaaaagacaagtccatatgaattttatcaattttggattaatcaatctgacgaagatgtaattaaattcttaaaatattttacttttttagaaaaagaagaaattaatcgattagaacaatcaaaaaatgaagcgcctcacttacgtgaagcacagaaagcactagcggaaaatgttacgaaatttattcatggtgaagcagctttaaaagacgctatacgtatttcaaaagcactgtttagtggagatttaaaatcattatctgctaaagaacttaaagaagggtttaaagacgtacctcaagtaacgctatctacaaaaacgacaaatatagttgaagcacttattgaaacaggtattgcttcatctaaacgccaagcacgtgaagatgtaaacaacggtgcaatatatattaatggtgaacgtcaacaatcagtcgattatgagttaagtagtaaagaccttattgaagatgaaattacaataattcgacgaggaaagaaaaaatatttcatggttaattaccaatcataa

SEQ ID NO: 1820 - protein, 421 aa, Artificial Sequence
  Description of Artificial Sequence: synthetic amino acid sequence
MANALIEDLKWRGLIYQQTDEEGIEELLNKEQVTLYCGADPTADSLHIGHLLPFLTLRRFQEHGHRPIVLIGGGTGMIGDPSGKSEERVLQTESQVEANVKGLSNQMHRLFEFGSDKGAKLVNNKDWLGQISLISFLRDYGKHVGVNYMLGKDSIQTRLEHGISYTEFTYTILQAIDFGYLNRELNCKIQVGGSDQWGNITSGIELMRRMYGQTEAYGLTIPLVTKSDGKKFGKSESGAVWLDPEKTSPYEFYQFWINQSDEDVIKFLKYFTFLEKEEINRLEQSKNEAPHLREAQKALAENVTKFIHGEAALKDAIRISKALFSGDLKSLSAKELKEGFKDVPQVTLSTKTTNIVEALIETGIASSKRQAREDVNNGAIYINGERQQSVDYELSSKDLIEDEITIIRRGKKKYFMVNYQS

SEQ ID NO: 1821 - DNA, 663 bp, Artificial Sequence
  Description of Artificial Sequence: synthetic nucleic acid sequence
atgccttcagaattatggaatcgcaacaaagttaaagatttttttgggaaaatcacaacttttttagatggcccttatgaaaataaggtagccagaaattttaccaaaggacagtttacggatgatactgcacaatcactactaatcattgatgcgctaaataaaaatcattttgaaccttcaaaaaaaatcatagcagacgaattgattgaatgggccaatgctacaaacgcatttaaaaataatattcttggcccaagttctaaagcagctttaactgcaataatacaaggagaggattcccaattatatacaaaaaatgcattaactaatgggtcggctatgagaattgctcctattggtactttattttctaaagatcaaaaagtagagcttgtaaattatgttaaggaaattagtgaagctactcacacaagtgatgttgcaatagctggagctagtatgattgcttatgcagtaacattggcagcggaagataagaattggaaagaaattatagaaggcgttttggatattcacgatatagctattaaagaaggagaacaaactttttctgcatcaatagcagaaagattaaaattagcagttcagtttgccaatcatttcgaaagtgaggaggaatatgttttctttagtcattag

SEQ ID NO: 1822 - protein, 220 aa, Artificial Sequence
  Description of Artificial Sequence: synthetic amino acid sequence
MPSELWNRNKVKDFFGKITTFLDGPYENKVARNFTKGQFTDDTAQSLLIIDALNKNHFEPSKKIIADELIEWANATNAFKNNILGPSSKAALTAIIQGEDSQLYTKNALTNGSAMRIAPIGTLFSKDQKVELVNYVKEISEATHTSDVAIAGASMIAYAVTLAAEDKNWKEIIEGVLDIHDIAIKEGEQTFSASIAERLKLAVQFANHFESEEEYVFFSH

SEQ ID NO: 1823 - DNA, 954 bp, Artificial Sequence
  Description of Artificial Sequence: synthetic nucleic acid sequence
gtgataaacatgcaaaaatctacaaaccttgatgatttattcaacggtaaggcatctaaatcaaaagaagcgggaattggttccggtgtgatttatcaaataagtgaaggttccgcatatatcgttacaaataatcacgttgttgatggtgcttcggaaattaaagttcaactacataattcaaaacaagtagatgccaaattaataggtaaagacgccctaacagatattgctgttctaaaaataaaagatacaaaaggaataaaagcaattcaatttgctaattcgtcaaaagttcaaacaggagatagtgtttttgcaatgggtaatcctctaggattagaatttgcaaattctgttacatcaggaattatttcagctagcgaacgtacaattgacgccaatacttctgctggtaatactaaagttaatgttttacagacagacgctgcaataaatcccggtaattcgggtggtgcattagtggatattaacggaaatctcgttggtatcaattccatgaaaattgcggcagcacaagtagaaggtataggttttgctatacctagtaatgaagttagagtgaccatcgaacaactcgttaaacatggtaaaatcgaacgcccttcaatcggtataggtcttataaatttaagtgatattcctgaaaactatcgtaaagaactacatactcataaagacaaaggcgtttatgtagctaaagtagacagtgaaaatgccattaaaaagggtgatattattactggaatagatggtaaacaaataaaagatgatacagatttaagaacttatttatacgagagcaaaaaaccaggtgaaacggttactctaaaagttatcagagatggtaagacacaagacattaatgtaaaattaaaaaaacaagcatctgcatctgaatcatctcaatcacaaagtcaatttgctcaataa

SEQ ID NO: 1824 - protein, 317 aa, Artificial Sequence
  Description of Artificial Sequence: synthetic amino acid sequence
VINMQKSTNLDDLFNGKASKSKEAGIGSGVIYQISEGSAYIVTNNHVVDGASEIKVQLHNSKQVDAKLIGKDALTDIAVLKIKDTKGIKAIQFANSSKVQTGDSVFAMGNPLGLEFANSVTSGIISASERTIDANTSAGNTKVNVLQTDAAINPGNSGGALVDINGNLVGINSMKIAAAQVEGIGFAIPSNEVRVTIEQLVKHGKIERPSIGIGLINLSDIPENYRKELHTHKDKGVYVAKVDSENAIKKGDIITGIDGKQIKDDTDLRTYLYESKKPGETVTLKVIRDGKTQDINVKLKKQASASESSQSQSQFAQ

SEQ ID NO: 1825 - DNA, 906 bp, Artificial Sequence
  Description of Artificial Sequence: synthetic nucleic acid sequence
atgcatttcaacaagtatcaaatactaactacagataaatatactaaatttgaacatttatataagaaggtcaaacatatatgtgtcgtaatttttttggtggtttttttgattggttttattatactgttgtcattagtattatacttccaacaactaactaaagatgcttcgtcaataagtgatcgagagttgaaagcaaaaatccttcatatacctggcgatgagctaataaatcataataatcaaattttagaagaatatgatcattcacaaaatacactcatagttggaccgaaccatgtaaattcaaatattatacatgcacttacagcctctgaagatacattattttataaacataacggtattatgcctaaagcacttttaagggcgatgcttcaagatatcacaaattcaaaccaatcttctggtggtagtactatcacgcaacaattagtaaaaaatcaagtgctctcaaataaaaaaacttatagtcgtaaagcaaatgaaattatcttggctacacgggtcgaaaatttattatcaaaagatgaaatcatatatacgtatttaaatatcgtcccatttggtcatgactacaacggtgccaatataactggtatatcgtctgcttcatatagtctgtttggtatacctgcaaaagatttgaatattgcacaatcagcttatctcattggcttactgcaaagtccatacggctatacgccttatgacgaacacggcaaagtaaagccttaccatcttttaaaattgagcatgaaacgtcaacaatacgtacttaaacgtatgcgtgttgaaggaaaaatttctaaacaacaatacgaaaacgctaaaaaatacaatattaaacagcacttgctgaaacaatcgaaagacgaataa

SEQ ID NO: 1826 - protein, 301 aa, Artificial Sequence
  Description of Artificial Sequence: synthetic amino acid sequence
MHFNKYQILTTDKYTKFEHLYKKVKHICVVIFLVVFLIGFIILLSLVLYFQQLTKDASSISDRELKAKILHIPGDELINHNNQILEEYDHSQNTLIVGPNHVNSNIIHALTASEDTLFYKHNGIMPKALLRAMLQDITNSNQSSGGSTITQQLVKNQVLSNKKTYSRKANEIILATRVENLLSKDEIIYTYLNIVPFGHDYNGANITGISSASYSLFGIPAKDLNIAQSAYLIGLLQSPYGYTPYDEHGKVKPYHLLKLSMKRQQYVLKRMRVEGKISKQQYENAKKYNIKQHLLKQSKDE

SEQ ID NO: 1827 - DNA, 618 bp, Artificial Sequence
  Description of Artificial Sequence: synthetic nucleic acid sequence
atgacagtgttaggatatgatagtactgttcaagttacattgaacgatatgattcatcatggtaaggctgttaaaagaggtgcttcagatacatttatagttgttgatatgcctatagggactgttggtttaagtgatgaagaagatctaaaaaatgcacttaagctttatcaaaacacgaatgctaacgctgtcaaagtagaaggggctcatcttacatcatttattcaaaaagcaactaaaatgggtatacctgttgtttctcacttaggtcttacacctcaaagtgtaggtgtaatggggtataaacttcaaggggatacaaagacagccgctatgcaacttatcaaagatgctaaagctatggaaactgctggtgcagtagtactggttttagaagccatacctagtgatttagctcgagaaattagtcagcaactcactattccagttataggtataggggcaggaaaagatactgatgggcaagtgttagtgtatcatgatatgttaaattatggtgttgatcgacacgctaagtttgttaagcaatttgcagacttttcaagtggtattgatggattaaggcaactgaaaataacaaataaatacctatga

SEQ ID NO: 1828 - protein, 205 aa, Artificial Sequence
  Description of Artificial Sequence: synthetic amino acid sequence
MTVLGYDSTVQVTLNDMIHHGKAVKRGASDTFIVVDMPIGTVGLSDEEDLKNALKLYQNTNANAVKVEGAHLTSFIQKATKMGIPVVSHLGLTPQSVGVMGYKLQGDTKTAAMQLIKDAKAMETAGAVVLVLEAIPSDLAREISQQLTIPVIGIGAGKDTDGQVLVYHDMLNYGVDRHAKFVKQFADFSSGIDGLRQLKITNKYL

SEQ ID NO: 1829 - DNA, 807 bp, Artificial Sequence
  Description of Artificial Sequence: synthetic nucleic acid sequence
atggatccgagtttgattttaccttatttatgggtacttttagtacttgtatttttagaaggattattagcagctgataatgcaattgtaatggcggtaatggttaaacatctaccacctaaacaacgtaaaaaagcacttttttatggcctattaggtgcattcatttttagatttattgctttatttttaataagtattattgcaaacttctggtggattcaagcagcaggtgctgtttacttaatctatatgtctattaaaaatttatggcaatttttccatcagtcaaatgaaaaacaccataaagaaacaggagacgaacatcatttcgatgaaacaggcaacgaaaaagaagtaggccctaaatctttttggggaacagtatttaaagttgaattcgctgatatcgcgtttgcaattgattcgatgcttgccgcattagccatagccgttacattaccaaaagttggcatacattttggtggtatggacttaggccaatttattgttatgttccttggtggaatgataggtgtcatcttgatgagatttgcagcaacttggtttgtagaattgttgaataaatatccaggacttgaaggtgctgcgtttgcaattgtaggttgggtaggtattaaacttgttataatggtacttgcacatcctgatattggcgttttaccagaagcatttccacatagtgctttatggcaaacaatcttctgggtagtattagttggcttagttttaataggatggttaacttcagcaattggcaacaagaaaaaaggtaatcaaaaataa

SEQ ID NO: 1830 - protein, 268 aa, Artificial Sequence
  Description of Artificial Sequence: synthetic amino acid sequence
MDPSLILPYLWVLLVLVFLEGLLAADNAIVMAVMVKHLPPKQRKKALFYGLLGAFIFRFIALFLISIIANFWWIQAAGAVYLIYMSIKNLWQFFHQSNEKHHKETGDEHHFDETGNEKEVGPKSFWGTVFKVEFADIAFAIDSMLAALAIAVTLPKVGIHFGGMDLGQFIVMFLGGMIGVILMRFAATWFVELLNKYPGLEGAAFAIVGWVGIKLVIMVLAHPDIGVLPEAFPHSALWQTIFWVVLVGLVLIGWLTSAIGNKKKGNQK

SEQ ID NO: 1831 - DNA, 1482 bp, Artificial Sequence
  Description of Artificial Sequence: synthetic nucleic acid sequence
atgaataaatctaaagacgacgataataaaattggagaagaaagtctacatgatgtgcgagtttcaagtgatacctccactttaccgcatcaaaataagtcaataaaagactatgatgattctggaaacgaaagtaaacaacatactaaattgacttcaaaggaatctatgctaggcgtaaattctaatcatactgagcaagattcaagaagtacacaaccatattcttcaaaacatagctattcacaaccaaaagataaagacaacgataatactcaacaagcgcaatttcttaaaaaagaagacaaacaacgtaacagagccgaaaatataaaaaaagttaatgaatttaaacaattggtggtagctttctttaaagaacactggcctaaaatgttaattattatcggtattatagtattacttttaatattaaatgccatattcactacagttaataaaaatgatcatacaaatgatagtgcatttaacggtacagctaaagatgaaacaacagcgatgaaaattgctgaaaactctgttaagtcagttgtaactgtcgagaatgatttgtctaatgacacgactgtgtctgataacaaaaatgaatctgataatgagataggatcaggtgtcgtctacaaaaaagtgggcgactctatttatatttttactaatgcacacgttgtcggtgatcaagaaaaacaaaaagtaacatatggtaatgataaatctgtgacaggtaaggtaattggtaaagataaatggtctgatttagcagttgtaaaagctaaagttgctgacgaaaatattaaaccaatgactatgggggattctaataatattaaattggctgaacctattttagttataggcaatcctctaggcacagactttaaaggaagtgtttctcaaggtattgtgtctggactcaatcgtcatgtacctgtggacattgataaaaatgataattatgatgctttgatgaaagcttttcaaattgatgcgcctgtgaacccaggaaattcaggtggtgctgtggtcgatagagacggtagactcataggtatagtttctttaaaaattgatatgcataatgtagaaggaatggcttttgcgatacctattaatgatgtacgtaagattgcgaaagaattagagcataaaggtaaagtgaactaccccaatactgaaatcaaaatcaaaaatgttggtgaccttgacgattctgaacgtaatgcaatcaacttaccagctaaagtgaatcatggtgtattaatcggtgaagtgaaagaaaatggtttaggagacaaagcaggtttaaaaaaaggtgatgtaatagtagaattagatggtaagaagattgaagataacttacgatatagacaagtcatatatagtcattatgatgatcaaaaaacaattactgctaaaatttatcgaaatggtgcggagaaaaatattaaaatcaaattgaaataa

SEQ ID NO: 1832 - protein, 493 aa, Artificial Sequence
  Description of Artificial Sequence: synthetic amino acid sequence
MNKSKDDDNKIGEESLHDVRVSSDTSTLPHQNKSIKDYDDSGNESKQHTKLTSKESMLGVNSNHTEQDSRSTQPYSSKHSYSQPKDKDNDNTQQAQFLKKEDKQRNRAENIKKVNEFKQLVVAFFKEHWPKMLIIIGIIVLLLILNAIFTTVNKNDHTNDSAFNGTAKDETTAMKIAENSVKSVVTVENDLSNDTTVSDNKNESDNEIGSGVVYKKVGDSIYIFTNAHVVGDQEKQKVTYGNDKSVTGKVIGKDKWSDLAVVKAKVADENIKPMTMGDSNNIKLAEPILVIGNPLGTDFKGSVSQGIVSGLNRHVPVDIDKNDNYDALMKAFQIDAPVNPGNSGGAVVDRDGRLIGIVSLKIDMHNVEGMAFAIPINDVRKIAKELEHKGKVNYPNTEIKIKNVGDLDDSERNAINLPAKVNHGVLIGEVKENGLGDKAGLKKGDVIVELDGKKIEDNLRYRQVIYSHYDDQKTITAKIYRNGAEKNIKIKLK

SEQ ID NO: 1833 - DNA, 1359 bp, Artificial Sequence
  Description of Artificial Sequence: synthetic nucleic acid sequence
atgtcagttttaagtcagctgcttaaaaaatctagccctcaacaagggattatactctattatctatttgccatcgtcgttgcatttttattattaaatttgccatatgttcataaacaaggggttgaggttaatccaattgatacactttttgtagctgtatcaggtattagtgttacaggattatcaccaattactatagtcgacacatactcaacctttggtcaaattatcatacttattattttgaacatcggtggtataggtgttatggctattggaaccatgctttgggttgttttaggcaaacatattggaattagagaacgacaactcattatgttagataataatagagatactatgagtggaacggttaaactgattttagaaattgtaagaacaatttttattattgagtttataggtgcactcttactcgcgttctatttttatcgggataatcctgatttaaaaaacgcattaatgcaaggcatttttgtgtcagtatctgctacgactaacggtggtcttgatattactggtgaatctttagttccctatgcaaaagactattttgtacaaacaatagtaatgttcttaattgtgttaggatctataggctttccagttttgttggagttaaaagcatatataaagaatcgagtaactaattttaggttctcattattcacaaaaataacgacaacaacgtatttattcttatttttattcggcgttattgttgtattaatattagaacatagcaatgcatttaaaggattgagttggcatcaatcattattttatgcattgttccaatcatcaacgaccagaagtgcaggtttgcaaacgatagatgtgtcacatttcagcgacgcaacaaatattgtaatgggattattgatgtttataggatcatctcccagttctgtaggaggtggaatcagaacaacaacatttgctattttaattttgtttgttattaattttaataatactggtgacaaaacaggtattaaaattttcaacagagaagtacatattatggatgtacaaagatcatttgccgtatttactatggcgtcattaattacatttattagcatgattattatatctgccactgaacaaggcaagttgtcctttttacaaattttctttgaagtaatgtctgcgtttggtacatgtggtttaagcttaggtgtgacaagcgatgtcaacgacattaccaaggctgtattaatgatattaatgtttataggtcgtgtaggacttatttcattcattattatgttagctggacgtaaagaacccgaaaaatatagctatcctaaagaacgtatacaaattggatag

SEQ ID NO: 1834 - protein, 452 aa, Artificial Sequence
  Description of Artificial Sequence: synthetic amino acid sequence
MSVLSQLLKKSSPQQGIILYYLFAIVVAFLLLNLPYVHKQGVEVNPIDTLFVAVSGISVTGLSPITIVDTYSTFGQIIILIILNIGGIGVMAIGTMLWVVLGKHIGIRERQLIMLDNNRDTMSGTVKLILEIVRTIFIIEFIGALLLAFYFYRDNPDLKNALMQGIFVSVSATTNGGLDITGESLVPYAKDYFVQTIVMFLIVLGSIGFPVLLELKAYIKNRVTNFRFSLFTKITTTTYLFLFLFGVIVVLILEHSNAFKGLSWHQSLFYALFQSSTTRSAGLQTIDVSHFSDATNIVMGLLMFIGSSPSSVGGGIRTTTFAILILFVINFNNTGDKTGIKIFNREVHIMDVQRSFAVFTMASLITFISMIIISATEQGKLSFLQIFFEVMSAFGTCGLSLGVTSDVNDITKAVLMILMFIGRVGLISFIIMLAGRKEPEKYSYPKERIQIG

SEQ ID NO: 1835 - DNA, 1341 bp, Artificial Sequence
  Description of Artificial Sequence: synthetic nucleic acid sequence
atgaatggtacatgttacactaaattcaaggagaggagtggctctatggaaaaaaatgaaaataaaatagttgatgtgattgcaacttctgatatgcatagtcacttcttaaatggtgattatggctcaaacatttatcgggctggtacttatgttaatgaagctcgaaaaaataatgaaaatgtcatattactagatagtgggggaagtttggcgggatcacttgcagcattttattacgccgttgtagcaccatataaacgtcatcctatgattaagttgatgaatgcaatgcagtatgatgctagtggaattagccctaatgaatttaaatttggattatcttttttgacacgttcagttgcactctcaaggtttccttggctatcagcaaatatagagtatactgttactagagagccatatttttctacgccttatacaatcaaaatgtattcagatttgaaaattgctatcgtaggtttaacatcagatggattaatgaagaacgagtacgcagaaatggaagaagatgtctgtattgagaagactttggtttcagctaaacgttggattagatacatacatgaagttgaagaaccagacttccttattgttatttatcatggtgggttaaataaaattagtagtgccaataaaagaaatgaaaaaaatgcaaacgaagctgaaaaaattatggaagaacttggtgttattgatgtaattattaccgctcatcaacatcaaacagtagttggaaaagatcatggaactatatatgttcaagcaggtcaaaatgctgaggaattagtacatctttcaattaaatttaagaaacgtacaacttcttatgagattgagcacatcgactcaaaagttattgacttaaatgattaccatgaagatgagcaattattaaaagaaacatattatgatcgtaaggcagtcaaacactgggcaaattcagtagtttcaaacaaaaacaatggcttaacagttcaatgtattgaagatattatttgtaagccgcatccttttactcaattattacatgatgcaattagattagcctataattatgatatttcttgtgtgcatatacctaagaatggtgaggaagggttaaaaggaactataagaaatagagatatatacgatgcataccctcatccagataaacctatagatatcactgtcaaaggtaaaaatatcaaagatatacttgaatacagttatgcgcatattgattttaataagcgacaatttattagaacggaggttaaattacaatttatttgtttgattaaatttaactattattcatttggacatctattttaa

SEQ ID NO: 1836 - protein, 446 aa, Artificial Sequence
  Description of Artificial Sequence: synthetic amino acid sequence
MNGTCYTKFKERSGSMEKNENKIVDVIATSDMHSHFLNGDYGSNIYRAGTYVNEARKNNENVILLDSGGSLAGSLAAFYYAVVAPYKRHPMIKLMNAMQYDASGISPNEFKFGLSFLTRSVALSRFPWLSANIEYTVTREPYFSTPYTIKMYSDLKIAIVGLTSDGLMKNEYAEMEEDVCIEKTLVSAKRWIRYIHEVEEPDFLIVIYHGGLNKISSANKRNEKNANEAEKIMEELGVIDVIITAHQHQTVVGKDHGTIYVQAGQNAEELVHLSIKFKKRTTSYEIEHIDSKVIDLNDYHEDEQLLKETYYDRKAVKHWANSVVSNKNNGLTVQCIEDIICKPHPFTQLLHDAIRLAYNYDISCVHIPKNGEEGLKGTIRNRDIYDAYPHPDKPIDITVKGKNIKDILEYSYAHIDFNKRQFIRTEVKLQFICLIKFNYYSFGHLF

SEQ ID NO: 1837 - DNA, 462 bp, Artificial Sequence
  Description of Artificial Sequence: synthetic nucleic acid sequence
atgaatttccatcttgtttgtcctaaagaactcaatccgacagaagaattattaaatcgttgcgaacgtattgcgacggaaaatggcggtaacattttaataacagatgatattgataaaggcgtgaaagattctgatgttatttatacagatgtttgggtatcaatgggcgaacctgatgaagtatggcaagaacgccttaaacttttaaaaccatatcaagttaaccaagcattattagaaaaaacaggcaatccaaatgttatttttgaacattgtttaccttctttccacaatgcagaaactaaaattggtcaacaaatttatgaaaaatatggcattagtgaaatggaagtcactgatgatgtcttcgaaagcaaagcttctgtagtattccaagaagctgagaatagaatgcatacaattaaagcggtcatggtagcaactttaggagaattctaa

SEQ ID NO: 1838 - protein, 153 aa, Artificial Sequence
  Description of Artificial Sequence: synthetic amino acid sequence
MNFHLVCPKELNPTEELLNRCERIATENGGNILITDDIDKGVKDSDVIYTDVWVSMGEPDEVWQERLKLLKPYQVNQALLEKTGNPNVIFEHCLPSFHNAETKIGQQIYEKYGISEMEVTDDVFESKASVVFQEAENRMHTIKAVMVATLGEF

SEQ ID NO: 1839 - DNA, 1128 bp, Artificial Sequence
  Description of Artificial Sequence: synthetic nucleic acid sequence
atgaccatagacattgaatcaggagactttattgcatttattgggacaagtggtagcggtaaaacaactgcccttagaatgattaatcgtatgattgaatctacagagggagaaattaccattgacggtaaaaatatcaaagagcttaatccggttgagcttcgtcgcagtatcggttatgtcatacaacaaatcggcttaatgccacatatgacagtgaaagagaatattgttctcgtaccaaagttattaaaatggtcacaagagaaaaaggatgagaaagcgaaagaacttatacgcttagtagatttaccagaagaatatttagatcgatatccttcagaattatcaggtggtcaacaacaacgtattggtgttgtaagagcactcgcagctgaacaagatattattttaatggatgaaccgtttggtgcactcgatccaatcacaagagatacattacaagacttagtcaaaaaattacaacaacaattaggaaagacattcatttttgttacacatgatatggatgaagcaatcaaacttgcagataaaatatgtattatgacaaatggacaggtgattcaatatgacacgccagataatattttacgtagtccagcgaatgatttcgttagagactttattggtcagaatcgcttaattcaagatagacctaatatccgtacagttaaagatgcgatgattaaacccgtgacagtacatgttgaccgttctcttaatgatgcggtgaatattatgagagagaaaagagtcgatacgatatttgttgtcggcaatgatgagcatttattgggttatttagatattgaagatattaacgaaggattaagacatcataaagaacttatagatacgatgcaacgagatatttatagagtacgtattgatagtaagttacaagattctgttcgtacaattcttaaacgtaatgtacgtaatgtacccgttgttgacagtgataataaaacattattaggccttgtcacccgagctaaccttgtagacattgtttatgacagtatttggggagagttagaatcgggtaacaatgataatcattctgggattgttgaacccgagtccacaggagttgagacaccatga

SEQ ID NO: 1840 - protein, 375 aa, Artificial Sequence
  Description of Artificial Sequence: synthetic amino acid sequence
MTIDIESGDFIAFIGTSGSGKTTALRMINRMIESTEGEITIDGKNIKELNPVELRRSIGYVIQQIGLMPHMTVKENIVLVPKLLKWSQEKKDEKAKELIRLVDLPEEYLDRYPSELSGGQQQRIGVVRALAAEQDIILMDEPFGALDPITRDTLQDLVKKLQQQLGKTFIFVTHDMDEAIKLADKICIMTNGQVIQYDTPDNILRSPANDFVRDFIGQNRLIQDRPNIRTVKDAMIKPVTVHVDRSLNDAVNIMREKRVDTIFVVGNDEHLLGYLDIEDINEGLRHHKELIDTMQRDIYRVRIDSKLQDSVRTILKRNVRNVPVVDSDNKTLLGLVTRANLVDIVYDSIWGELESGNNDNHSGIVEPESTGVETP

SEQ ID NO: 1841 - DNA, 546 bp, Artificial Sequence
  Description of Artificial Sequence: synthetic nucleic acid sequence
atgattgtagcggttcctttaggcattttattatctaaaaaggaaaagctttcgaaagtgtcattgacgatagctggcgttttacaaacgatacctacattagcggtattagctttaatgattccattatttggtgtaggaaaaacacctgcaattatagcgttatttttatatgtattattaccaattttaaataatacgattataggcattcaaaatatagattccaaccttagagaagcaggacgtagtatgggaatgactaactttcaattgatgaaagatgtggagttgccactcgcattaccattaatacttagtggaattaggctgtcttctgtctacgttattagttgggcaacattggcaagttatgttggtgctggtggtttaggtgattttatctttaacggattagcgctatttgaaccgagtatgattattactgcaactattcttgtcactgctattgcacttattgtagattatgttttatcactgattgaaaaatgggttgtacctaaaggattaaaagtttccagataa

SEQ ID NO: 1842 - protein, 181 aa, Artificial Sequence
  Description of Artificial Sequence: synthetic amino acid sequence
MIVAVPLGILLSKKEKLSKVSLTIAGVLQTIPTLAVLALMIPLFGVGKTPAIIALFLYVLLPILNNTIIGIQNIDSNLREAGRSMGMTNFQLMKDVELPLALPLILSGIRLSSVYVISWATLASYVGAGGLGDFIFNGLALFEPSMIITATILVTAIALIVDYVLSLIEKWVVPKGLKVSR

SEQ ID NO: 1843 - DNA, 960 bp, Artificial Sequence
  Description of Artificial Sequence: synthetic nucleic acid sequence
atgaagaattataaaaaatatctaattgttttagtattatgtctaacagtgttatctggatgtaacttacccggtttaaaaaatagtcattcagatgacgatgttagaatcacaagtttaggaacaagtgaatcacaaattatatcgcacatgctgagattacttattgaacatgatacaaaaggtgaaattaaacctaccttaattaataatttaggttcaagtacgattcaacataatgctgtcacaagtggccaagctaatatgtcaggtacgcgttatacaggcactgacttaacaggggcgttgaaagaagatccgattaaagatcctaaaaaggccatgaaagcgactcaagaagggtttaaaaagaaatacaatcaaaccttcttcaattcatatggttttgaaaacacatatgcattgatagtaacaaaagagacagctaagaaatatcatttagaaactgtttcagacttagaaaagcatgctaaagatttaagagtaggtatggatagttcatggatggaccgtaaaggtgacggttatccagcatttaaaaaagaatatggctatagtttcggtacggtaagacctatgcaaattggtcttgtctatgatgcactgagttctggcaaattagacgttgccgtaggttattctacagatggacgtatttcagcatatgatttaaaagtgttgaaagatgatcgtcgattcttcccaccatacgatgccagtccacttgcatcagatcaattgttaaaagagaagccagagctcaaaccgattgttaaaaaattagaaggtaagatatcaacagaacaaatgcaagaattaaattatcaagctgatggtaaagggaaagagcctgcaacagttgcagaggacttcttgaaaaaacatcattattttgaagacgatgacaataaaaaagataaacagaaaggtggtcaataa

SEQ ID NO: 1844 - protein, 319 aa, Artificial Sequence
  Description of Artificial Sequence: synthetic amino acid sequence
MKNYKKYLIVLVLCLTVLSGCNLPGLKNSHSDDDVRITSLGTSESQIISHMLRLLIEHDTKGEIKPTLINNLGSSTIQHNAVTSGQANMSGTRYTGTDLTGALKEDPIKDPKKAMKATQEGFKKKYNQTFFNSYGFENTYALIVTKETAKKYHLETVSDLEKHAKDLRVGMDSSWMDRKGDGYPAFKKEYGYSFGTVRPMQIGLVYDALSSGKLDVAVGYSTDGRISAYDLKVLKDDRRFFPPYDASPLASDQLLKEKPELKPIVKKLEGKISTEQMQELNYQADGKGKEPATVAEDFLKKHHYFEDDDNKKDKQKGGQ

SEQ ID NO: 1845 - DNA, 648 bp, Artificial Sequence
  Description of Artificial Sequence: synthetic nucleic acid sequence
atggaagggaatttaatacaacaactcgttcactactatcaaatgaactttggctacctatgggaattgtttgttaatcatttgttaatgtctgtttacggtgttttactagcatgtttagtgggcatacctcttggtatcatcattgcacgatttggtaaattatcaggtgttattatcactattgcgaatattattcaaactgttccggttattgctatgttagcgatattaatgcttagtatgggacttggtatgaatacagtcatttttactgtgttcttatatgccttgcttcctattattaaaaatacgtatacaggaattaatgaagttgacccaaatattaaagatgctggaaaagggatgggtatgacgcgtaaccaagtattaactatgattgagttacctctgtcactttcagttattataggtggtattcggattgcccttgttgtagctattggtgtcgtagctgtaggttcatttattggtgcaccaacattaggtgatattgtgattagaggtacaaatgcaactgatggaacactatttattctagcaggtgccatacctatcgttatcattgtcatacttatagatgttttattacgtttattagagaaaaagctagatccagctacgtaa

SEQ ID NO: 1846 - protein, 215 aa, Artificial Sequence
  Description of Artificial Sequence: synthetic amino acid sequence
MEGNLIQQLVHYYQMNFGYLWELFVNHLLMSVYGVLLACLVGIPLGIIIARFGKLSGVIITIANIIQTVPVIAMLAILMLSMGLGMNTVIFTVFLYALLPIIKNTYTGINEVDPNIKDAGKGMGMTRNQVLTMIELPLSLSVIIGGIRIALVVAIGVVAVGSFIGAPTLGDIVIRGTNATDGTLFILAGAIPIVIIVILIDVLLRLLEKKLDPAT

SEQ ID NO: 1847 - DNA, 342 bp, Artificial Sequence
  Description of Artificial Sequence: synthetic nucleic acid sequence
gtgcaacatatgagtgggcctttatttatcattgttctgctctttatctttttctgtttaggatttatcgtgccgtcctcatcaggattagcagtactatctatgcctatctttgcgccattagctgatacagtaggtataccaagatttgttattgttacaacatatcaattcggtcagtatgcaatgttgttcttagcgcctactggacttgtaatggcaacacttcaaatgttaaacatgcgctactcacactggttacgtttcgtatggcctgttgtcgcgtttgttttaatatttggtggaggcttacttattacacaagttttaatatactcataa

SEQ ID NO: 1848 - protein, 113 aa, Artificial Sequence
  Description of Artificial Sequence: synthetic amino acid sequence
VQHMSGPLFIIVLLFIFFCLGFIVPSSSGLAVLSMPIFAPLADTVGIPRFVIVTTYQFGQYAMLFLAPTGLVMATLQMLNMRYSHWLRFVWPVVAFVLIFGGGLLITQVLIYS

SEQ ID NO: 1849 - DNA, 396 bp, Artificial Sequence
  Description of Artificial Sequence: synthetic nucleic acid sequence
atgacaatgataacgataggtatggcacctgctagaataaatagtgttccatcagttgcatttgtacctctaatcacaatatcacctaatgttggtgcaccaataaatgaacctacagctacgacaccaatagctacaacaagggcaatccgaataccacctataataactgaaagtgacagaggtaactcaatcatagttaatacttggttacgcgtcatacccatcccttttccagcatctttaatatttgggtcaacttcattaattcctgtatacgtatttttaataataggaagcaaggcatataagaacacagtaaaaatgactgtattcataccaagtcccatactaagcattaatatcgctaacatagcaataaccggaacagtttga

SEQ ID NO: 1850 - protein, 131 aa, Artificial Sequence
  Description of Artificial Sequence: synthetic amino acid sequence
MTMITIGMAPARINSVPSVAFVPLITISPNVGAPINEPTATTPIATTRAIRIPPIITESDRGNSIIVNTWLRVIPIPFPASLIFGSTSLIPVYVFLIIGSKAYKNTVKMTVFIPSPILSINIANIAITGTV

SEQ ID NO: 1851 - DNA, 411 bp, Artificial Sequence
  Description of Artificial Sequence: synthetic nucleic acid sequence
atgcctataatcgtattatttaaaattggtaataatacatataaaaataacgctataattgcaggtgtttttcctacaccaaataatggaatcattaaagctaataccgctaatgtaggtatcgtttgtaaaacgccagctatcgtcaatgacactttcgaaagcttttcctttttagataataaaatgcctaaaggaaccgctacaatcattgcaataaccaatgccactatcgatatgtacaaatgttcgaatgtctttgcaaataacataccactatgttccgaaataaactttatcatggtgtctcaactcctgtggactcgggttcaacaatcccagaatgattatcattgttacccgattctaactctccccaaatactgtcataaacaatgtctacaaggttag

SEQ ID NO: 1852 - protein, 136 aa, Artificial Sequence
  Description of Artificial Sequence: synthetic amino acid sequence
MPIIVLFKIGNNTYKNNAIIAGVFPTPNNGIIKANTANVGIVCKTPAIVNDTFESFSFLDNKMPKGTATIIAITNATIDMYKCSNVFANNIPLCSEINFIMVSQLLWTRVQQSQNDYHCYPILTLPKYCHKQCLQG

SEQ ID NO: 1853 - DNA, 690 bp, Artificial Sequence
  Description of Artificial Sequence: synthetic nucleic acid sequence
gtgaatcccttgcagtttggacctaatgaggattttgatgcttatccacgtcaactcgatgatgatgtggctgcagtaaaaaagttacaagtggattatgttttccatccgagtgtagatgaaatgtatccagaagaattaggtattcatctgaaagttggacacttggcacaagtattagagggagcacaaagacctggacacttcgaaggtgttgtgaccgtggtcaacaaactatttaatattgtgcaaccagattatgcctattttgggaaaaaggatgcacaacaattagctattgttgaaaagatggttaaagactttaatcttcctgtacatgttatcggtattgatatcgtaagagaaaaagatggtttagccaaaagctctagaaatatttacttgacctctgaagaacgaaaagaggcaaaacatttatatcaaagtctacgcttagcaaagaatttgtatgaagcgggtgaacgagatagcaatgagattataggtcaaatcgctgcgtatttaaacaaaaatattagtggacatattgatgatttgggtatttatagttatccaaatcttatacaacaatcaaagattcatggacgaatattcatatcattggcagttaaattttctaaagcaagattgatagataatataattattggagatgactatattgattag

SEQ ID NO: 1854 - protein, 229 aa, Artificial Sequence
  Description of Artificial Sequence: synthetic amino acid sequence
VNPLQFGPNEDFDAYPRQLDDDVAAVKKLQVDYVFHPSVDEMYPEELGIHLKVGHLAQVLEGAQRPGHFEGVVTVVNKLFNIVQPDYAYFGKKDAQQLAIVEKMVKDFNLPVHVIGIDIVREKDGLAKSSRNIYLTSEERKEAKHLYQSLRLAKNLYEAGERDSNEIIGQIAAYLNKNISGHIDDLGIYSYPNLIQQSKIHGRIFISLAVKFSKARLIDNIIIGDDYID

SEQ ID NO: 1855 - DNA, 372 bp, Artificial Sequence
  Description of Artificial Sequence: synthetic nucleic acid sequence
atgaactcaaaaatccatagagctagagttacagaatctaatttaaattacgttggaagcataacaatagatgccaatatattagatgcggttgatattttacccaatgaaaaggttgctattgttaataataataatggtgctcgatttgaaacatatgtcattgctggagaacgtggtagtggaaagatgtgtttaaatggcgcggcttcaagactagttgaagttggagacgtcattattattatgacatatgcacaattaaatgaagatgaaatggtagatcactcaccaaaagtagctgtgttaaatgaaaataatgaaattatagaaatgataaatgagaaagaaaatacgatatcaaatgtataa

SEQ ID NO: 1856 - protein, 123 aa, Artificial Sequence
  Description of Artificial Sequence: synthetic amino acid sequence
MNSKIHRARVTESNLNYVGSITIDANILDAVDILPNEKVAIVNNNNGARFETYVIAGERGSGKMCLNGAASRLVEVGDVIIIMTYAQLNEDEMVDHSPKVAVLNENNEIIEMINEKENTISNV

SEQ ID NO: 1857 - DNA, 1011 bp, Artificial Sequence
  Description of Artificial Sequence: synthetic nucleic acid sequence
atgcattgtccgaattgcggtaatccaatagaagatgatgatttattctgtggtgaatgtggacataaaataagtcgacatccacagtcagtcagaaatgcagaaagtgaaataacaaaagctgaaaagaatgatgaagaacaaaacataacatcaaataataaagaaaacaacgcagcgactcatcaaaatgttgattcaacatctcatgatgagactagatcaaatgaaaatgacgtagcagattcaacattacaatctaagcagtcacataatgatacccaacaatcaaatctctctacataccatcaaagacctcaacatcgagaaattcctcaaaatcaacacaatcacgatcaacagcaaagtcaaataggtcaacaagctaaacaagtaacaaatgaaagtaaaggtttctttaaaagtgcatttactgcacctgataaaatcattcaaactaatcatgttttcagttttaaattattattatcattattaataatcggttttattgtattagcaattttactcgcttccgtaataccagttgagattggtattttcggtactacaagaggaagtttggtaacgagtatcatttttggtattattctatttttggttgtcatagtaggtgcaatatttgggcttacacgtttagtagttagacaacctattgcatttaaaaaagtattatcagactatgtgttaattaatagtgtttcgttagcaattttaattatttctgtaattttaatattagcagaatcatacagctttggcggaagtatagcattattgtctttattattatttattgcttctggtatttatctaattgcgaagtatagcactggtaatcaaacaagaatatccagcttttatggtgtgattatttatatcattattttgttcttatttattcgtatttttggggaggcatttttccatcaaatatttggtgattttatagaagaactaggggatttatttgaaggaggaacttattaa

SEQ ID NO: 1858 - protein, 336 aa, Artificial Sequence
  Description of Artificial Sequence: synthetic amino acid sequence
MHCPNCGNPIEDDDLFCGECGHKISRHPQSVRNAESEITKAEKNDEEQNITSNNKENNAATHQNVDSTSHDETRSNENDVADSTLQSKQSHNDTQQSNLSTYHQRPQHREIPQNQHNHDQQQSQIGQQAKQVTNESKGFFKSAFTAPDKIIQTNHVFSFKLLLSLLIIGFIVLAILLASVIPVEIGIFGTTRGSLVTSIIFGIILFLVVIVGAIFGLTRLVVRQPIAFKKVLSDYVLINSVSLAILIISVILILAESYSFGGSIALLSLLLFIASGIYLIAKYSTGNQTRISSFYGVIIYIIILFLFIRIFGEAFFHQIFGDFIEELGDLFEGGTY

SEQ ID NO: 1859 - DNA, 1332 bp, Artificial Sequence
  Description of Artificial Sequence: synthetic nucleic acid sequence
atgaaatattgcagtaattgtggtcaacctcttcgagaaggtgtaaaggtgtgtacaaattgtggtacgcctgtgagaaatgatggacctaattataaacattcagaacaacgttattctcatcaacaaccacgttccaataagagtaataaaaaaacttggttgattgttactatagtgttagccattatcattgctttggtagtaatctttactatagctaaaaatcaaatgtctccagaaaaacaagcgactcacattgcacatgctatcaaaaaagacgatgctaaatcattatctaagcaattaacatcaaacgatcatcgtttaaatgaagaagaagcacgtgcgtacttaaagtatattaaagcagaaagtgatttaaagcatgttgctgacaaagttgaagaaaacaccaaagatattaaaaataatcactataacaatttatctgtagatgcaaatgataataatattttaaatatatctaaagacgggaaaaaatatgttttttttgataactatcaatttaatgttcctcaaaaaacaattacgctcgtttcaagtgatagtggtgaaattacttatgaatttaacggggataaacatcatatttctgtagaagaagatgacgataaagaattaggaacatttcctatcggtgattataatttaaaagcatcaaaagacatggaaggtaaaaattttaaaggcgctattacaattgatatgagtgaaagtgatagtattgcatatgaatcgtttaaacaaaaacgttttaatgttgatactgaaggcggatatatattagataatgtaaaaatatatgctaatggtaaagaaataggcgatggtttttcatcagaaacatatggtccttatgatccagatgaagaagttatcgttcacgctgaaggttcatacgaaggaaaaacttttaaatcaaattcggtcaatgtagcaagtgcaagcgaaaaagatggtggtgtgacagatgtcacagtcaaattcgatgaagaagctattgatcagtatgtcgataaaaaattagatgaaaaatacgatgattcagatgacgagtcagataacgattcaagtagtggcgaagtaacgcgtgaaaatgtaattgataaagtagagtcatatgaaggacatacactagatactgatacgtatacgtataaagaacctgaaaaaaccggtgatggtaaatggggtttttcattcttagataaagatggagatttagctggatcgtacacggtagacattgacgacggttatgttacagaatatgacgaagatggtgaagaagttggatctggttattaa

SEQ ID NO: 1860 - protein, 443 aa, Artificial Sequence
  Description of Artificial Sequence: synthetic amino acid sequence
MKYCSNCGQPLREGVKVCTNCGTPVRNDGPNYKHSEQRYSHQQPRSNKSNKKTWLIVTIVLAIIIALVVIFTIAKNQMSPEKQATHIAHAIKKDDAKSLSKQLTSNDHRLNEEEARAYLKYIKAESDLKHVADKVEENTKDIKNNHYNNLSVDANDNNILNISKDGKKYVFFDNYQFNVPQKTITLVSSDSGEITYEFNGDKHHISVEEDDDKELGTFPIGDYNLKASKDMEGKNFKGAITIDMSESDSIAYESFKQKRFNVDTEGGYILDNVKIYANGKEIGDGFSSETYGPYDPDEEVIVHAEGSYEGKTFKSNSVNVASASEKDGGVTDVTVKFDEEAIDQYVDKKLDEKYDDSDDESDNDSSSGEVTRENVIDKVESYEGHTLDTDTYTYKEPEKTGDGKWGFSFLDKDGDLAGSYTVDIDDGYVTEYDEDGEEVGSGY

SEQ ID NO: 1861 - DNA, 687 bp, Artificial Sequence
  Description of Artificial Sequence: synthetic nucleic acid sequence
atgaaaaatcaaaaaatcaactatgataaagtattaagaaagataatttctcaatgggaacgtgatggagaacgccctaaaatcttacttcatagttgttgtgcaccttgtagtacatatacgttagagtttttaacacaatatgcggatatagcgatttattttgcgaatcctaatatacatcccaaaagtgaatatttaagacgtgctaaagttcaagaacaatttgtaaatgattttaataataaaacaggtgcaaatgtaaagtatattgaagccgaatatgaaccgcataaatttatgaaaatggcaaaagataaaggtttaactgaagagccggaaggtggactaagatgtacggcttgtttcgagatgcgattagaaattgttgcaaaagctgctttagaacatggttacgattattttggtagtgcaatcacactctctccaaagaaaaatgcgcaattaatcaatgaactaggtatggatgtacaaaatatatataatgtaaaatatttaccaagtgattttaaaaagaataaagggtatgaacgttctatcgaaatgtgtaatgattataatatttttagacaatgttattgtggttgtgtatttgcagcgatgaagcaaggtatagattttaaacaaataaataaagatgctcaagcatttttacaacaattttaa

SEQ ID NO: 1862 - protein, 228 aa, Artificial Sequence
  Description of Artificial Sequence: synthetic amino acid sequence
MKNQKINYDKVLRKIISQWERDGERPKILLHSCCAPCSTYTLEFLTQYADIAIYFANPNIHPKSEYLRRAKVQEQFVNDFNNKTGANVKYIEAEYEPHKFMKMAKDKGLTEEPEGGLRCTACFEMRLEIVAKAALEHGYDYFGSAITLSPKKNAQLINELGMDVQNIYNVKYLPSDFKKNKGYERSIEMCNDYNIFRQCYCGCVFAAMKQGIDFKQINKDAQAFLQQF

SEQ ID NO: 1863 - DNA, 663 bp, Artificial Sequence
  Description of Artificial Sequence: synthetic nucleic acid sequence
atgaactatcttctaattgatacgtcaaaccaacctttatcagtagctattatgaaagataatgaagtgattgctgaaaaaacaactgatatcaaaaagaatcattcagtgcaactcatgcccgaaatagcagaaattcttacagaaagtaaaataaataaaacagaaataactgatatcgtggtagcggaaggtccaggttcatataccggtcttagaataggggttactgttgctaaaacattagcgtatgcattaaacactaacttatatggtgtctcatcacttaaagcacttgctagcacagtaaaagacagtacgaagttgttagtacccatttttgatgctagaagagaagcagtttatgcaggtgtttatcaatatcaggacaatgaattaataaccattattgatgacacttatatacctatttttgaacttattgaaaaacttcatcaattaaaccaaccttatgtgtttgtaggatttcatatcgaaaaaataaaacatttattagacagtgacatcgtagaacagttaccacaagcttcaagtatgaagcaattaatccaaaaaccagaaaatatacattcatttactcctaaatatcataaattatcagaggcggaacgaaattggttaaaccaacaagagaacaattga

SEQ ID NO: 1864 - protein, 220 aa, Artificial Sequence
  Description of Artificial Sequence: synthetic amino acid sequence
MNYLLIDTSNQPLSVAIMKDNEVIAEKTTDIKKNHSVQLMPEIAEILTESKINKTEITDIVVAEGPGSYTGLRIGVTVAKTLAYALNTNLYGVSSLKALASTVKDSTKLLVPIFDARREAVYAGVYQYQDNELITIIDDTYIPIFELIEKLHQLNQPYVFVGFHIEKIKHLLDSDIVEQLPQASSMKQLIQKPENIHSFTPKYHKLSEAERNWLNQQENN

SEQ ID NO: 1865 - DNA, 423 bp, Artificial Sequence
  Description of Artificial Sequence: synthetic nucleic acid sequence
atgagtgtggaagatgttcctaaagtttttgatatagaaagaaatagtttctcacacagttcgtggtcaatcgatgcattttatcatgaaatagaaaacaacgaatttgctacatattttgttatagaatttagtgacaaaataattggatatgttggtttatggttagtcgttgatcaagcacaaattacaacgatagctatatcaaaggcatttagaggctatggtcttgggcaacttttacttaaatatgcaatgaactatgcacgtttttcttgtgatgtgatgagtttagaagtaagaatagataatgatgttgcacaacatgtttataggaatttgggattccaaaatggtggaaaaagaaagaattattatggagaaggcgaggacgcattagtcatgtgggtgaatttgaaatga

SEQ ID NO: 1866 - protein, 140 aa, Artificial Sequence
  Description of Artificial Sequence: synthetic amino acid sequence
MSVEDVPKVFDIERNSFSHSSWSIDAFYHEIENNEFATYFVIEFSDKIIGYVGLWLVVDQAQITTIAISKAFRGYGLGQLLLKYAMNYARFSCDVMSLEVRIDNDVAQHVYRNLGFQNGGKRKNYYGEGEDALVMWVNLK

SEQ ID NO: 1867 - DNA, 441 bp, Artificial Sequence
  Description of Artificial Sequence: synthetic nucleic acid sequence
atgtatcttggtggtagtactgaaattaaaacatcacaacttaaaggtaaggatgactacttaaatgatatatactattaccacccaagcgtaaaaagtattatggaatattcaaatcttttacgtaatgatttagatttatctaaaataacaaacaaaaacgatttcttagatcaaagagtcattaaacgatatggttcactcgtacccttaacagaattagatgaagacttattgcgtaagaaccaaaaggaatcgactgatagtcagaaagagtctgattcctcatcacaaaataatgatgaagaagatcaaactaacgaacaaacagaccaaaatagcttaaacggaaacgaacagtacccaaatcaacaagacaacaatcaaaccaatggtgaaaatggtatgataaataatgacaattatccttacgcacaataa

SEQ ID NO: 1868 - protein, 146 aa, Artificial Sequence
  Description of Artificial Sequence: synthetic amino acid sequence
MYLGGSTEIKTSQLKGKDDYLNDIYYYHPSVKSIMEYSNLLRNDLDLSKITNKNDFLDQRVIKRYGSLVPLTELDEDLLRKNQKESTDSQKESDSSSQNNDEEDQTNEQTDQNSLNGNEQYPNQQDNNQTNGENGMINNDNYPYAQ

SEQ ID NO: 1869 - DNA, 471 bp, Artificial Sequence
  Description of Artificial Sequence: synthetic nucleic acid sequence
atgagtcgtaaaacatatgaaaaaattgctaatattaatggtatgttcaacgtacttgaacaacaaatcattcatagtaaagatatggcattatttaggaatgaatttttctatgtaaaccatgaacacagagaaaattatgaagcgcttttgatctactacaaggatagtttagataatcccgttgtagatggcgcatgttacattcttgcattacctgaaatatttaataaggttgatgtgtttgagtctgatttaccttttacctgggtttatgatgaaaatggactttctgatacaatgaaaagtatcagtgtgccccttcaatatcttattgcagccgctttggaagtgactgatgtaaatatatttaagccttcaggttttactatgggcatgaacaattggaatattgcccaattacgtattttttggcaatactgcgctatcgtcagaaaagaggctttataa

SEQ ID NO: 1870 - protein, 156 aa, Artificial Sequence
  Description of Artificial Sequence: synthetic amino acid sequence
MSRKTYEKIANINGMFNVLEQQIIHSKDMALFRNEFFYVNHEHRENYEALLIYYKDSLDNPVVDGACYILALPEIFNKVDVFESDLPFTWVYDENGLSDTMKSISVPLQYLIAAALEVTDVNIFKPSGFTMGMNNWNIAQLRIFWQYCAIVRKEAL

SEQ ID NO: 1871 - DNA, 396 bp, Artificial Sequence
  Description of Artificial Sequence: synthetic nucleic acid sequence
atgctagatgattgctttgaaataagaaagtgtgttttcgtcgaagaacaaggcgtaccactcgaaaatgaatttgatcaatatgaagattactcattccatatagtgggatatataaatggtgttcctatggcaactgctagaattagacctttaaatactcatatttgtaaaattgaacgtgtagcaatcatcaagtggtatcgtggtcttgggtacggtaaaaatttaatacatgctattgaaacaattgcaaaaaaacaccaatacaatgaactcactatgaatgctcaattacaagctcgagacttttacttaaaactaggttactcaccttttggtaaagtattcttagaagaaaatataaatcatattagtatgaataagtttttataa

SEQ ID NO: 1872 - protein, 131 aa, Artificial Sequence
  Description of Artificial Sequence: synthetic amino acid sequence
MLDDCFEIRKCVFVEEQGVPLENEFDQYEDYSFHIVGYINGVPMATARIRPLNTHICKIERVAIIKWYRGLGYGKNLIHAIETIAKKHQYNELTMNAQLQARDFYLKLGYSPFGKVFLEENINHISMNKFL

SEQ ID NO: 1873 - DNA, 525 bp, Artificial Sequence
  Description of Artificial Sequence: synthetic nucleic acid sequence
atgaaagcaccaagaattgaagaagattatacgtcatatttccctaaatatggctatagaaacggtgtgggacgtcctgaaggtatcgttgttcatgatactgcaaatgataactcaacaatcgatggcgagattgctttcatgaaacgtaattacacaaatgcattcgtacacgcatttgttgatggcaatagaattatagaaacagctccgacagattacttatcttggggtgcaggtccatatggaaatcaacgttttatcaatgttgaaatcgtccatacacatgattatgattcatttgcacgttcaatgaacaactacgctgattatgctgcaacgcaattgcaatattataatttaaaacctgatagcgctgaaaacgatggaagaggaacagtttggacacatgctgctatctctaacttcttaggaggtactgatcacgctgaccctcaccaatatttaagaagtcacaattatagctatgcagaattatatgacttaatttatgaaaaatattta

SEQ ID NO: 1874 - protein, 175 aa, Artificial Sequence
  Description of Artificial Sequence: synthetic amino acid sequence
MKAPRIEEDYTSYFPKYGYRNGVGRPEGIVVHDTANDNSTIDGEIAFMKRNYTNAFVHAFVDGNRIIETAPTDYLSWGAGPYGNQRFINVEIVHTHDYDSFARSMNNYADYAATQLQYYNLKPDSAENDGRGTVWTHAAISNFLGGTDHADPHQYLRSHNYSYAELYDLIYEKYL

SEQ ID NO: 1875 - DNA, 1014 bp, Artificial Sequence
  Description of Artificial Sequence: synthetic nucleic acid sequence
atgggtacagattataaagtagatattgaaggtaaatcatatacaccacaagaactttcagcaatgattttacaaaatttaaaaagcactgcagaaaactatttaggggatacagtagacaaagctgttatcactgtccctgcttatttcaatgatggtgaacgtcaagcaactaaagatgctggtaaaattgcaggcttagaagttgaacgtattatcaacgaacctacagctgctgcacttgcttatggtttagataaaactgaaacagatcaaaaggttctcgtatttgacttaggtgggggaacatttgacgtatctattctagagttaggcgacggcgtatttgaagtattatcaactgccggagataataaacttggtggcgatgacttcgaccaagtgattattgattatcttgtttcagaattcaagaaagagaatggtgtagatttatcacaagataaaatggcattacaaagattaaaagatgctgccgaaaaagctaaaaaagatttatcaggtgtttctcaaactcaaatttcattaccattcatttctgctggagaaaatggcccattacacttagaaattagtttaactcgttctaaatttgaggaattagctgattcattaatcaaaaaaactatggaaccgactcgtcaagcattaaaagatgctggtttatctacttcagaaatagatgaagttattttagttggtggttcaacacgtattccggccgttcaagaagctgttaaaaaagaaattgggaaagaaccacataaaggtgttaacccagatgaagttgtagcaatgggtgctgctattcaagctggtgtaatcacaggtgatgttaaagatgtagtattacttgatgttacgccattatctttaggtatcgaaattatgggtggacgtatgaacacattaattgaacgtaatactactattccaacttccaaatcacaagtttattctacagcagctgacaatcaaccagcagtagtgtaa

SEQ ID NO: 1876 - protein, 337 aa, Artificial Sequence
  Description of Artificial Sequence: synthetic amino acid sequence
MGTDYKVDIEGKSYTPQELSAMILQNLKSTAENYLGDTVDKAVITVPAYFNDGERQATKDAGKIAGLEVERIINEPTAAALAYGLDKTETDQKVLVFDLGGGTFDVSILELGDGVFEVLSTAGDNKLGGDDFDQVIIDYLVSEFKKENGVDLSQDKMALQRLKDAAEKAKKDLSGVSQTQISLPFISAGENGPLHLEISLTRSKFEELADSLIKKTMEPTRQALKDAGLSTSEIDEVILVGGSTRIPAVQEAVKKEIGKEPHKGVNPDEVVAMGAAIQAGVITGDVKDVVLLDVTPLSLGIEIMGGRMNTLIERNTTIPTSKSQVYSTAADNQPAVV

SEQ ID NO: 1877 - DNA, 306 bp, Artificial Sequence
  Description of Artificial Sequence: synthetic nucleic acid sequence
atgctcctttctgctatactccttataaaaggaggtgaaaatatgaaaagttttattattgcgtatgatttaaataaccaaaaggattatccaaaattaatagagcgtattgaggattatcctaatgttgctaaaatcaataaatcagtttggtttattaattcaactaatgatgctaaaactattagaaacgaattaaaaatgtttattgatagcgatgatagtttgttcgttggtaagctgactggtgaagccgcatggtctaatgtaatttgcagttcacaacatttaaaagattatctttag

SEQ ID NO: 1878 - protein, 101 aa, Artificial Sequence
  Description of Artificial Sequence: synthetic amino acid sequence
MLLSAILLIKGGENMKSFIIAYDLNNQKDYPKLIERIEDYPNVAKINKSVWFINSTNDAKTIRNELKMFIDSDDSLFVGKLTGEAAWSNVICSSQHLKDYL

SEQ ID NO: 1879 - DNA, 315 bp, Artificial Sequence
  Description of Artificial Sequence: synthetic nucleic acid sequence
atgtgcttttcaaaaagaatgaaacaatcaagagaaaaacaaggtatgactttagctgaactaggaagaaaaatcggtaaaactgaagctactgtacaacgttatgaaagcgggaatattaaaaatcttaaaaatgatactattgaaagtatagctactgcattaaatgttaaccctgctttcttgatgggttggatagaagaagttgaggaacaaccacaacatcgtgcagcgcatcttgatggtgatttaactgacgaagaatggcaagaaattcttgattacgctgaatacataagaagtaaaagaaaataa

SEQ ID NO: 1880 - protein, 104 aa, Artificial Sequence
  Description of Artificial Sequence: synthetic amino acid sequence
MCFSKRMKQSREKQGMTLAELGRKIGKTEATVQRYESGNIKNLKNDTIESIATALNVNPAFLMGWIEEVEEQPQHRAAHLDGDLTDEEWQEILDYAEYIRSKRK

SEQ ID NO: 1881 - DNA, 471 bp, Artificial Sequence
  Description of Artificial Sequence: synthetic nucleic acid sequence
gtgttttatgtggggaaatatgaagatatgttaattgaacatgactatattgaagtcattgaatgtgataacttacctaaaaggttatctggtttgtggcttggagatatgattttaattaatcgtaacttgcctattacttccaaacttgaaacacttgcagaggaactcgctcataacgaacttacatatggaaatatagttgatcaaagtagttttaatcatagaaaatttgaaggttatgcacgtaggttagcctatgaaaagttaatccctcttaaagatattgtaaaagcatttttgcaaggcattcatgacttgtatgaacttgctaatttttttgaggttacagaaggttttgtcctacaaagtattgaacattataaacaaaaatatggttattccactcggtatagcaaatacgttattcaatttgagccgttacgagtgtttgaatataaagatatatag

SEQ ID NO: 1882 - protein, 156 aa, Artificial Sequence
  Description of Artificial Sequence: synthetic amino acid sequence
VFYVGKYEDMLIEHDYIEVIECDNLPKRLSGLWLGDMILINRNLPITSKLETLAEELAHNELTYGNIVDQSSFNHRKFEGYARRLAYEKLIPLKDIVKAFLQGIHDLYELANFFEVTEGFVLQSIEHYKQKYGYSTRYSKYVIQFEPLRVFEYKDI

SEQ ID NO: 1883 - DNA, 594 bp, Artificial Sequence
  Description of Artificial Sequence: synthetic nucleic acid sequence
atgggccctcaatattggtggccagcagaaacgccaatagaaatgatgcttggggcaattctagtccaaaatactaattggaacaatgcagatatagcgttatcaagattaaaagaagaaacttcttttaatgcacagacgatattgaaaatgcctttagaatcgttgcagcaagtgatacgttcgagtggtttctataaaaataaagctaaggctatacaggcattgttactatggttaaatcaacatcattttgattatagtagtatagctaagttatacggtgatagcttaagaaaagaattactcaccatccgtggtataggtgaagagaccgccgatgtcttaatagtatatatttttaaaggtaaagaattcatacctgatagttatactagacgtatttttagaaaattgggatatcaacatacagaaagttatcataaattgaaacaggaattaacacttcctgaatcattttcaaatcaagatgcaaatgagtttcacgctttattagataattttgggaaaaattattttaatggtaaggggaaacaacgctatacctttttagatacctattttaaaaaataa

SEQ ID NO: 1884 - protein, 197 aa, Artificial Sequence
  Description of Artificial Sequence: synthetic amino acid sequence
MGPQYWWPAETPIEMMLGAILVQNTNWNNADIALSRLKEETSFNAQTILKMPLESLQQVIRSSGFYKNKAKAIQALLLWLNQHHFDYSSIAKLYGDSLRKELLTIRGIGEETADVLIVYIFKGKEFIPDSYTRRIFRKLGYQHTESYHKLKQELTLPESFSNQDANEFHALLDNFGKNYFNGKGKQRYTFLDTYFKK

SEQ ID NO: 1885 - DNA, 399 bp, Artificial Sequence
  Description of Artificial Sequence: synthetic nucleic acid sequence
atgcaaaatttcaatttaaatgaacagtatgaaaaagaagcagcaagtaagtatggagatactcattattatcaagcatataaagataaacaaaaatgtaaggatgaatcagaacagcaaaatcattttgaggaaattaataagcaattaaatatgttttttgacgaaatgaatcaactatacttaaacaaagtttctatacttgaagcaagtggaaaaactaagaaattacaatgtattttgaaagaacaagttcctaattgtgacaatcaatttttagaatatatagctcagatttatattgaggacgagcgatttgtaaagtttattaacaagcaacgtgaacgtggtttgaatttatacatttctgacgcgataaaaacatttattaaattataa

SEQ ID NO: 1886 - protein, 132 aa, Artificial Sequence
  Description of Artificial Sequence: synthetic amino acid sequence
MQNFNLNEQYEKEAASKYGDTHYYQAYKDKQKCKDESEQQNHFEEINKQLNMFFDEMNQLYLNKVSILEASGKTKKLQCILKEQVPNCDNQFLEYIAQIYIEDERFVKFINKQRERGLNLYISDAIKTFIKL

SEQ ID NO: 1887 - DNA, 900 bp, Artificial Sequence
  Description of Artificial Sequence: synthetic nucleic acid sequence
gtgatgctccaaatgaaaagtaaactatggatagttatatgtgcattgattgtagtactggctgcatgtggtcaagatgccaatcattcatctaataataaagacactgaaaaaagcgataaaaaatatcatagaattatttcgctcattcctagtaacacagaaattttatatcgcttaggaatcggagaagatatagttggtgtatccactgtggatgattatcctaaagatgtaaaaaaaggtaaaaaacaattcgatgcgatgaatttaaataaagaagaattaataaaagctaaaccggatttgattttagcgcatgagtcacagaaaaattctgcaggtaaagtgctaaagtcacttaaagataagggagtaaaagtcgtttatgtgaaagatgcacaatcgattgatgaaacttatgatacttttaaatcaattggacaattaacggatcgtgaaaaacaagctaaagaacttgttgatgaaacaaaacacaatgtagaaaaaatcattaactccgttcctaaacatcataagaaacaagaagtgtttatggaagtatcgtctaaaccagacatttacactgccggaaaagataccttctttaacgatatgttagagaaactagatgctaaaaatagttttgatgatgttaaaggttggaaatcagtaagtaaagaaagcattattaaacgtaatcctgatattctgatttccacagaaggtaaatcaaaatcagactacatagaaatgataaaaaaacgtggcggttttgataaaattaatgctgttaaaaatacacgtattgaaacagtagatggggatgaagtttctcgaccaggtcctcgtattgatgaaggtctaaaggatttaagagacgatatatataaaaaatag

SEQ ID NO: 1888 - protein, 299 aa, Artificial Sequence
  Description of Artificial Sequence: synthetic amino acid sequence
VMLQMKSKLWIVICALIVVLAACGQDANHSSNNKDTEKSDKKYHRIISLIPSNTEILYRLGIGEDIVGVSTVDDYPKDVKKGKKQFDAMNLNKEELIKAKPDLILAHESQKNSAGKVLKSLKDKGVKVVYVKDAQSIDETYDTFKSIGQLTDREKQAKELVDETKHNVEKIINSVPKHHKKQEVFMEVSSKPDIYTAGKDTFFNDMLEKLDAKNSFDDVKGWKSVSKESIIKRNPDILISTEGKSKSDYIEMIKKRGGFDKINAVKNTRIETVDGDEVSRPGPRIDEGLKDLRDDIYKK

SEQ ID NO: 1889 - DNA, 450 bp, Artificial Sequence
  Description of Artificial Sequence: synthetic nucleic acid sequence
gtgctaaagcaaacgttgattatagaaattgcaagatttgttcctagtatgaaacttaaaaataaaatatataaaaagcttttaaaaatggatgtcgggaatcatacttcatttgcatataaagtgttgcctgatttgttttatccagaatacatttcggttggcaagaatacagtcattggttataatacaacaatattaactcacgaagtacttgttgatgagtggagagtaggaaaagtcattataggcgattacactttaataggtgcaaatacgacaatattaccaggaataaccataggaaatcatgttaaaattggtgcgggtacggttgtgtctaaagatgttcccgattacagttttgcatttggtaatcctatgcaaatacaattagattcaggaggtgacaatgaatggcacaaaaagaaaataacatcattccaatga

SEQ ID NO: 1890 - protein, 149 aa, Artificial Sequence
  Description of Artificial Sequence: synthetic amino acid sequence
VLKQTLIIEIARFVPSMKLKNKIYKKLLKMDVGNHTSFAYKVLPDLFYPEYISVGKNTVIGYNTTILTHEVLVDEWRVGKVIIGDYTLIGANTTILPGITIGNHVKIGAGTVVSKDVPDYSFAFGNPMQIQLDSGGDNEWHKKKITSFQ

SEQ ID NO: 1891 - DNA, 868 bp, Artificial Sequence
  Description of Artificial Sequence: synthetic nucleic acid sequence
atgcttgaaaaaacattcgaagtcacgtatacaaatgaacaaaaaattgaattagaagcacaattgttttcaacacaacttttatttcaatttctcttttcgcaaggtaggttagaagaagcccgaacatatattttgaatcaatcttacgagatacaacagcatagggtgattaggaatttacttgcaatgtgttatttgtatctaggtgagtatgatagcgccaaagcaatgtttgaagaacttttaaaggaagataattcagacgtgcatgcactttgtcactacacattattactttataataaaaaagaaacagaaaaatatcaaaaatatcttaaaatacttaataaagtagtaccactaaatgacgacgaaacctttaaattaggaatcgtattgagttatttaaaacagtatcgtgcttctcaaaatttactttatccactttataaaaaaggtaaatttgtctctattcaaatgtataatgcattgagtttcaatttttattacctaggaaataaagacgaaagtattgagatgtggaacaagctcactcaaatttctgaagttgatgttggttatgcaccttgggtaattgaggaaagtaaaacggtatttgaatcacgagtgttaccattattactagatgataataatcattatcgactttacggtatttttttacttcatcaattaaatggaaaagaaatactaatgactgaagatatttggtcaattcttgaatcaatgaatgactatgagaaactttatctcacatatttggtacaaggactcacactcaataaattagattttatacacagaggtatgcaaaggttgtataattttaagaaattccaagaaa

SEQ ID NO: 1892 - protein, 290 aa, Artificial Sequence
  Description of Artificial Sequence: synthetic amino acid sequence
  MOD_RES (290): variable amino acid
MLEKTFEVTYTNEQKIELEAQLFSTQLLFQFLFSQGRLEEARTYILNQSYEIQQHRVIRNLLAMCYLYLGEYDSAKAMFEELLKEDNSDVHALCHYTLLLYNKKETEKYQKYLKILNKVVPLNDDETFKLGIVLSYLKQYRASQNLLYPLYKKGKFVSIQMYNALSFNFYYLGNKDESIEMWNKLTQISEVDVGYAPWVIEESKTVFESRVLPLLLDDNNHYRLYGIFLLHQLNGKEILMTEDIWSILESMNDYEKLYLTYLVQGLTLNKLDFIHRGMQRLYNFKKFQEX

SEQ ID NO: 1893 - DNA, 726 bp, Artificial Sequence
  Description of Artificial Sequence: synthetic nucleic acid sequence
atgaatgaactaacggtttatcatttcatgtcagataagcttaatttatacagtgatattggtaatatcatggcattaaaacaaagagctaaaaaaagaaatattaagataaatgttaaagaaatcaatgagactgagggagtcacatttgatgattgtgatattttcttcattggtggtgggagtgatagggaacaagcgcttgccacgaaagaattaagtaaaattaaaacttctttaaaaaatgcaattgaagatggtatgcctgggttaactatatgcggtggttatcaatttttaggtcataagtatattactcctgatggtaccgagttagaaggattgggtgttcttgacttctataccgagtctaaaaaagaacgcttaactggagatatcattatagagagtgatacttttggcacgattgttggatttgaaaatcatggtggtagaacatatcatccgtatggaacattaggccgagtaacgtatggttatggtaataatgataacgatcgaaaagaaggtatacactataaaaatctattaggttcttatcttcacggtccaattttaccaaaaaatcatgaaataactgattatctacttgagaaagcatgtgaaagaaaagggatactatttgagcctaagaagatcgataacacagaggaagaagctgctaagcaagttctgattaaacgtgcaaaagaaaataaaaaataa

SEQ ID NO: 1894 - protein, 241 aa, Artificial Sequence
  Description of Artificial Sequence: synthetic amino acid sequence
MNELTVYHFMSDKLNLYSDIGNIMALKQRAKKRNIKINVKEINETEGVTFDDCDIFFIGGGSDREQALATKELSKIKTSLKNAIEDGMPGLTICGGYQFLGHKYITPDGTELEGLGVLDFYTESKKERLTGDIIIESDTFGTIVGFENHGGRTYHPYGTLGRVTYGYGNNDNDRKEGIHYKNLLGSYLHGPILPKNHEITDYLLEKACERKGILFEPKKIDNTEEEAAKQVLIKRAKENKK

SEQ ID NO: 1895 - DNA, 756 bp, Artificial Sequence
  Description of Artificial Sequence: synthetic nucleic acid sequence
atgattgttaaaactgatgaagaattacaagcgttaaaagaaataggttacatttgtgcaaaagtcagagatactatgaaagaagctactaaacctggagtgactacccgtgaattagatcatattgccaaagatttatttgaagagcatggggcgatatcagcgcctattcacgatgaaaacttcccaggtcaaacttgcattagtgttaacgaagaggtcgcgcatggaatccctggtaaacgagtaattcgtgaaggtgacctagttaatattgatgtatcagctttaaaaaatgggtactatgctgacactggaatttcatttgttgtagggaaatcagatcaaccacttaaacaaaaggtttgtgacgtagccacaatggcttttgaaaatgctatgaaaaaggtgaaaccaggtacaaaattaagtaatattggaaaagctgttcatgcaactgcacgccaaaatgacttgactgtgattaaaaatttaactggacatggtgttggacaatcacttcatgaggcacctaatcatgtcatgaattattttgatcctaaagataaaacattattaaaagaagggcaagtcattgcagtagaaccattcatatcaacacatgctacatttgtaactgaaggtaaaaatgaatgggcttttgaaactaaagataaaagttatgtcgctcaaattgaacacacggttatagttacaaaagatggtccgttacttacaactaagattgatgattaa

SEQ ID NO: 1896 - protein, 251 aa, Artificial Sequence
  Description of Artificial Sequence: synthetic amino acid sequence
MIVKTDEELQALKEIGYICAKVRDTMKEATKPGVTTRELDHIAKDLFEEHGAISAPIHDENFPGQTCISVNEEVAHGIPGKRVIREGDLVNIDVSALKNGYYADTGISFVVGKSDQPLKQKVCDVATMAFENAMKKVKPGTKLSNIGKAVHATARQNDLTVIKNLTGHGVGQSLHEAPNHVMNYFDPKDKTLLKEGQVIAVEPFISTHATFVTEGKNEWAFETKDKSYVAQIEHTVIVTKDGPLLTTKIDD

SEQ ID NO: 1897 - DNA, 640 bp, Artificial Sequence
  Description of Artificial Sequence: synthetic nucleic acid sequence
atgttgattatttttactgctttaatgattattgctaatttttactatatattttttgaaaaaattggctttttactagtactcctattaggatgtgtacttgtatatgtagggtatgtgtattttcataaagtaagaggactactatctttttggataggaaccttattaattgcttttacacttttgtctaataagtacacgataattattctatttatatttttaatagtagtcatcatacgttatttggtttataagtttagacctttaaaagtgattgctacagatgaagaaatcacatcacccatttttattaagcaaaaatggtttggtgaacaacatacaccagtgtatgtatataaatgggaagacgtacagattcaacacggtataggagacatacacattgatatgacaaaagcggcaaatattaaggaaacaaataccatagttgtgcgtcatattttaggtaaagtacaagtagttgtacctcttaattataatataaatttacatgcgactctcttctacggcactgcttatgtgaacgataaatcttataagattgagaataaccatgttcaaattgaagaaaaaacgaaagatgataattatactgttaatgtttacgtttcat

SEQ ID NO: 1898 - protein, 214 aa, Artificial Sequence
  Description of Artificial Sequence: synthetic amino acid sequence
  MOD_RES (214): variable amino acid
MLIIFTALMIIANFYYIFFEKIGFLLVLLLGCVLVYVGYVYFHKVRGLLSFWIGTLLIAFTLLSNKYTIIILFIFLIVVIIRYLVYKFRPLKVIATDEEITSPIFIKQKWFGEQHTPVYVYKWEDVQIQHGIGDIHIDMTKAANIKETNTIVVRHILGKVQVVVPLNYNINLHATLFYGTAYVNDKSYKIENNHVQIEEKTKDDNYTVNVYVSX

SEQ ID NO: 1899 - DNA, 903 bp, Artificial Sequence
  Description of Artificial Sequence: synthetic nucleic acid sequence
atgttgttaaacctcactccaatttttgccatacttactgcaattgttacaattgaacctactgctaaagcatcattaaaaaaggggtataaaaggctgccagcaacagttatcggtgcgttatttgctgttgtctttacatatgtcttcggtgatcaatcaccgttaagttatgctttaagtgctacatttaccattctgatatgcactaaacttaatttacaggtaggaacaactgtcgcagtattaacttccgttgcaatgattccaggtatacatgaagcatatgtgttcaatttcttttcacggttacttacagctcttataggacttgttacagctggattagtcaattttatcatcttaccacctaagtattatcatcaacttgaagagcaattagcccttagtgagaaaaaaatgtatcgtttattttatgaacgctgtaatgagttattattaggaaaattcagctcggaaaagactagtaaagaattatcaaaattaaatattattgctcaaaaagttgaaacattaatgagttaccaaagagatgaacttcattatcataaaaatgaagataattggaaattattaaatcgccttacaaatcgcgcttataacaaccgtttatttatttcacatttatctaacattatttatttacccaaacatacgtctattgcttttgatgctaatgagaagatagcattgattaatattagtaatagtattaatgacatcattcaaaaaggaagctttgcacgtcaaaaaaaatctattgcaacactaaagtcttctgttaaacagatggatgagtttgaccaaaatcaaatgaaaagtacactcatatatgaaattctactcatatacaaaattttagattcacgttatgcaaaataa

SEQ ID NO: 1900 - protein, 300 aa, Artificial Sequence
  Description of Artificial Sequence: synthetic amino acid sequence
MLLNLTPIFAILTAIVTIEPTAKASLKKGYKRLPATVIGALFAVVFTYVFGDQSPLSYALSATFTILICTKLNLQVGTTVAVLTSVAMIPGIHEAYVFNFFSRLLTALIGLVTAGLVNFIILPPKYYHQLEEQLALSEKKMYRLFYERCNELLLGKFSSEKTSKELSKLNIIAQKVETLMSYQRDELHYHKNEDNWKLLNRLTNRAYNNRLFISHLSNIIYLPKHTSIAFDANEKIALINISNSINDIIQKGSFARQKKSIATLKSSVKQMDEFDQNQMKSTLIYEILLIYKILDSRYAK

SEQ ID NO: 1901 - DNA, 1419 bp, Artificial Sequence
  Description of Artificial Sequence: synthetic nucleic acid sequence
gtgattgaattaattaaaatggaagggatgatagttgtgtctaataataattttaaagatgatttcgaaaagaatcgtcaatctattaatccagacgaacatcaaacagaattaaaagaagatgataaaacaaatgaaaataaaaaagaagctgactctcaaaacagtttatctaataactcaaatcaacaatttcctccgagaaatgcccaacgacgaaaaagacgcagagagacagcaactaatcaaagcaaacaacaagacgacaaacatcaaaaaaatagtgacgctaaaactacagaaggttcattagatgaccgttatgacgaagcacagttacagcaacaacatgataaatcgcaacaacaaaataaaactgaaaaacaatcacaagataatagaatgaaagatggaaaagatgcagctattgtaaatggaacatctgagtcaccagaacataaatcaaaatcaacacaaaatagacccggccctaaagctcaacaacaaaagcgtaaatcagaaagtacgcaatcaaaaccgtcaacaaacaaagataaaaaagcagctacaggtgctggaatagctggtgcagctggtgttgctggtgcagcagaaacatccaaacgtcatcataataaaaaagataaacaagattctaaacactcaaaccatgagaatgacgaaaaatctgttaaaaatgatgaccaaaagcaatctaaaaaaggcaaaaaagcagcagtcggtgctggcgcagctgcaggagttggtgcggctggtgttgcgcatcataataatcaaaataaacatcataatgaggaaaaaaattctaatcaaaacaatcagtacaatgaccaatcagaaggtaagaaaaaaggtggtttcatgaaaatcttgttaccacttatagcagccattcttattctaggtgcaatagcaatattcggtggtatggctctaaataatcacaacgatagtaaaagtgatgaccaaaaaatagcgaatcaaagtaagaaagactcagataaaaaagatggtgcgcaatccgaagataacaaagacaaaaaatctgatagtaacaaagacaaaaaatctgattctgataagaacgcagatgatgactctgataatagttcctcaaatcctaacgctacttcaactaataataacgataatgtagccaataataactcaaattatacaaaccaaaatcaacaagataatgcaaaccaaaatagcaataatcaacaggcaactcaaggtcaacaatcacatacagtatacggtcaagaaaacttatatcgtatcgccatacaatattatggagaaggaactcaagctaacgtagataaaattaaacgtgcgaatggattaagcagtaataatattcataatggtcaaacattagttattcctcaataa

SEQ ID NO: 1902 - protein, 472 aa, Artificial Sequence
  Description of Artificial Sequence: synthetic amino acid sequence
VIELIKMEGMIVVSNNNFKDDFEKNRQSINPDEHQTELKEDDKTNENKKEADSQNSLSNNSNQQFPPRNAQRRKRRRETATNQSKQQDDKHQKNSDAKTTEGSLDDRYDEAQLQQQHDKSQQQNKTEKQSQDNRMKDGKDAAIVNGTSESPEHKSKSTQNRPGPKAQQQKRKSESTQSKPSTNKDKKAATGAGIAGAAGVAGAAETSKRHHNKKDKQDSKHSNHENDEKSVKNDDQKQSKKGKKAAVGAGAAAGVGAAGVAHHNNQNKHHNEEKNSNQNNQYNDQSEGKKKGGFMKILLPLIAAILILGAIAIFGGMALNNHNDSKSDDQKIANQSKKDSDKKDGAQSEDNKDKKSDSNKDKKSDSDKNADDDSDNSSSNPNATSTNNNDNVANNNSNYTNQNQQDNANQNSNNQQATQGQQSHTVYGQENLYRIAIQYYGEGTQANVDKIKRANGLSSNNIHNGQTLVIPQ

SEQ ID NO: 1903 - DNA, 987 bp, Artificial Sequence
  Description of Artificial Sequence: synthetic nucleic acid sequence
atgcaaactattgaaagcatcattataggtggcggtccatgcggattaagcgcggcaattgaacaaaagaaaaaaggtattgaaacattagtaattgaaaaaggtaatgttgttgaatcaatctataattatccaacacatcagacttttttctcatcaagtgataaattaagtatcggcgatattccttttattgttgaagatagtaagccaagacgtaatcaagcgcttgtatattatagggaagtcgttaaacatcatcaacttaacatacatccattcgaagaagttttaacagttaaaaaaataaacaataaatttgcaattacaactacaaaaggtgtatatgaatgtaaatatttaactgttgctacgggttattatggtcaacataacactttagaagcggaaggggcagaattaccaaaagtattccattactttaaagaagcacatccgtattttaatcaaaatgttgttattattggaggcaaaaactctgctgttgatgctgccttagaattagaaaaagctggtgctaatgtaactgttttatatcgtggcgaacagtaccctaaagcaattaaaccatggatattacccaatttcgaatcattagtcaatcacgaaaaaattacgatggaatttaatgcgacagtaaccaaaattaccgatcattcagtgacttatgaaaaagatggtcaacttatagaaattgataatgactacgtttttgctatgattggttatcatccagattacgatttcttaaaaacaataggtattgatatccataccaatgaatatggaactgctcctgtttataatcgagaaacattcgaaacaaacgtcgaaaattgttatatagctggtgttattgctgcgggtaatgatgcaaatactatttttatcgaaaatggtaaatatcatggtggtgtcattacacaaagcattttgacaaaaaaacaaacacctcttgaaacatag

SEQ ID NO: 1904 - protein, 328 aa, Artificial Sequence
  Description of Artificial Sequence: synthetic amino acid sequence
MQTIESIIIGGGPCGLSAAIEQKKKGIETLVIEKGNVVESIYNYPTHQTFFSSSDKLSIGDIPFIVEDSKPRRNQALVYYREVVKHHQLNIHPFEEVLTVKKINNKFAITTTKGVYECKYLTVATGYYGQHNTLEAEGAELPKVFHYFKEAHPYFNQNVVIIGGKNSAVDAALELEKAGANVTVLYRGEQYPKAIKPWILPNFESLVNHEKITMEFNATVTKITDHSVTYEKDGQLIEIDNDYVFAMIGYHPDYDFLKTIGIDIHTNEYGTAPVYNRETFETNVENCYIAGVIAAGNDANTIFIENGKYHGGVITQSILTKKQTPLET

SEQ ID NO: 1905 - DNA, 648 bp, Artificial Sequence
  Description of Artificial Sequence: synthetic nucleic acid sequence
atgagttcaattaatattgcactagatggcccagctgctgcaggtaagagtacaattgctaaacgtgtagccagtcgtctatcaatgatatatgttgatacaggagcaatgtatcgtgccattacatataaatatttacaaaatggcaaacccgaaaattttgattatctgattaataacactaaacttgagcttacttatgatgaagtaaaagggcaaagaatcttactagataatcaagacgtcactgattatttaagagaaaatgatgtaacacatcacgtatcttatgttgcatctaaagaaccagtgcgttcatttgcagtgaaaatacaaaaagaattagctgctaaaaaaggtatcgttatggatggccgagatattggtacagttgtattaccagatgccgaattaaaagtttatatgattgcatctgttgctgaacgtgctgaacgtcgacaaaaagagaatgagcaacgtggcattgaatcaaatttagaacaattaaaggaggaaattgaagcacgagatcattatgatatgaatcgtgaaatttcgccattacaaaaagccgaagatgctattacacttgatacaactggcaaatctatagaagaggtaacaaatgaaatattatctctactttaa

SEQ ID NO: 1906 - protein, 215 aa, Artificial Sequence
  Description of Artificial Sequence: synthetic amino acid sequence
MSSINIALDGPAAAGKSTIAKRVASRLSMIYVDTGAMYRAITYKYLQNGKPENFDYLINNTKLELTYDEVKGQRILLDNQDVTDYLRENDVTHHVSYVASKEPVRSFAVKIQKELAAKKGIVMDGRDIGTVVLPDAELKVYMIASVAERAERRQKENEQRGIESNLEQLKEEIEARDHYDMNREISPLQKAEDAITLDTTGKSIEEVTNEILSLL

SEQ ID NO: 1907 - DNA, 1179 bp, Artificial Sequence
  Description of Artificial Sequence: synthetic nucleic acid sequence
atgactgaagaattcaatgaatcaatgattaatgatattaaagaaggtgacaaagtcactgttgaagttcaacaagtagaggataaacaagttgttgtgcatattaatggtggcaaatttaatggaattattcctattagccagctttcaacacatcatatcgaaaaccctagtgaagttgtaaaagtcggtgatgaagtcgaagcatatgtcactaaaatcgagttcgacgaagaaaatgatactggggcatacattttatcaaaaagacaacttgaaactgaaaaatcttatgaatatttacaagaaaaactagataacgatgaagtgattgaagctgaagttactgaagtagttaaaggtggtttagtcgttgacgttggtcaaagagggtttgtacctgcttctctaatttcaactgatttcattgaagatttttctgtattcgatggtcaaacaatccgtattaaagtggaagaacttgatcctgaaaacaatagagtcattttaagccgtaaagctgtggaacagttagaaaacgacgctaaaaaagcttcaatattagattctttaaatgaaggcgatgttattgatggtaaagttgctcgattaactaactttggtgctttcattgatattggtggcgtagatggtttagttcacgtttctgaattatctcatgaacatgttcaaacaccagaagaagttgtgtcagtaggtgaagcagtcaaagttaaagttaaatctgtagaaaaagattctgaacgtatttctttatctattaaagacactttaccaacaccatttgaaaacattaaagggaaatttcacgaagatgatgttattgaaggtactgtagtacgtttggcgaactttggcgcattcgtagaaattgctccatccgtccaaggtttagtgcatatttctgaaatcgatcataaacatatcggttctcctaacgaagtattagaacctggacaacaagttaatgtaaaaatattaggtatcgatgaagataatgaaagaatttcattatcaatcaaagcaacgttacctaaagaaaatgtcattgaaagtgacgcatccacaactcaatcatatcttgaagatgataatgatgaagataaaccaacattaggcgatgtttttggtgataaatttaaagaccttaagttttaa

SEQ ID NO: 1908 - protein, 392 aa, Artificial Sequence
  Description of Artificial Sequence: synthetic amino acid sequence
MTEEFNESMINDIKEGDKVTVEVQQVEDKQVVVHINGGKFNGIIPISQLSTHHIENPSEVVKVGDEVEAYVTKIEFDEENDTGAYILSKRQLETEKSYEYLQEKLDNDEVIEAEVTEVVKGGLVVDVGQRGFVPASLISTDFIEDFSVFDGQTIRIKVEELDPENNRVILSRKAVEQLENDAKKASILDSLNEGDVIDGKVARLTNFGAFIDIGGVDGLVHVSELSHEHVQTPEEVVSVGEAVKVKVKSVEKDSERISLSIKDTLPTPFENIKGKFHEDDVIEGTVVRLANFGAFVEIAPSVQGLVHISEIDHKHIGSPNEVLEPGQQVNVKILGIDEDNERISLSIKATLPKENVIESDASTTQSYLEDDNDEDKPTLGDVFGDKFKDLKF

SEQ ID NO: 1909 - DNA, 1269 bp, Artificial Sequence
  Description of Artificial Sequence: synthetic nucleic acid sequence
gtgataattggaggttcaagtttagattcatctcaattattacaagctctatacgaaacattgtatatggtgactgtatcacttgtaatcggtgctttaataggtatacctcttggcatcttgttagtggtaactagaaaaaacggtatatggtcgaatacaatattgcatcaagtattaaatcctatcattaatattttaagatcaattccgttcattattttattaatagccatagtgccttttattattattgtaatatcaaaaaaattagatttagtagatcgtcctaatttcagaaaagtacatacgaaacctatctcagtgatgggaggaacggtcattttattttctttcttaatagggatttggctcggacaccctattgaacgtgaggttaaaccgcttatattaggtgcaattacaatgtatatggttggattgattgatgatatttacgatctaagaccttatttaaagttagcaggtcaaattgttgcagctttaattgttacgttttatggaattacaatagactttatttcattgccaattggtccaacgattcattttggcatattcagcattcctattacagtaatatggattgtagcaattaccaatgctattaatcttatcgacggacttgatggacttgcctcaggcgtctcagcattggcattaatgactattggattcatcgctattttacaagcgaacatatttattatcatgatttgctgtgtacttttagggtctttacttggtttcttattctataactttcacccagcgaaaattttcctaggtgatagtggtgcattaatgataggatttattatcggtttcttatccttactcggctttaagaatatcacatttattgcattattctttcctatagttatattagcggtgccatttattgatacattatttgcaatgattcgtcgaatgaaaaaagggcaacatataatgcaagcggacaagtcacatttacatcataaattacttgctttaggatatacgcatagacaaaccgttttacttatttattcaatagcgattatgtttagtttatctagtgttatcctctatttatcccaaccgttgggtgcacttatgatgttcattctcattgtctttacgattgagttgatcgttgaatttactggattaatagatgataattatcgaccaatattaaatttaattacaaaaaaaggaaatggtaagcaacatcattatgatgagcatcaccgttcataa

SEQ ID NO: 1910 - protein, 422 aa, Artificial Sequence
  Description of Artificial Sequence: synthetic amino acid sequence
VIIGGSSLDSSQLLQALYETLYMVTVSLVIGALIGIPLGILLVVTRKNGIWSNTILHQVLNPIINILRSIPFIILLIAIVPFIIIVISKKLDLVDRPNFRKVHTKPISVMGGTVILFSFLIGIWLGHPIEREVKPLILGAITMYMVGLIDDIYDLRPYLKLAGQIVAALIVTFYGITIDFISLPIGPTIHFGIFSIPITVIWIVAITNAINLIDGLDGLASGVSALALMTIGFIAILQANIFIIMICCVLLGSLLGFLFYNFHPAKIFLGDSGALMIGFIIGFLSLLGFKNITFIALFFPIVILAVPFIDTLFAMIRRMKKGQHIMQADKSHLHHKLLALGYTHRQTVLLIYSIAIMFSLSSVILYLSQPLGALMMFILIVFTIELIVEFTGLIDDNYRPILNLITKKGNGKQHHYDEHHRS

SEQ ID NO: 1911 - DNA, 969 bp, Artificial Sequence
  Description of Artificial Sequence: synthetic nucleic acid sequence
atgaaacgtctacttatcatacatactggtggcacaataagtatgtcacaagatcaaactaataaagtgataacgaatgaagaaaatccaatatcacaacatcaaaatatcattagtcaatatgcagaggttgacgaaatcaatcttttaaatataccctcgccgcatatgacaatttcgaatgttgtgcgattaagagacgaaatcattacatattctaaagaaaatatatatgatggatttgtcattactcatggaacagatacacttgaggaaacagcttttttaatagatttattaattgatattcaagagcctatagtaattactggagcaatgagatcatccaatgaaattggttccgatggtctctataattttatttctgctataagggttgcttcttcatctgaggctaatcataaaggtgttatggtcgtatttaatgatgagattcacactgctcgtaatgtgacaaagacacatacttcgaatattaatacatttcaaagtcctaatcaggggcctctaggtgtacttaccaagaatcgagtacaattttatcatcatccttacagacaaactacctaccaatatatcgatgtaaatttacgtgttccacttgtaaaagcatacatgggtatggaagatgatgtactatcattttattcacaacaacacgttgatggtatagtcatcgaagcactaggacaaggtaaccttccaaaaagttgtcttaatggactacagcaatgtctaaagaaaaacattcctctagttctcgtatctagatcattcaatggtattgttagtcctgtatatgcttatgaaggtggtggcgcagatttgaaaaataatggtgttattttttcgaacggtttaaatggaccaaaggcaaggctaaaattactagttggtttgagtcaagacatgactcaaaatcaattagagcgatatttcgaagagtaa

SEQ ID NO: 1912 - protein, 322 aa, Artificial Sequence
  Description of Artificial Sequence: synthetic amino acid sequence
MKRLLIIHTGGTISMSQDQTNKVITNEENPISQHQNIISQYAEVDEINLLNIPSPHMTISNVVRLRDEIITYSKENIYDGFVITHGTDTLEETAFLIDLLIDIQEPIVITGAMRSSNEIGSDGLYNFISAIRVASSSEANHKGVMVVFNDEIHTARNVTKTHTSNINTFQSPNQGPLGVLTKNRVQFYHHPYRQTTYQYIDVNLRVPLVKAYMGMEDDVLSFYSQQHVDGIVIEALGQGNLPKSCLNGLQQCLKKNIPLVLVSRSFNGIVSPVYAYEGGGADLKNNGVIFSNGLNGPKARLKLLVGLSQDMTQNQLERYFEE

SEQ ID NO: 1913 - DNA, 1086 bp, Artificial Sequence
  Description of Artificial Sequence: synthetic nucleic acid sequence
gtgctgagacgccgagaaaaccaaccacaaatcaaagtgtttaacgaagttgaacctaatccatcaactcatacagtctataaggggttagaaatgtttataaatttccaacctaatactattattgcactcggtggcggttcggcaatggatgcagccaaagcaatatggatgttctttgagcatccagaaacttcattttttggggcaaaacaaaagttcttagatattcgtaaacgtacttataaaattaccaaacctaaaaacgcaaaatttatatgtataccaacgacatcaggaactggttctgaagtgacaccttttgcagtaattactgatagcgagacacacgttaagtatccactagcagattatgcgttaactcccgatattgctatcgtcgatccacaattcgtattaagtgtacctaaagatgttgccgcagatacaggaatggatgttttgacacatgccattgaatcttacgtctctgtcatggcttcagattatacaagaggcttaagcttacaagcaataaagttaacttttgattatctaaaatcatcagttcaagaaaatgacaaacactcacgagaaaaaatgcataatgcttcaacaatggccggtatggcatttgccaatgcttttttaggaatttctcattctatcgcacataaaattggtggtgaatatggtattccccacggcagaacaaatgctattttattaccacatgtcattcgctataatgccaaagatccacaaaaacatgcactgtttcctaaatatgatttctttagagcagatactgactatgctgacattgcaaaatttttaggactcaaaggtaatacaactgaagaattagtggatgctctagctaatgcggtgtatgatttaggatgttcagttggtattgatatgaatttaaaatcacaaggcgtaactgaagagcttcttcactctactatagacagaatggctgaattagcatttgaagatcaatgtacaactgctaatccaaaagaaccgctaattagtgaacttaaaggcattatcgaaacagcatatgattatgaaagataa

SEQ ID NO: 1914 - protein, 361 aa, Artificial Sequence
  Description of Artificial Sequence: synthetic amino acid sequence
VLRRRENQPQIKVFNEVEPNPSTHTVYKGLEMFINFQPNTIIALGGGSAMDAAKAIWMFFEHPETSFFGAKQKFLDIRKRTYKITKPKNAKFICIPTTSGTGSEVTPFAVITDSETHVKYPLADYALTPDIAIVDPQFVLSVPKDVAADTGMDVLTHAIESYVSVMASDYTRGLSLQAIKLTFDYLKSSVQENDKHSREKMHNASTMAGMAFANAFLGISHSIAHKIGGEYGIPHGRTNAILLPHVIRYNAKDPQKHALFPKYDFFRADTDYADIAKFLGLKGNTTEELVDALANAVYDLGCSVGIDMNLKSQGVTEELLHSTIDRMAELAFEDQCTTANPKEPLISELKGIIETAYDYER

SEQ ID NO: 1915 - DNA, 714 bp, Artificial Sequence
  Description of Artificial Sequence: synthetic nucleic acid sequence
gtgtcttcttcaataagtattttatacatattcgtaataattgacggttctgaacctagcttgcctgcgaatgtgattttatcacctttttgcgctgccataggtatggcaatagctatgataatcacaattacaattgtccctaaagaaatgagcaattttttatatgataaacgttccatgtatcttaaaataaaatcaaaaataatagctagaagtgcagctggaatagcacctattaaaatgagtgcactattgttacgatcaatgcctaataatattaaatctcctagaccaccagcgcctattaaagctgcgagtgtagcagtaccaatgattaataccatagctgtgcgtattcctgccatgataacaggcattgcaatagggagttcgactttggtcaatcttctaagtggtttcattccaatgcctttagccgcttcaataagagagggatcgacctccttaatacctgtgtatgtattacgtagaataggaagtaacgcatatacaactaaggcgataattgccggaagtctcccaattccgaaaattggtatcatcaaaccaagtagtgccagtgatggaattgtttgtagaacagctgcaatattcatgacgatttctgaaagtttttttgttttagtgagcaaaattgcaattggtactgctataagagttgcaatgaaaagcgctataaaagaaagttga

SEQ ID NO: 1916 - protein, 237 aa, Artificial Sequence
  Description of Artificial Sequence: synthetic amino acid sequence
VSSSISILYIFVIIDGSEPSLPANVILSPFCAAIGMAIAMIITITIVPKEMSNFLYDKRSMYLKIKSKIIARSAAGIAPIKMSALLLRSMPNNIKSPRPPAPIKAASVAVPMINTIAVRIPAMITGIAIGSSTLVNLLSGFIPMPLAASIREGSTSLIPVYVLRRIGSNAYTTKAIIAGSLPIPKIGIIKPSSASDGIVCRTAAIFMTISESFFVLVSKIAIGTAIRVAMKSAIKES

SEQ ID NO: 1917 - DNA, 885 bp, Artificial Sequence
  Description of Artificial Sequence: synthetic nucleic acid sequence
gtgttaattggtccttcaggttgtggtaagacaacaacacttaaaatgatcaatcgtttaattcctttaagcgaaggttacatatattttaaagataaaccaattagtgattatccagtttacgaaatgcgttgggatattggatatgtactacaacaaattgcattatttcctcatatgactatcaaagaaaacattgcacaagtaccccaaatgaaaaagtggaaagataacgatattgatttacgtgtggatgaattattgacaatggtaggtttaaatcctgagcaatttaaaaatagaaaacctgatgaactatcgggtggacaacgacaaagggttggtgtagtgcgagcattagctgcagatcctcccgttattatcatggatgagccttttagtgctcttgacccaattagcagagagaagttgcaggacgatttgattcatttgcaaactcaaattaagaaaacaatagtttttgtaacgcatgatattcaagaagcgatgaaactaggtgacagaatttgtttactcaatgaagggcgtgttgaacaaattgatacacctgatagttttagaacgcgacctaaaagtgactttgtaaagcaattcatgggtagtcatttggatacaacgcataatattgtgaatcaagtgaagattaaagatttaggaattaatcggtctgtagatgacaatgcaagcgttattcattatcctgaagtagatgctgagttgtacttaaataatatttatgaagatttgtctcattatgatgcagttgtggtcaacgataaagaacaacatcgtcgatatttgttaaatagagaagatgtgtttacttatttatctcttaataaggaggaagcgacacatgaatga

SEQ ID NO: 1918 - protein, 294 aa, Artificial Sequence
  Description of Artificial Sequence: synthetic amino acid sequence
VLIGPSGCGKTTTLKMINRLIPLSEGYIYFKDKPISDYPVYEMRWDIGYVLQQIALFPHMTIKENIAQVPQMKKWKDNDIDLRVDELLTMVGLNPEQFKNRKPDELSGGQRQRVGVVRALAADPPVIIMDEPFSALDPISREKLQDDLIHLQTQIKKTIVFVTHDIQEAMKLGDRICLLNEGRVEQIDTPDSFRTRPKSDFVKQFMGSHLDTTHNIVNQVKIKDLGINRSVDDNASVIHYPEVDAELYLNNIYEDLSHYDAVVVNDKEQHRRYLLNREDVFTYLSLNKEEATHE

SEQ ID NO: 1919 - DNA, 1353 bp, Artificial Sequence
  Description of Artificial Sequence: synthetic nucleic acid sequence
atgaatattgcagctgttctacaaacaattccatcactggcactacttggtttgatgataccaattttcggaattgggagacttccggcaattatcgccttagttgtatatgcgttacttcctattctacgtaatacatacacaggtattaaggaggtcgatccctctcttattgaagcggctaaaggcattggaatgaaaccacttagaagattgaccaaagtcgaactccctattgcaatgcctgttatcatggcaggaatacgcacagctatggtattaatcattggtactgctacactcgcagctttaataggcgctggtggtctaggagatttaatattattaggcattgatcgtaacaatagtgcactcattttaataggtgctattccagctgcacttctagctattatttttgattttattttaagatacatggaacgtttatcatataaaaaattgctcatttctttagggacaattgtaattgtgattatcatagctattgccatacctatggcagcgcaaaaaggtgataaaatcacattcgcaggcaagctaggttcagaaccgtcaattattacgaatatgtataaaatacttattgaagaagacacagatgatactgtagaagtcaaagatggcatgggtaaaacctcattcttatttaatgcgcttaagtcagatgaaattgatggttatttagaatttacaggtactgtattaggtgaattaacgaaagaagatttaaagtctaaaaaagaaaacgatgtatatcaacaagcaaagtctagtttagaaaaaaaatatgatatgacaatgcttaaaccgatgaaatataataatacgtatgcattagctgtaaaacgtgactttgcaaaaaaatatcaaattaagacaataggtgatttacgcaaggtagaagataaacttaaaccaggttttacattggaatttaatgatagaccagatggatacaaagctgttaaaaaaacgtatcatcttaatctttctaatgttaaaactatggaacctaaattacgttatactgcagttaaaaagggagatattaatctcatagacgcatactctactgatgcagaattaaaacaatataacatggtagtattaaaagatgatcaacatgtatttcctccataccaaggagcaccgctatttaaagaaaaatatttaaaagaccatcctgaagttaaaaaaccgctcaataaattggcgaatagaatcacagatgaagaaatgcaagaaatgaactataaggtaacagtgaagaaagaggatccttataaagtagcaagagaatacttagaaaaagaaaaattaataaaataa

SEQ ID NO: 1920 - protein, 450 aa, Artificial Sequence
  Description of Artificial Sequence: synthetic amino acid sequence
MNIAAVLQTIPSLALLGLMIPIFGIGRLPAIIALVVYALLPILRNTYTGIKEVDPSLIEAAKGIGMKPLRRLTKVELPIAMPVIMAGIRTAMVLIIGTATLAALIGAGGLGDLILLGIDRNNSALILIGAIPAALLAIIFDFILRYMERLSYKKLLISLGTIVIVIIIAIAIPMAAQKGDKITFAGKLGSEPSIITNMYKILIEEDTDDTVEVKDGMGKTSFLFNALKSDEIDGYLEFTGTVLGELTKEDLKSKKENDVYQQAKSSLEKKYDMTMLKPMKYNNTYALAVKRDFAKKYQIKTIGDLRKVEDKLKPGFTLEFNDRPDGYKAVKKTYHLNLSNVKTMEPKLRYTAVKKGDINLIDAYSTDAELKQYNMVVLKDDQHVFPPYQGAPLFKEKYLKDHPEVKKPLNKLANRITDEEMQEMNYKVTVKKEDPYKVAREYLEKEKLIK

SEQ ID NO: 1921 - DNA, 540 bp, Artificial Sequence
  Description of Artificial Sequence: synthetic nucleic acid sequence
atgacgcgacagagaatcgccattgatatggatgaagtgcttgctgatacattgggtgctgttgttaaagcggtcaatgaacgagcggatttaaatatcaaaatggaatcattaaacggtaaaaaattaaaacatatgatacccgagcatgaggggttagtcatggatattttaaaagaacctggattctttagaaatttagatgtaatgccgcatgctcaagaagttgtaaaacaactcaatgagcattacgacatatacatagccacagcagcgatggatgttccaacctcttttcatgacaaatatgaatggttattagaatactttccttttttagatccgcaacattttgtattttgtggtagaaagaatattattcttgcagattatcttattgatgataatccaaagcaattggaaatttttgaagggaaatcaattatgtttactgcttctcataatgttaatgaacatagatttgaacgcgtaagtggttggagagatgtaaagaattattttaattcaattgaaaaatag

SEQ ID NO: 1922 - protein, 179 aa, Artificial Sequence
  Description of Artificial Sequence: synthetic amino acid sequence
MTRQRIAIDMDEVLADTLGAVVKAVNERADLNIKMESLNGKKLKHMIPEHEGLVMDILKEPGFFRNLDVMPHAQEVVKQLNEHYDIYIATAAMDVPTSFHDKYEWLLEYFPFLDPQHFVFCGRKNIILADYLIDDNPKQLEIFEGKSIMFTASHNVNEHRFERVSGWRDVKNYFNSIEK

SEQ ID NO: 1923 - DNA, 402 bp, Artificial Sequence
  Description of Artificial Sequence: synthetic nucleic acid sequence
atgataaaaaaaatagaacacaatcgcaaaaacaaacaaaatgatacttcaaatcaaaatcgtgatactaatcaacaccaagaccaaactcaaccaacaaataatgactataacaacgataatcaatcaggtactgaacaaccagcacaacaacctaactaccatcaatacccaaataataatcaacagtctggttcaaataaaaataactcttcagaaaataacaaacagaaaccgaatcagaacaaaactaatcaatcatatcatcaaccagcacaatcaacaccacaacagtcgtcacaacataataatcaatctgattcacaacaaaatggcaactcaaataataattccaacaatcaaaatcatggaacaaatgataaacagaataaaaatcgttaa

SEQ ID NO: 1924 - protein, 133 aa, Artificial Sequence
  Description of Artificial Sequence: synthetic amino acid sequence
MIKKIEHNRKNKQNDTSNQNRDTNQHQDQTQPTNNDYNNDNQSGTEQPAQQPNYHQYPNNNQQSGSNKNNSSENNKQKPNQNKTNQSYHQPAQSTPQQSSQHNNQSDSQQNGNSNNNSNNQNHGTNDKQNKNR

SEQ ID NO: 1925 - DNA, 513 bp, Artificial Sequence
  Description of Artificial Sequence: synthetic nucleic acid sequence
atggttggaacggtgttaagtggttttgaatataaagcacaaaaagaaaaatatgataacttaacaaagttctttaaagacaatgaagaaaaatatcaatataccggttttactaaagaagcaatacataagacacagaatgttggatatcaaaatgagtattattatttagcaggtaacgttactaatattaataattatagaaaatattatgaacctttaataaaaaaagattctaagaatttcaaagaaggcatgaaaaaagcaaatgaagcaacaaatttcaaagccaaaattgaagttgtttcaacattattcagtactaaatctgatttcactaaaaataactctaagaaagatttattattcttaagtgatgatttatatcattacaaagaaaaacctgaaaacacaaacataactttacaattaagtgagccaaaaattaattctacacgcgcattttatgatgctaacaacccattagaatatggagtgcataaacatgagtaa

SEQ ID NO: 1926 - protein, 170 aa, Artificial Sequence
  Description of Artificial Sequence: synthetic amino acid sequence
MVGTVLSGFEYKAQKEKYDNLTKFFKDNEEKYQYTGFTKEAIHKTQNVGYQNEYYYLAGNVTNINNYRKYYEPLIKKDSKNFKEGMKKANEATNFKAKIEVVSTLFSTKSDFTKNNSKKDLLFLSDDLYHYKEKPENTNITLQLSEPKINSTRAFYDANNPLEYGVHKHE

SEQ ID NO: 1927 - DNA, 528 bp, Artificial Sequence
  Description of Artificial Sequence: synthetic nucleic acid sequence
atgatggtaggaactgtgttaagcggttttgagtatagagcaaataaggaaaaaatggataacttagaaaaatacctcaaagataaagaagataaatatcactatactggattcaccgatgaagcaataactaaaactcaaaatataggttatcaaaataattacttttacattactactagttccacgaaattacgagattatagaaaacattttgaacctttaattaaagaaagtgacgatgattttaaaaagcatatgaaacaattaaagtctaaaaaagatacgtatattaatacagaaataacgactacacttttcagtactctggacgaatatgacgaaaaaatcattagaaaaaatactttatccatggctaaagaaatgagaaaagagccatctattccacataatttcacattccacttattatttagcaataacaaattaaaaatcaacgatccaaacataagtaacaatcaaattaatgagtatagggtgttcgaccatgacggatttaaaaattaa

SEQ ID NO: 1928 - protein, 175 aa, Artificial Sequence
  Description of Artificial Sequence: synthetic amino acid sequence
MMVGTVLSGFEYRANKEKMDNLEKYLKDKEDKYHYTGFTDEAITKTQNIGYQNNYFYITTSSTKLRDYRKHFEPLIKESDDDFKKHMKQLKSKKDTYINTEITTTLFSTLDEYDEKIIRKNTLSMAKEMRKEPSIPHNFTFHLLFSNNKLKINDPNISNNQINEYRVFDHDGFKN

SEQ ID NO: 1929 - DNA, 1587 bp, Artificial Sequence
  Description of Artificial Sequence: synthetic nucleic acid sequence
atggaaaagcatacattcactatcaaagagctatcttcaacttaccatttaacaaaatcaaaagtgattgattatgtaacacgtatacaaacgtgggctataaaatttgatatttatttatcaattaaaaagaagcaaggtatcatgatcgatgcgagtacaacgagtatcagtaatgctgtacttcatatcaatcaacttacagacgatgactttaaagttgaaaaccttattttacaagagttacctcaagcccatactagaaaaataaaacaaattatctcaaagcatatagataatcatcaattatcaacttctgaaaataaaatacaacaattacttgtgcatctaattttaattatcaaacattctcaaccagaggaagaagattggagcactgatacagaatctttaactattgcgaaaaagtgtataaaagatatcaatgaaacccttggatatcaacttaacaataaaacaagtgaatgcttttccttttttattagctaccatttcaataagtttgatttagggatccaacaactatttattcaaagttatatcgatcgactcattgaattaatggagcaacatattggttttcccttttcacaagatacaattttaaaagataatatgaacgtccactttagtcgtacatatttgcgattaatgagtcatgtttatctaaataatccattaacaagtcaaatcaaacgactatatccctttgtctttaatacactatatgatagtattcgacaattatcacaagataccaatatccaattaagcgaagatgagattgcctttttaactatacattttcagtcttctatcgaacgccataagtcatcacatattcatgttgtaattgcttgttattatggcttaggcatttcaacgttgcttgctgagaaaatcaaacaacttaatcatgcaatacagatcgtagatacattaaaacttgaagatattaataactatcattttgaagggattgacttattaattactactcacgactttgatacaagtcaacttttacaaatacctaaagtcatacaagtatcacctttattttcagatgaagatgctaaaaaaatcgaattctttgtaaaagccatgcaaaacccattatcaaaagatgatatattatcaaaaattcagttgagtgttgagtccaatttcaaactgaatcattcaaatcacattcttccaatttttgagaaatccaaagaaattttagattatcatcatgcaactctagatggctatatagaaagtgccatagatcgcgaaaaacaatcttcaacatatataggtaaagggatagcactcccacacggcaaccctgaaaaagtactgaaatcacacatgattatatttaaaccttctcaacctataacatggaaacaacatgaagttaaacttgttttctttttagcaatgagtaaaaaagatttaaatattaaccgtaaaattatacaatcaattgctcaattagaagaagatgacatccatcaattatgtcttttagatgatttacaactaaaaaacactttgtatgcacgttttaaagaataa

SEQ ID NO: 1930 - protein, 528 aa, Artificial Sequence
  Description of Artificial Sequence: synthetic amino acid sequence
MEKHTFTIKELSSTYHLTKSKVIDYVTRIQTWAIKFDIYLSIKKKQGIMIDASTTSISNAVLHINQLTDDDFKVENLILQELPQAHTRKIKQIISKHIDNHQLSTSENKIQQLLVHLILIIKHSQPEEEDWSTDTESLTIAKKCIKDINETLGYQLNNKTSECFSFFISYHFNKFDLGIQQLFIQSYIDRLIELMEQHIGFPFSQDTILKDNMNVHFSRTYLRLMSHVYLNNPLTSQIKRLYPFVFNTLYDSIRQLSQDTNIQLSEDEIAFLTIHFQSSIERHKSSHIHVVIACYYGLGISTLLAEKIKQLNHAIQIVDTLKLEDINNYHFEGIDLLITTHDFDTSQLLQIPKVIQVSPLFSDEDAKKIEFFVKAMQNPLSKDDILSKIQLSVESNFKLNHSNHILPIFEKSKEILDYHHATLDGYIESAIDREKQSSTYIGKGIALPHGNPEKVLKSHMIIFKPSQPITWKQHEVKLVFFLAMSKKDLNINRKIIQSIAQLEEDDIHQLCLLDDLQLKNTLYARFKE

SEQ ID NO: 1931 - DNA, 681 bp, Artificial Sequence
  Description of Artificial Sequence: synthetic nucleic acid sequence
atgacgaatttaaaagaattagaaaaatgggaaacttattttaaagatgaaggtttctatccggtagctgtagatgcaaaacatggcaagaatcttaaaaatgttgaagttgaagctataaaagcaactcaagaaaaatttgatcgtgaaaaagctaaaggtttaaaacctagagcgataagagctatgattgtaggcattcctaatgtaggaaaatcaacacttatcaataagttagcaaaacgtagtatcgccgaaactggaaataaaccaggagtaacaaaacagcaacaatggattaaagttggaaagtctcttcaattactagatacaccaggtattttatggcctaaattcgaagatgaagaagtcggtaaaaaattaagtttaactggtgcaattaaggatagtatcgttcatttagatgaggtagctatttatggtttgaattttatgattaaacatgatgtttcagctttaaagagacattataatattgatacacatgaagacgctgagatactcgattggtttgatgcaattggaagaagaaggggattgttacaaaaaggaaatgaagtagattatgaatctgtcattgagttgatcatcaatgatatgagaaatgcaaaaattggaacttattgttttgatattttaaaagaaatgaagagtgaatga

SEQ ID NO: 1932 - protein, 226 aa, Artificial Sequence
  Description of Artificial Sequence: synthetic amino acid sequence
MTNLKELEKWETYFKDEGFYPVAVDAKHGKNLKNVEVEAIKATQEKFDREKAKGLKPRAIRAMIVGIPNVGKSTLINKLAKRSIAETGNKPGVTKQQQWIKVGKSLQLLDTPGILWPKFEDEEVGKKLSLTGAIKDSIVHLDEVAIYGLNFMIKHDVSALKRHYNIDTHEDAEILDWFDAIGRRRGLLQKGNEVDYESVIELIINDMRNAKIGTYCFDILKEMKSE

SEQ ID NO: 1933 - DNA, 771 bp, Artificial Sequence
  Description of Artificial Sequence: synthetic nucleic acid sequence
atgtctctaacaattaaagaaatcaaagaaaaactatctcgaattgaaacgttggaagagttacataaacatgaagcaaataatgattcacgtaaaggtgttataaatgcgattaagtctagggaaaaaaatattcttaagcaacaagcattagaagagcactatttatccatgaatcaatacgaaaacaacattatgtcctctaacagggatgcattaatttgtggaattgatgaggtagggcgtgggcccttggctggaccagttgtggcttgtgcagttattttagagaagaatcatcattatattggtttagatgactctaaaaaagtgtctcccaaaaatagagcacgacttaatcaaaatttaaaagaaaatgtctatcaatatgcatatggcatagcgtcctcagttgaaatagatgaattgaacatttatcgggcaactcaattagctatgctacgtgctataaatcaattagatgttacacctacacatttattaatagacgcaatgacactagatattgatattccacaaacctcaattattaaaggtgatgctaaaagtgtgtctatcgcagcagcaagtatcatggctaaagaataccgtgatcaatatatgagacaactatctaaacagtttccagaatatggttttgataaaaatgcaggttatggaactaagcaacatttaaaggctattgatcaagtgggcataatcaatgaacatcgtcaatcatttgaaccaattaaatcaatgatgaaataa

SEQ ID NO: 1934 - protein, 256 aa, Artificial Sequence
  Description of Artificial Sequence: synthetic amino acid sequence
MSLTIKEIKEKLSRIETLEELHKHEANNDSRKGVINAIKSREKNILKQQALEEHYLSMNQYENNIMSSNRDALICGIDEVGRGPLAGPVVACAVILEKNHHYIGLDDSKKVSPKNRARLNQNLKENVYQYAYGIASSVEIDELNIYRATQLAMLRAINQLDVTPTHLLIDAMTLDIDIPQTSIIKGDAKSVSIAAASIMAKEYRDQYMRQLSKQFPEYGFDKNAGYGTKQHLKAIDQVGIINEHRQSFEPIKSMMK

SEQ ID NO: 1935 - DNA, 1074 bp, Artificial Sequence
  Description of Artificial Sequence: synthetic nucleic acid sequence
gtggaaaaagcgaaagaattaaattcagacgtatatgtggttaaagcgcaaattcacgctgggggtagaggtaaagcaggcggcgtgaaaattgctaaatcattatctgaagtcgaaacgtacgcaaatgaactgctaggtaaacaattggtcacacatcaaactgggccagagggcaaagaggtcaaacgtttatatatcgaagaaggatgcgatatccaaaaagaatattatgttggttttgttattgatcgtgctactgataaagtgactttgatggcatcagaagaaggtggaactgaaattgaagaggttgcagctcaaacacctgaaaagattttcaaagaaacaattgatccagtagtaggattatcaccttaccaagcgcgacgtatcgcttttaatattaacattccaaaagaatcagttggaaaagcaactaaatttttattagcactatataatgtctttatcgaaaaagattgttctattgttgaaattaacccacttgttacaactggagacggtcaggtattggctttagatgctaaattaaactttgatgataatgcattatttagacataaagatattttagaattacgagatttagaagaagaagatcctaaggaaatagaagcttctaaatatgatttatcatacatcgctttagatggagatattggttgtatggttaatggcgcaggtttagccatggcaactatggatacaattaatcattttggtggaaatccagccaacttcttagatgtaggtggcggtgctacaaaagaaaaggtaactgaagcatttaaaattattttaggtgatgacaatgttaaaggtatctttgtaaatatttttggtggaattatgaaatgtgatgttattgccgaaggtattgtagcagcggttaaagaagttgaactaacattaccattagttgttcgtttagaaggaactaatgtcgaacgtggtaaagcaatattaaacgaatcaggtttagctattgagccagcagcaactatggctgaaggtgctcaaaaaattgtgaaacttgttaaagaagcataa

SEQ ID NO: 1936 - protein, 357 aa, Artificial Sequence
  Description of Artificial Sequence: synthetic amino acid sequence
VEKAKELNSDVYVVKAQIHAGGRGKAGGVKIAKSLSEVETYANELLGKQLVTHQTGPEGKEVKRLYIEEGCDIQKEYYVGFVIDRATDKVTLMASEEGGTEIEEVAAQTPEKIFKETIDPVVGLSPYQARRIAFNINIPKESVGKATKFLLALYNVFIEKDCSIVEINPLVTTGDGQVLALDAKLNFDDNALFRHKDILELRDLEEEDPKEIEASKYDLSYIALDGDIGCMVNGAGLAMATMDTINHFGGNPANFLDVGGGATKEKVTEAFKIILGDDNVKGIFVNIFGGIMKCDVIAEGIVAAVKEVELTLPLVVRLEGTNVERGKAILNESGLAIEPAATMAEGAQKIVKLVKEA

SEQ ID NO: 1937 - DNA, 525 bp, Artificial Sequence
  Description of Artificial Sequence: synthetic nucleic acid sequence
atgcttgattatgggactcaaattgttgcaggggtaacacctggtaaaggtggacaagttgtagaaggtgttccagtatataacactgttgaagaagctaaaaatgaaacaggagctaatgtatctgttgtatacgtaccagcaccattcgctgctgattcaattattgaagcagctgatgccgatttagacatggttatttgtattactgaacatatacctgttgttgatatggttaaagtaaaaagatatttacaaggtcgtaaaacacgtttagtaggaccaaactgtcctggtgtgataactgccgacgagtgtaaaatcggtattatgccgggatatatccataaaaaaggccatgtcggtgtcgtgtctcgttctggtacattaacgtatgaggcagtgcatcaattaactgaagaaggtatcggtcaaacaactgctgtaggtatcggcggtgatccagtaaatgggactaactttatttgtctaatcatagacaaaagtgctcatctctcattctag

SEQ ID NO: 1938 - protein, 174 aa, Artificial Sequence
  Description of Artificial Sequence: synthetic amino acid sequence
MLDYGTQIVAGVTPGKGGQVVEGVPVYNTVEEAKNETGANVSVVYVPAPFAADSIIEAADADLDMVICITEHIPVVDMVKVKRYLQGRKTRLVGPNCPGVITADECKIGIMPGYIHKKGHVGVVSRSGTLTYEAVHQLTEEGIGQTTAVGIGGDPVNGTNFICLIIDKSAHLSF

SEQ ID NO: 1939 - DNA, 432 bp, Artificial Sequence; identical to SEQ ID NO: 111
  Description of Artificial Sequence: synthetic nucleic acid sequence

SEQ ID NO: 1940 - protein, 143 aa, Artificial Sequence; identical to SEQ ID NO: 112
  Description of Artificial Sequence: synthetic amino acid sequence

SEQ ID NO: 1941 - DNA, 987 bp, Artificial Sequence
  Description of Artificial Sequence: synthetic nucleic acid sequence
atgaataaattaggtcgtcgacgtctagtaatgctcatcgctatagtatttattattggggcactgattcttgctgcatcaaccaatttagcattattaattattggacgtttaattattggtttagcagtgggtggttcgatgtctacggtacctgtttatttaagtgaaatggcaccgacagaatatcgtggctcactaggttcacttaatcaactaatgattacaattggtattttagcagcatatttagtcaactatgcatttgcggatattgagggttggcgttggatgctaggattagcagttgttccatcggttattttacttgtgggtatttattttatgcctgagagtccaagatggttacttgaaaatagaaacgaagaagccgctcgtcaagtgatgaagattacttatgacgatagcgaaattgataaagaacttaaagagatgaaagaaattaacgctatctctgaatctacatggacagtcattaaatcaccatggttaggtagaatattaattgtaggttgtatatttgctattttccagcaatttattggtatcaatgcagtcattttctattcatcttcaatctttgctaaggctggactgggtgaagcggcgtctatattaggttcagttggtataggaactattaatgttcttgtaacaatagttgccatttttgtagtagataagattgatcgtaaaaaattacttgttggtggtaatattggtatgattgcctcattattaattatggcaatcttaatttggacaattggaattgcttcatcagcgtggattattattgtttgtttatcattatttattgtattctttgggatttcttggggacctgttctatgggttatgctacctgaattattcccaatgcgcgcacgtggcgctgctacgggcatttcagcgcttgtgctaaatatcggaacgcttatcgtgtcattgttcttcccaatatta

SEQ ID NO: 1942 - protein, 329 aa, Artificial Sequence
  Description of Artificial Sequence: synthetic amino acid sequence
MNKLGRRRLVMLIAIVFIIGALILAASTNLALLIIGRLIIGLAVGGSMSTVPVYLSEMAPTEYRGSLGSLNQLMITIGILAAYLVNYAFADIEGWRWMLGLAVVPSVILLVGIYFMPESPRWLLENRNEEAARQVMKITYDDSEIDKELKEMKEINAISESTWTVIKSPWLGRILIVGCIFAIFQQFIGINAVIFYSSSIFAKAGLGEAASILGSVGIGTINVLVTIVAIFVVDKIDRKKLLVGGNIGMIASLLIMAILIWTIGIASSAWIIIVCLSLFIVFFGISWGPVLWVMLPELFPMRARGAATGISALVLNIGTLIVSLFFPIL

SEQ ID NO: 1943 - DNA, 345 bp, Artificial Sequence
  Description of Artificial Sequence: synthetic nucleic acid sequence
atgcccgtagcagcgccacgtgcgcgcattgggaataattcaggtagcataacccatagaacaggtccccaagaaatcccaaagaatacaataaataatgataaacaaacaataataatccacgctgatgaagcaattccaattgtccaaattaagattgccataattaataatgaggcaatcataccaatattaccaccaacaagtaattttttacgatcaatcttatctactacaaaaatggcaactattgttacaagaacattaatagttcctataccaactgaacctaatatagacgccgcttcacccagtccagccttagcaaagattgaagatgaatag

SEQ ID NO: 1944 - protein, 114 aa, Artificial Sequence
  Description of Artificial Sequence: synthetic amino acid sequence
MPVAAPRARIGNNSGSITHRTGPQEIPKNTINNDKQTIIIHADEAIPIVQIKIAIINNEAIIPILPPTSNFLRSILSTTKMATIVTRTLIVPIPTEPNIDAASPSPALAKIEDE

SEQ ID NO: 1945 - DNA, 549 bp, Artificial Sequence
  Description of Artificial Sequence: synthetic nucleic acid sequence
atggaacgagcgtcagttcttgcacaagtagatatacatcgtgctgcaacacataacaaaggtgtgatgaatggtatacacgctgtagtattggctacaggcaatgatacaagaggagttgaagcaagtgctcatgcatatgcaagcaaagatggtcattatagagggatagctacttgggaatatgatcgctcacgtaataaattggttggaactattgaagttcctatgactttagcgacagtaggtggaggtacgaaagttttacctattgctaaagcctcattaaatttgcttaatgttgaaaatgcacaggaactagggcaagttgttgctgctgttggattagcacaaaatttctctgcatgtagagcgctagtgtctgaggggatacaacaaggacatatgagtttacaatataaatcattagcgattgttgtaggtgcaaaaggcgaagaaattgcgcaagtagctgaagcgctcaaatatgaatcacaagctaatactgccaaagctcaagaaatcttgatgaatataagaaagtcataa

SEQ ID NO: 1946 - protein, 182 aa, Artificial Sequence
  Description of Artificial Sequence: synthetic amino acid sequence
MERASVLAQVDIHRAATHNKGVMNGIHAVVLATGNDTRGVEASAHAYASKDGHYRGIATWEYDRSRNKLVGTIEVPMTLATVGGGTKVLPIAKASLNLLNVENAQELGQVVAAVGLAQNFSACRALVSEGIQQGHMSLQYKSLAIVVGAKGEEIAQVAEALKYESQANTAKAQEILMNIRKS

SEQ ID NO: 1947 - DNA, 759 bp, Artificial Sequence
  Description of Artificial Sequence: synthetic nucleic acid sequence
atggctgtccctttatttgaccggagtaaaagaagtttagtacttactgatgcaggtaaaatttttttcaagaaatgtcaagaaatcatcgcactatatgataatttgcccactgaaattaatagtttgtatggtttagaaacaggtcatatcactattagtatgtctgcagtgatgagcatgcgtaaatttattggcgtattaggagactttcatcaactttatccgaatattacgtacaacttaatcgaaagtggtggtaagacgactgaaaaccttatacttaatgatgaagtggatattggtgtgacaacattgccagtagatcatcaaaaatttgaatgtatatctttaaacaaagaagaactgactgtagttttaaataaagaacatcctttagcacaaaaatcttctattaaaatggaagaattagctgatgagaacttcattttatttaatgaagatttctatctcaacgataaaattattgaaaatgcgaagaatgctggattcgtgccgaacatggcctcacaaatctcacaatggaatgtgattgaaaatcttgtcattaatcaattaggtatttccatattgccagccactatagcacaattacttaatgatgacgtcaaaattgtacatttggaaaatgcacatacaacttgggagcttggtgtcgtttggaaaaaagataaacgtttaagtcatgctacaaataaatggatagaatttttgaaagaaagattatccgaagaataa

SEQ ID NO: 1948 - protein, 252 aa, Artificial Sequence
  Description of Artificial Sequence: synthetic amino acid sequence
MAVPLFDRSKRSLVLTDAGKIFFKKCQEIIALYDNLPTEINSLYGLETGHITISMSAVMSMRKFIGVLGDFHQLYPNITYNLIESGGKTTENLILNDEVDIGVTTLPVDHQKFECISLNKEELTVVLNKEHPLAQKSSIKMEELADENFILFNEDFYLNDKIIENAKNAGFVPNMASQISQWNVIENLVINQLGISILPATIAQLLNDDVKIVHLENAHTTWELGVVWKKDKRLSHATNKWIEFLKERLSEE

SEQ ID NO: 1949 - DNA, 342 bp, Artificial Sequence
  Description of Artificial Sequence: synthetic nucleic acid sequence
atgcttattacttttataggcacagaagttcaaaaattacttcatatacctctagcaggtagtatcgtagggcttatgctttttttcctattgttacaatttaaaattgtacctgaatcatggattaatgtaggagcagactttttacttaaaacaatggttttcttctttatcccatcagtggtaggaattatggatgttgcatctaatatcacgatgaattatatattattctttattgttattataattggtacatgccttgtagcactatcatcaggttatatcgctgaaaaaatgctagaaaaaagcaatacacgtaaaggaactgatcactcatga

SEQ ID NO: 1950 - protein, 113 aa, Artificial Sequence
  Description of Artificial Sequence: synthetic amino acid sequence
MLITFIGTEVQKLLHIPLAGSIVGLMLFFLLLQFKIVPESWINVGADFLLKTMVFFFIPSVVGIMDVASNITMNYILFFIVIIIGTCLVALSSGYIAEKMLEKSNTRKGTDHS

SEQ ID NO: 1951 - DNA, 519 bp, Artificial Sequence
  Description of Artificial Sequence: synthetic nucleic acid sequence
atgaaaggtggtacctggattaaccatgttttaaacgctacagttgtatgtcttgcatacccactttatcaaaataaaaagaaaataaaaaaatatttaacaattattttcacaagcgtgttgactggtgtagttctcaattttgtgttagtatttacaacgttgaaaatctttggttattctaaagacacaattgttaccctgttacctagatcaattacagcagcagtaggtatagaggtttctcaagaattgggaggaacagatacaattactgtgctctttatcataactacaggtttaatcggcagtattttaggttcaatgcttttacgtatgggaggttttaaatcttccattgcgcgaggactaacttatgggaatgcttctcacgcatttggtaccgcaaaagcattagagcttgatattgaatcaggagcgttcagttcaattggtatgattttaacagcagtcattagttctgttctcataccagtactgattttattgttttactaa

SEQ ID NO: 1952 - protein, 172 aa, Artificial Sequence
  Description of Artificial Sequence: synthetic amino acid sequence
MKGGTWINHVLNATVVCLAYPLYQNKKKIKKYLTIIFTSVLTGVVLNFVLVFTTLKIFGYSKDTIVTLLPRSITAAVGIEVSQELGGTDTITVLFIITTGLIGSILGSMLLRMGGFKSSIARGLTYGNASHAFGTAKALELDIESGAFSSIGMILTAVISSVLIPVLILLFY

SEQ ID NO: 1953 - DNA, 513 bp, Artificial Sequence
  Description of Artificial Sequence: synthetic nucleic acid sequence
atggcacaaattaaagcaaatgaagcattagttaaggcattacaaacctggaatattgatcatttatatggtattcctggcgactcagtagatgctgttgttgatagcttacgtacggtcagagatcaatttaaattctctgaagatgcttcaattaaagcagcagttgaagaagcgcataaacatggaaaagcattgcttgttgatatgatagcagtgcaaaacttagaacaacgtgctaaagaactagatgagatgggtgcagactatatcgcagttcatacaggttacgacttacaagctgaaggaaaatctccattagacagcttgcgtacagttaaatctgttatcaaaaactctaaggttgcagtagcaggtggtattaaaccagatactatcaaagatattgttgctgaagatccagatttagttattgttggtggcggtattgcgaatgctgacgatcctgtagaagcagcaaaacaatgtagagcagctattgaaggtaaataa

SEQ ID NO: 1954 - protein, 170 aa, Artificial Sequence
  Description of Artificial Sequence: synthetic amino acid sequence
MAQIKANEALVKALQTWNIDHLYGIPGDSVDAVVDSLRTVRDQFKFSEDASIKAAVEEAHKHGKALLVDMIAVQNLEQRAKELDEMGADYIAVHTGYDLQAEGKSPLDSLRTVKSVIKNSKVAVAGGIKPDTIKDIVAEDPDLVIVGGGIANADDPVEAAKQCRAAIEGK

SEQ ID NO: 1955 - DNA, 741 bp, Artificial Sequence; identical to SEQ ID NO: 899
  Description of Artificial Sequence: synthetic nucleic acid sequence

SEQ ID NO: 1956 - protein, 246 aa, Artificial Sequence; identical to SEQ ID NO: 900
  Description of Artificial Sequence: synthetic amino acid sequence

SEQ ID NO: 1957 - DNA, 435 bp, Artificial Sequence; identical to SEQ ID NO: 1639
  Description of Artificial Sequence: synthetic nucleic acid sequence

SEQ ID NO: 1958 - protein, 144 aa, Artificial Sequence; identical to SEQ ID NO: 1640
  Description of Artificial Sequence: synthetic amino acid sequence

SEQ ID NO: 1959 - DNA, 1002 bp, Artificial Sequence
  Description of Artificial Sequence: synthetic nucleic acid sequence
atgtccttatttaaagattttttcattgcgttatctaatcatacatatcttaataaaatagctaaaaagatgggacctcaaatgggagcaaatcgtgtagtcgcaggaaatacgattcatcaattaattgagactatacaatatttaaatgattataatatttcagttactgtcgactcattgggtgaatttgttaatactagagaagaaagcattaaagctaaagaagagattttagaaattatcgatgcaatatatagcaataatgttaaggcacatatgtcagtcaagataagtcaacttggaagtgagtttgatttaaatcttgcttatgaaaacatgagagaaattttacttaaagctgataagaatgggaagatgcatattaatattgatacagagaagtacgatagtctttctaaaattcaacatataattgatagattgaaaggtgaatttaaaaatgtgggtacagtcgttcaagcttatctgtatgaagccgatgatataattgataaatatcctgaattacgtttgagacttgtgaaaggtgcttataaggaagatgcgtcaatcgcttttcaatcaaaagaagaaattgacgcaaattatattagaattattaaaaaacgactactaaattcaaagaactttacatcggtggctacacatgacaatgaaataatcaaccaagtcaaacaatttatgaaggaaaatcatgtcagcaaagataaaatggaatttcaaatgttgtacggtttccgcacggaattagcacaaaaaatagctaatgaaggttatttttttacagtttatgtaccatacggtaatgattggtttgcgtactttatgagaagactagcagaacggcctcaaaacttgtcattagctataaaagaatttactaaacccaaaatcttaaaaaaggtaaccttgggtataggtatatttgcaactttattgacgtctcttattcttggcattaaaagacataaaaaataa

SEQ ID NO: 1960 - protein, 333 aa, Artificial Sequence
  Description of Artificial Sequence: synthetic amino acid sequence
MSLFKDFFIALSNHTYLNKIAKKMGPQMGANRVVAGNTIHQLIETIQYLNDYNISVTVDSLGEFVNTREESIKAKEEILEIIDAIYSNNVKAHMSVKISQLGSEFDLNLAYENMREILLKADKNGKMHINIDTEKYDSLSKIQHIIDRLKGEFKNVGTVVQAYLYEADDIIDKYPELRLRLVKGAYKEDASIAFQSKEEIDANYIRIIKKRLLNSKNFTSVATHDNEIINQVKQFMKENHVSKDKMEFQMLYGFRTELAQKIANEGYFFTVYVPYGNDWFAYFMRRLAERPQNLSLAIKEFTKPKILKKVTLGIGIFATLLTSLILGIKRHKK

SEQ ID NO: 1961 - DNA, 402 bp, Artificial Sequence
  Description of Artificial Sequence: synthetic nucleic acid sequence
atgtttttaacaaaaatggctaccgaatggagacatttttgtgcaggattcctcttaatgttgaagtataacgacactacgcaaaattatgagttgtttgacatcgttattaatgcaacgggctctaaaacacatctttctcaattagatgaggatgatcaattaattttaaacttagaaaatagacaaattgttcaacgtcatcctatgggtggcattcaaattatcccagaaacaaatcaagtcataagccccagatatggaaccttaaaaaatgtgattgcaattggacaaatgaccaacggtgtcaataaacttagaaatggcgtaaagatgattgttaatcaagttgttgatacagtatctcaattatatataacacaggaaaatagaaataagtaa

SEQ ID NO: 1962 - protein, 133 aa, Artificial Sequence
  Description of Artificial Sequence: synthetic amino acid sequence
MFLTKMATEWRHFCAGFLLMLKYNDTTQNYELFDIVINATGSKTHLSQLDEDDQLILNLENRQIVQRHPMGGIQIIPETNQVISPRYGTLKNVIAIGQMTNGVNKLRNGVKMIVNQVVDTVSQLYITQENRNK

SEQ ID NO: 1963 - DNA, 1032 bp, Artificial Sequence; identical to SEQ ID NO: 1625
  Description of Artificial Sequence: synthetic nucleic acid sequence

SEQ ID NO: 1964 - protein, 343 aa, Artificial Sequence; identical to SEQ ID NO: 1626
  Description of Artificial Sequence: synthetic amino acid sequence

SEQ ID NO: 1965 - DNA, 639 bp, Artificial Sequence; identical to SEQ ID NO: 1627
  Description of Artificial Sequence: synthetic nucleic acid sequence

SEQ ID NO: 1966 - protein, 212 aa, Artificial Sequence; identical to SEQ ID NO: 1628
  Description of Artificial Sequence: synthetic amino acid sequence

SEQ ID NO: 1967 - DNA, 654 bp, Artificial Sequence
  Description of Artificial Sequence: synthetic nucleic acid sequence
atgtggaagtgggaaacagaaaatgacgcaaaaggcgttgttgtcattgctcataatattttagaacatacaggtagatatgcatatgttatcacgatgttaagacgaaatggttatcacgttatcatgggcgatttaccgggacaagggcaaacttcacgagctcaaaagggacaaatagatgattttaatacgtatcatgaaaatatattagagtggataaaaatagctaatgaatataaaattccaacatttgttttaggtgtgggactaggtggtctcatcattttaaatctgcttgagaaaacagaattacctattgagggtatcttgttattttcacctatgttagaactaaagagagactataaagggcgcaaaaataaattgatttctaatgttggtaaaatttctaaagatactagatttaaagttggtataactcctcaagatttaacacgtaatgatgaaattattgaagaaacagcaaatgatggactaatgcttaaaaaggtaacatatagttggtataaccttataaatgaaaagatgaaagaaacaatggatcatatcagagatattaaacctatttcagcattgataatgtatggtaccaatgataaaatttttcaacaattcattttgtatgattag

SEQ ID NO: 1968 - protein, 217 aa, Artificial Sequence
  Description of Artificial Sequence: synthetic amino acid sequence
MWKWETENDAKGVVVIAHNILEHTGRYAYVITMLRRNGYHVIMGDLPGQGQTSRAQKGQIDDFNTYHENILEWIKIANEYKIPTFVLGVGLGGLIILNLLEKTELPIEGILLFSPMLELKRDYKGRKNKLISNVGKISKDTRFKVGITPQDLTRNDEIIEETANDGLMLKKVTYSWYNLINEKMKETMDHIRDIKPISALIMYGTNDKIFQQFILYD

SEQ ID NO: 1969 - DNA, 411 bp, Artificial Sequence
  Description of Artificial Sequence: synthetic nucleic acid sequence
gtgtaccctaaatatataattgagtttaaaataaaaaacagtaaattaagatggaaatttcatatccttgctttccttatcactataaatatttgtaaaaaaggtgatttttttatatacgatattttattattgaattataaaaaaatatatgcgataggtgttactataattaaactcaatacagttctctcaaaccatataaccactaaatctcttatgcggatgggtatatcagtagagagaatactaggcacactagctgaaaagaatataattgtagaaacagaagtaacagcaattataaatttagtgattaatggtgcttcgactacaattaatgaaggcaaaaacatttctgttataccaatagctgcgccttttgcagttaaaaaggaatctggtatttga

SEQ ID NO: 1970 - protein, 136 aa, Artificial Sequence
  Description of Artificial Sequence: synthetic amino acid sequence
VYPKYIIEFKIKNSKLRWKFHILAFLITINICKKGDFFIYDILLLNYKKIYAIGVTIIKLNTVLSNHITTKSLMRMGISVERILGTLAEKNIIVETEVTAIINLVINGASTTINEGKNISVIPIAAPFAVKKESGI

SEQ ID NO: 1971 - DNA, 723 bp, Artificial Sequence
  Description of Artificial Sequence: synthetic nucleic acid sequence
atgatgtctatgagttcagtttcaggagcaattgtgggcgcttatgtgcaaatgatacctggagaacttgtattgacggcaattccacttaatattattaacgcaattatagtttcttgtattttgaatcctgtatcagttgaagaacaagaagatgtcgtgtatagcattaaagatcaccaaactgaaagacaaccatttttctcatttcttggagattcagttttagcagctggaaagcttgtattaattatcattgcatttgtcattagctttgtagctttggctgacttaattgatagattgattcatttaatcacacatcttattgcaaatggtattggtgtcaaaggtagctttggtcttgatcaaatcttaggcgttttcatgtatccatttgctttactattaggtttaccgtttaatgaagcgtgggaagtagcacaacaaatggcgaagaaaattgtaacaaacgaatttgttgtgatgggggaaatttctaatcaagtcaatgcgatgacgcctcatcatagagcagttatatcaacatttttagtttcttttgcaaacttttcaactattggaatgattataggtacattgaaaggtattgttgataagaaaacgtcggatttcgtttccaaatatgtaccgatgatgttgttagcaggaattttagtatccttacttactgctgcatttgttggattatttgcttggtaa

SEQ ID NO: 1972 - protein, 240 aa, Artificial Sequence
  Description of Artificial Sequence: synthetic amino acid sequence
MMSMSSVSGAIVGAYVQMIPGELVLTAIPLNIINAIIVSCILNPVSVEEQEDVVYSIKDHQTERQPFFSFLGDSVLAAGKLVLIIIAFVISFVALADLIDRLIHLITHLIANGIGVKGSFGLDQILGVFMYPFALLLGLPFNEAWEVAQQMAKKIVTNEFVVMGEISNQVNAMTPHHRAVISTFLVSFANFSTIGMIIGTLKGIVDKKTSDFVSKYVPMMLLAGILVSLLTAAFVGLFAW

SEQ ID NO: 1973 - DNA, 801 bp, Artificial Sequence
  Description of Artificial Sequence: synthetic nucleic acid sequence
atgataggttcatttattttctctgcaggtatcaatgcatttgttatttcagggaatttgggtgagggtggtgtcactggtatagccatcgtattatattatgcttttcatatttcaccgggaataaccaatttcgttttaaatgctattttaattattgtgggttataaatatttgagtaaacgtagtacatatttaacaatttttgctacagtactcatttcaatctttctaggtttaactgaaacatggcatgtagaaactgggaatgttgtgattaatgctgtgttcggtgggacttgtgttggtttaggaattggtattatcgttttagcagggggaacaaccgctggaacggttattcttgcgagaattgttaataaatatttagatattagtacgccttacgctttgttattctttgaccttatcgttgtgcttatttcattgacagaaattcctttagtgaagtgcttagttacagttatgtctttatatataggtacaaaagtgatggaatttgttatagaaggattaaatactaaaaaggcaatgactattatatctagtcgccctaatgaggtagcaaaagctattgatcagcaagttggaagaggattaacaatattaaatggacacggttattacactagagaagaaaaagatgtactttacgtagtcatctctaaaacacaagtatctcgtgctaaacgaatcatcaaaaatattgacgaaaatgcctttttagttattcatgacgttcgtgatgtatatggtaatggttttttgttagatgagtaa

SEQ ID NO: 1974 - protein, 266 aa, Artificial Sequence
  Description of Artificial Sequence: synthetic amino acid sequence
MIGSFIFSAGINAFVISGNLGEGGVTGIAIVLYYAFHISPGITNFVLNAILIIVGYKYLSKRSTYLTIFATVLISIFLGLTETWHVETGNVVINAVFGGTCVGLGIGIIVLAGGTTAGTVILARIVNKYLDISTPYALLFFDLIVVLISLTEIPLVKCLVTVMSLYIGTKVMEFVIEGLNTKKAMTIISSRPNEVAKAIDQQVGRGLTILNGHGYYTREEKDVLYVVISKTQVSRAKRIIKNIDENAFLVIHDVRDVYGNGFLLDE

SEQ ID NO: 1975 - DNA, 798 bp, Artificial Sequence
  Description of Artificial Sequence: synthetic nucleic acid sequence
atgagtcgtttaagtggtgaacaagtgaaaattggctacggtgattctacgattattaataatttggatgtcgcaattcctgatggaaaggttacttctattattggacctaacgggtgtgggaaatcaactttattgaaagcgttatctagactattgtcaattaaagaaggtaaaattaatttggatggtaagagtattcatgccacatccacgaaagaaatagctaaaaaaatagcaattttaccacaatcaccagaggtcccagatggacttactgtaggagaacttgtttcttatgggcgttttccacatcaaaaaggatttggtcgtttaactgcagaagataaaaaagaaattgattgggcattgtcagttacaggtacaagtgaatttcgtcatcgtactataaatgatttaagtggtggacaaagacaacgcgtgtggattgcaatggcactagcccaacgtactgatattattttcttagatgaacctacaacttatttagatatttgtcatcaattagaaatattaaatttagtcaaaaagctcaacgaagaagaaggttgcactattgtgatggttttacatgacattaatcaagcaattcgcttctcagatcatctcattacgatgaaagctggagatattgttgctactggtcaaactgatgaagtgttaactaaggacattttagaaaaggtatttaatattgatggtgttttagatatagatccgagaacagggaaaccaattttagttacttacgatttattctgtcagacgtattcgtga

SEQ ID NO: 1976 - protein, 265 aa, Artificial Sequence
  Description of Artificial Sequence: synthetic amino acid sequence
MSRLSGEQVKIGYGDSTIINNLDVAIPDGKVTSIIGPNGCGKSTLLKALSRLLSIKEGKINLDGKSIHATSTKEIAKKIAILPQSPEVPDGLTVGELVSYGRFPHQKGFGRLTAEDKKEIDWALSVTGTSEFRHRTINDLSGGQRQRVWIAMALAQRTDIIFLDEPTTYLDICHQLEILNLVKKLNEEEGCTIVMVLHDINQAIRFSDHLITMKAGDIVATGQTDEVLTKDILEKVFNIDGVLDIDPRTGKPILVTYDLFCQTYS

SEQ ID NO: 1977 - DNA, 501 bp, Artificial Sequence
  Description of Artificial Sequence: synthetic nucleic acid sequence
atgcaacatcttataaaaaaacatgtattgaatggcgagtttgaactagttagacagttaatgtccgaaacagattttatggaatttgaagaagcatacatctctagtgctcatgaagtagagagtatgatgttttatacatgtattctagatatgattaaggtagaagaatcatcagaattacatgatttagcattccttttacttgtttatcctttaagtgaatatgagggcgcactagattcagcttattatcatgcagattcttccataaaacttactgacggaaatgaagtgaagagtttattacaaatgttattgcttcatgctattcctgagccagttatttcggataaaaaagcgtttgatgtcgctaaacgaattctaaaactcgatccaagtaataatgttgcacgaaatgtacttaaagatacagcaaaacgtatggataatgtagttgtagacattaatgaattgaacaatcaaagagatgcacgctaa

SEQ ID NO: 1978 - protein, 166 aa, Artificial Sequence
  Description of Artificial Sequence: synthetic amino acid sequence
MQHLIKKHVLNGEFELVRQLMSETDFMEFEEAYISSAHEVESMMFYTCILDMIKVEESSELHDLAFLLLVYPLSEYEGALDSAYYHADSSIKLTDGNEVKSLLQMLLLHAIPEPVISDKKAFDVAKRILKLDPSNNVARNVLKDTAKRMDNVVVDINELNNQRDAR

SEQ ID NO: 1979 - DNA, 409 bp, Artificial Sequence
  Description of Artificial Sequence: synthetic nucleic acid sequence
atggggctgaataaagaagctataaaaattggttttgcctatgtcggcattgttgtcggcgcaggattttcaacaggacaagaagtgatgcaatttttcacaccatttggtttatggtcatatattggagtgattatctcaggatttatacttggattcataggaagacaagtagctaagataggtactgcatttgaagcgaaaaatcacgagtccacattgcaatatgtgtttggaaaaaaatttagtaaagtttttgattatattcttgtctttttcttatttggtatagctgtcactatgatagccggatcaggttctacttttgagcaaagttttggaattcctacttggttaggcgcattaatcatgacagttttgatttacttaacattattattagcgtcaa

SEQ ID NO: 1980 - protein, 137 aa, Artificial Sequence
  Description of Artificial Sequence: synthetic amino acid sequence
  MOD_RES (137): variable amino acid
MGLNKEAIKIGFAYVGIVVGAGFSTGQEVMQFFTPFGLWSYIGVIISGFILGFIGRQVAKIGTAFEAKNHESTLQYVFGKKFSKVFDYILVFFLFGIAVTMIAGSGSTFEQSFGIPTWLGALIMTVLIYLTLLLASX

SEQ ID NO: 1981 - DNA, 540 bp, Artificial Sequence
  Description of Artificial Sequence: synthetic nucleic acid sequence
atggtagagatagacacctatccaagctttattactgttgatggtggtgaaggtggtacaggcgctaccttccaagagcttgaagatggtgttggtttaccgttatttacagcacttcctatcgtttcaagtatgttagaaaagtatggcataagaaacaaggttaaaatttttgcgtccggtaaattagtgactccagataaaatcgcaattgcattaggattaggtgcggatctcgtcaatattgctagaggtatgatgataagtgtaggatgcatcatgagtcaacaatgtcatttaaatacatgtccagttggagtagcaacaaccgatcctaaaaaagaaaagggacttattgttgatgaaaaacaataccgtgttacaaattatgttacaagtttgcatgaaggtttatttaacatcgctgcagctgtaggtgttcatagtccaacggagattacttccgaccatattatctatagacaattagatggcactacaacgtccattcaggattataaacttaaattaatttcttaa

SEQ ID NO: 1982 - protein, 179 aa, Artificial Sequence
  Description of Artificial Sequence: synthetic amino acid sequence
MVEIDTYPSFITVDGGEGGTGATFQELEDGVGLPLFTALPIVSSMLEKYGIRNKVKIFASGKLVTPDKIAIALGLGADLVNIARGMMISVGCIMSQQCHLNTCPVGVATTDPKKEKGLIVDEKQYRVTNYVTSLHEGLFNIAAAVGVHSPTEITSDHIIYRQLDGTTTSIQDYKLKLIS

SEQ ID NO: 1983 - DNA, 345 bp, Artificial Sequence; identical to SEQ ID NO: 255
  Description of Artificial Sequence: synthetic nucleic acid sequence

SEQ ID NO: 1984 - protein, 114 aa, Artificial Sequence; identical to SEQ ID NO: 256
  Description of Artificial Sequence: synthetic amino acid sequence

SEQ ID NO: 1985 - DNA, 685 bp, Artificial Sequence
  Description of Artificial Sequence: synthetic nucleic acid sequence
atgaagcacttgttaggtgcgcgctctggtttaatggcagagccaaatgaagatgataaaccagaggaaattaaatggcgcgaggatacagaagggaaacttgatttattagtatcacttgatttcagaatgactgcgacgccattatattcagatatcgttttacctgctgcaacttggtatgaaaaacatgatttatcttctacagacatgcatccatttattcatccatttaacccagcgattgacccattatgggaatcgcgttcggactgggatatttataaaactctaagtaaagctgtttcagaaatggcgaaagattatcttccaggtaaatttaaagatgtcgtaactacaccattaggacatgattcaaaacaagaaatttcaactgaatacggtattgtaaaagattggtctaaaggagaaattgaaggtgtgccaggtaaaacaatgcctaatttttctatcgtagagcgagactatacacaaatttacgataaattcgttactgttggtccaaaactagaaaaagggaaaataggtgctcatggtgtgagttatagcgttagtgaagagtacgaagaacttaaaagtatagttggaacttggaatgatgataatactatttcagttaaaaatgatagaccgagaatagatacagcgagaaaagtagcagagg

SEQ ID NO: 1986 - protein, 229 aa, Artificial Sequence
  Description of Artificial Sequence: synthetic amino acid sequence
  MOD_RES (229): variable amino acid
MKHLLGARSGLMAEPNEDDKPEEIKWREDTEGKLDLLVSLDFRMTATPLYSDIVLPAATWYEKHDLSSTDMHPFIHPFNPAIDPLWESRSDWDIYKTLSKAVSEMAKDYLPGKFKDVVTTPLGHDSKQEISTEYGIVKDWSKGEIEGVPGKTMPNFSIVERDYTQIYDKFVTVGPKLEKGKIGAHGVSYSVSEEYEELKSIVGTWNDDNTISVKNDRPRIDTARKVAEX

SEQ ID NO: 1987 - DNA, 834 bp, Artificial Sequence
  Description of Artificial Sequence: synthetic nucleic acid sequence
atgagacgtagtgcggtagaaatattatttgctacaattggtttaattattggtttatttatttcagtgatggtttcttttatcttagaaatgataggtaattccatattaaatcactttgtacctatgataatcactattattttatgttatttagggtttcaatttggtctgaaaaaaagagatgaaatgcttatgtttttaccagagaatatggcacgttccatgtctaataatatacgaagagcgacacctaagattgtagatacaagtgccattatcgatggaaggatattagatattatacgttgcggatttatcgatggtgatatattgataccacaaggcgttataaatgaattacaggttatagcggatgctaaagatagcgtgaaacgtgaaaaaggtcaaagaggattagatattttgaatcaactttatgatttagattatcctacacgcgttatacatccaactcaatcccatagtgatatagatacattattaattaaattagcacaacagtatcatgcacatgtgattacgactgattttaatttaaataaagtatgtcacgttcaaggaattacagcactcaacgttaatgatttatcggaagcaatcaaacctaatgtacatcaaggcgaccagttaagtattttattaacgaagataggtaaagagccaggacaaggcgtaggatatttagatgatggtacaatggtggttgttgataacgcgaagagttacattggtcaacaagttaatttagaggtcgtaagtttgttacaaacatcatcaggaagaattgtttttgcgaaatttgttgactga

SEQ ID NO: 1988 - protein, 277 aa, Artificial Sequence
  Description of Artificial Sequence: synthetic amino acid sequence
MRRSAVEILFATIGLIIGLFISVMVSFILEMIGNSILNHFVPMIITIILCYLGFQFGLKKRDEMLMFLPENMARSMSNNIRRATPKIVDTSAIIDGRILDIIRCGFIDGDILIPQGVINELQVIADAKDSVKREKGQRGLDILNQLYDLDYPTRVIHPTQSHSDIDTLLIKLAQQYHAHVITTDFNLNKVCHVQGITALNVNDLSEAIKPNVHQGDQLSILLTKIGKEPGQGVGYLDDGTMVVVDNAKSYIGQQVNLEVVSLLQTSSGRIVFAKFVD

SEQ ID NO: 1989 - DNA, 969 bp, Artificial Sequence
  Description of Artificial Sequence: synthetic nucleic acid sequence
gtgggtagggaaattccaccacatacttataaatttaaagatcaagaaacatatgaaagcttgataaggaatttagctcttcatcaaggtaaaaaaatctactttcaatatattcatgatgaagatattttacctaaagaatattatgcacttgataaagatgtttttgttgctcttaataataaagcacgaattccagaatggactaataacaaatatctaccacaaagagaaattgtctcaattaaagattttgaatctcatattcaagcatggtcgtatccatttgtcataaaaccaggcgatgatttacctacagcaggaggatatggtgttatgatttgttataatgatacagatttagctaaagctatcacacgcatcaacaatgcatcagcagagactgaaaatttaatcattgaacaaaaaattaatgcagtgaataactattgtgtacaatttgcttattcagatgatattggtatcaaatacttaggaacagcgcaacagttaactaatgactatggattttacaacggaaatgaaaatgttaatgatgtgcctcagaatgtaatagacgctggtagagagattatggaaataggcgtaagcaaaggtttttttggtgtagcaggttttgacttactagtagatgataataatgatgtttatgcgattgatttaaactttaggcaaaacggatcaacgagtatgctacttttagcaaaagatttaactcatggatatcataaattttacagttacttttctaatggagataatacaaaattctataatgctattttaaaatacgtagaattaggtgtactttatccactttcctattacgatggagattggtatggaaagaatcaagttaattctagatttggctgcatttggcatggggaaaataaagaattaattaatcgatatgaacaacaatttatattggaagctggattataa

SEQ ID NO: 1990 - protein, 322 aa, Artificial Sequence
  Description of Artificial Sequence: synthetic amino acid sequence
VGREIPPHTYKFKDQETYESLIRNLALHQGKKIYFQYIHDEDILPKEYYALDKDVFVALNNKARIPEWTNNKYLPQREIVSIKDFESHIQAWSYPFVIKPGDDLPTAGGYGVMICYNDTDLAKAITRINNASAETENLIIEQKINAVNNYCVQFAYSDDIGIKYLGTAQQLTNDYGFYNGNENVNDVPQNVIDAGREIMEIGVSKGFFGVAGFDLLVDDNNDVYAIDLNFRQNGSTSMLLLAKDLTHGYHKFYSYFSNGDNTKFYNAILKYVELGVLYPLSYYDGDWYGKNQVNSRFGCIWHGENKELINRYEQQFILEAGL

SEQ ID NO: 1991 - DNA, 666 bp, Artificial Sequence
  Description of Artificial Sequence: synthetic nucleic acid sequence
atgtcatacaaatatgaagcattttttaaagatattttgattaatgaatatatttattttgcttcaaaaaataaaaaattaattagaatacaacatgagaatttgccatatattgctatgtggacagacgaaaatgttgctgagtcttatttgttacatcattcaattgattacgacaaaatcattagagcagatattgaccgttttgtaacatatgaaatggatgaaatctttgatccaggtgacaaagttttagttaatgtgaataatggtgaagaaggaaacattgtagatatagttaaaatgactgatgagttgatgtctgaattagatgatataagaatgagagagtttattaaagatgtcgcaaaatatgacgaagtatacggattgacaaacaaaggtgaaaagaattttattatgatttcagatgatgaccataacaaaccacacatcatgcctgtttggagtattaagagtagagcgcgtaaagtacgtgatcaagattttgaagaatgtgatttaatcgaaattgaaggtgaagtctttagtgaatggttagacaagttacgcgatgataataaagcagtagcgattgatttgaaatcaggtgttgttggtactgttgtatcagcgcaaaaactgtcaaatgaagcaacattttaa

SEQ ID NO: 1992 - protein, 221 aa, Artificial Sequence
  Description of Artificial Sequence: synthetic amino acid sequence
MSYKYEAFFKDILINEYIYFASKNKKLIRIQHENLPYIAMWTDENVAESYLLHHSIDYDKIIRADIDRFVTYEMDEIFDPGDKVLVNVNNGEEGNIVDIVKMTDELMSELDDIRMREFIKDVAKYDEVYGLTNKGEKNFIMISDDDHNKPHIMPVWSIKSRARKVRDQDFEECDLIEIEGEVFSEWLDKLRDDNKAVAIDLKSGVVGTVVSAQKLSNEATF

SEQ ID NO: 1993 - DNA, 432 bp, Artificial Sequence; identical to SEQ ID NO: 1017
  Description of Artificial Sequence: synthetic nucleic acid sequence

SEQ ID NO: 1994 - protein, 143 aa, Artificial Sequence; identical to SEQ ID NO: 1018
  Description of Artificial Sequence: synthetic amino acid sequence

SEQ ID NO: 1995 - DNA, 405 bp, Artificial Sequence
  Description of Artificial Sequence: synthetic nucleic acid sequence
atgataaaagatggtattggagcaatagctcctcttgggagtggggaaacttatggctaccatactttagatcaacatatacaagattaccctcataatgtaactagatttttagtagtgaaaaatcatactcattttattgaacatccaaacacaactatcttccttatcacgcctaagtatgataagccaggacttttagctagtgttttaaatacttttactttattcaacataaatttatcgtggattgaatctagaccacttaaaactcaattaggtatgtatcatttttatgttcaagccgatactgctataaataatgatgtgaataaaattatttcaattttagagactttggattttcaagttaaaattatcggcgcttttaataagaaaaactaa

SEQ ID NO: 1996 - protein, 134 aa, Artificial Sequence
  Description of Artificial Sequence: synthetic amino acid sequence
MIKDGIGAIAPLGSGETYGYHTLDQHIQDYPHNVTRFLVVKNHTHFIEHPNTTIFLITPKYDKPGLLASVLNTFTLFNINLSWIESRPLKTQLGMYHFYVQADTAINNDVNKIISILETLDFQVKIIGAFNKKN

SEQ ID NO: 1997 - DNA, 570 bp, Artificial Sequence
  Description of Artificial Sequence: synthetic nucleic acid sequence
atgagtttttgtaaattcatttactggcttctttatttacaatactttgtattgttggcttgctttcttatgagacagcttcagcctataaaagggaatgacaaaaatttaaacgtaactagcaaggtgaacaatcaacgttgggtaattacagagcgtcaaacaagtccacatattaattttagaatacaaggtaaagttagtaatcacattacgattacagtacctaaatatattaaaaacatagatattaaaactaatgccggggatttaaatattgttggagtaaatagtggcacaggaagatttgatgctgaatctggagacattaaagttcaaaaaggacgatataaaaaggtgacacttcataatgaggatggggatattcaaatgaaacaattagaccctgatattcctttacgtattaaaaatgaagaaggggatataaacttgaattataaaaaagaacttcatcacacccaaatcatcactcgtaatgaagaaggggaaacagacatcgatcatcgtgtgttatataatagtaaagtactatttagtgacgtttcataa

SEQ ID NO: 1998 - protein, 189 aa, Artificial Sequence
  Description of Artificial Sequence: synthetic amino acid sequence
MSFCKFIYWLLYLQYFVLLACFLMRQLQPIKGNDKNLNVTSKVNNQRWVITERQTSPHINFRIQGKVSNHITITVPKYIKNIDIKTNAGDLNIVGVNSGTGRFDAESGDIKVQKGRYKKVTLHNEDGDIQMKQLDPDIPLRIKNEEGDINLNYKKELHHTQIITRNEEGETDIDHRVLYNSKVLFSDVS

SEQ ID NO: 1999 - DNA, 579 bp, Artificial Sequence
  Description of Artificial Sequence: synthetic nucleic acid sequence
gtggagtcgttaggacgaaaagtcaaagaagatggcgttgtcatcgatgagaaaattttgaaggtagatggatttttaaatcatcaaattgatgcaaagttgatgaatgatgtaggtaaaacattttatgagtctttcaaagacgctggtattactaaaattttaactattgaagcttctggtattgcgcctgctattatggcttcttttcattttgatgttccttgtctatttgctaaaaaagctaaacctagtactttgaaagatggcttttatagcacggatattcattcatttacaaaaaataaaacgagtacagtcattgtatctgaagaatttttaggtgcagacgataaagtacttatcattgatgactttttagctaatggtgatgcttcgctaggtcttaatgacattgtaaaacaagcaaatgcgacgacagttggcgtgggtattgtggttgaaaaaagtttccaaaatggtcgccaacgtttagaagatgcaggcttatatgtatcttcactttgtaaggtagcttcattaaaaggcaataaggtaactcttttaggtgaagcgtaa

SEQ ID NO: 2000 - protein, 192 aa, Artificial Sequence
  Description of Artificial Sequence: synthetic amino acid sequence
VESLGRKVKEDGVVIDEKILKVDGFLNHQIDAKLMNDVGKTFYESFKDAGITKILTIEASGIAPAIMASFHFDVPCLFAKKAKPSTLKDGFYSTDIHSFTKNKTSTVIVSEEFLGADDKVLIIDDFLANGDASLGLNDIVKQANATTVGVGIVVEKSFQNGRQRLEDAGLYVSSLCKVASLKGNKVTLLGEA

SEQ ID NO: 2001 - DNA, 1230 bp, Artificial Sequence
  Description of Artificial Sequence: synthetic nucleic acid sequence
atgtatgcaggggctattcttgttcctattattgtggggacaagcttaaaattttcagctgaagaaattgcttatctagttactgttgatatatttatgtgcggggtagcgacatttcttcaagcaaataaagtcacagggactggattaccgattgtactaggatgtacgtttactgccgttgcacctatgatactcatcggtcaaacgaaaggacttgatgttttatatggttcgcttttaatatccggtatcttagttgttttaattgcaccttttttctcttatttagttaaattctttccacctgttgtaacaggaagtgttgtgacaattattggaatcaatttaatgccagttgcaatgaattacttggcaggtggtgaaggagcgaaaaactatggcgatactaagaatttaatattaggtggtgttacactactcattattcttattttgcaaagatttacaaagggcttcttgaaatcaattgcgatacttataggattagcaataggtactgctttagctggtatatttggaatggttgatatcaaacaagtgggtgatgcacattggtttggtttccctgtgccattcagattttctggcttcggatttgatgtcagctcaatacttgtatttttcattgttgcagttgtaagtttaattgaatctactggtgtctatcatgcactgagtgaaattactggtagaaaactagaaagaaaagattttcgaaaagggtacactgcggaaggtctagcaatcattttaggttcaatatttaatgcgttcccttacactgcatattcccaaaatgtaggtcttgtttctttatcaggagctaaaaagaacaatgtgatatatggaatggttattcttttactaatttgcggttgtatacctaaattaggtgctttagctaatattattccattgccggttttaggtggagcaatgatagcaatgtttggaatggttatggcatacggcgttagtattttgggtaacattaatttccaaaatcaaaataatttattaattattgcaatttcagtagggttaggtgctggtattagtgcagtacctcaagcatttaaaggattaggagaacaatttgcttggttaactcaaaatggtatagtgcttggcgcaatttctgcaatcatcttaaatttcttttttaatggtataaagtataaacaaactgaagaaaatgtgaaataa

SEQ ID NO: 2002 - protein, 409 aa, Artificial Sequence
  Description of Artificial Sequence: synthetic amino acid sequence
MYAGAILVPIIVGTSLKFSAEEIAYLVTVDIFMCGVATFLQANKVTGTGLPIVLGCTFTAVAPMILIGQTKGLDVLYGSLLISGILVVLIAPFFSYLVKFFPPVVTGSVVTIIGINLMPVAMNYLAGGEGAKNYGDTKNLILGGVTLLIILILQRFTKGFLKSIAILIGLAIGTALAGIFGMVDIKQVGDAHWFGFPVPFRFSGFGFDVSSILVFFIVAVVSLIESTGVYHALSEITGRKLERKDFRKGYTAEGLAIILGSIFNAFPYTAYSQNVGLVSLSGAKKNNVIYGMVILLLICGCIPKLGALANIIPLPVLGGAMIAMFGMVMAYGVSILGNINFQNQNNLLIIAISVGLGAGISAVPQAFKGLGEQFAWLTQNGIVLGAISAIILNFFFNGIKYKQTEENVK

SEQ ID NO: 2003 - DNA, 525 bp, Artificial Sequence
  Description of Artificial Sequence: synthetic nucleic acid sequence
atgtgggaaaataaatttgctaaagaatctttaacattcgacgacgtgttactcattccagctgcatcagatgttttaccaagcgatgttgacttaagtgtcaaattatcagataagatcaagttaaacattcctgttatctcagcaggtatggatacagtaactgaatcaaaaatggcaattgctatggctcgacaaggcggtttaggtgttattcataagaatatgggcgtcgaagagcaagctgatgaggtacaaaaggttaaacgttcagaaaatggtgttatttctaacccgttcttcttaacaccggaagaaagtgtgtatgaggctgaagcattaatgggtaaataccgtatctctggtgtacccattgtcgataatcaagaggatcgcaagttgattgggattttaacaaatcgtgatttacgttttattgaagatttttcaattatcatagtcaatatttctattaattcctctaaaggcattccaattgttttggcttcttttgacatagagtga

SEQ ID NO: 2004 - protein, 174 aa, Artificial Sequence
  Description of Artificial Sequence: synthetic amino acid sequence
MWENKFAKESLTFDDVLLIPAASDVLPSDVDLSVKLSDKIKLNIPVISAGMDTVTESKMAIAMARQGGLGVIHKNMGVEEQADEVQKVKRSENGVISNPFFLTPEESVYEAEALMGKYRISGVPIVDNQEDRKLIGILTNRDLRFIEDFSIIIVNISINSSKGIPIVLASFDIE

SEQ ID NO: 2005 - DNA, 744 bp, Artificial Sequence
  Description of Artificial Sequence: synthetic nucleic acid sequence
atggatgccggtgtaccaattaaagcgccagtcgcagggattgcaatgggactagtaacgcgtgacgatagctatacaattttaactgatattcaaggaatggaagatgcattaggtgatatggacttcaaagtagcaggtactaaagacggtattactgcgattcaaatggatattaaaattgatggtttaactcgagaagttattgaagaagcactagaacaagcgcgtcaaggacgattagctattatggatcatatgcttcacacgattgaacaaccacgcgaagaattaagtgcttacgcaccaaaagtggtaactatgagtattaatccagataaaattcgagacgtgattggaccaggtggtaagaaaatcaatgaaattatcgacgaaactggagttaaattagatattgaacaagatggtacaatctttataggtgctgtagatcaagcgatgattaaccgtgcaaaagaaattatcgaagatattacacgcgaagcggaagttggacaagtatatcatgctaaagtaaaacgtattgaaaagtatggtgctttcgttgaattgttccctggtaaagacgcgttattacacatttctcaaatttcacaagaaagaattaataaagtagaagatgttcttaaaattggagatacaattgaagtgaaaattactgaaatcgataaacaaggtcgcgttaatgcgtcacataaagtattagagcaatctaaaaattaa

SEQ ID NO: 2006 - protein, 247 aa, Artificial Sequence
  Description of Artificial Sequence: synthetic amino acid sequence
MDAGVPIKAPVAGIAMGLVTRDDSYTILTDIQGMEDALGDMDFKVAGTKDGITAIQMDIKIDGLTREVIEEALEQARQGRLAIMDHMLHTIEQPREELSAYAPKVVTMSINPDKIRDVIGPGGKKINEIIDETGVKLDIEQDGTIFIGAVDQAMINRAKEIIEDITREAEVGQVYHAKVKRIEKYGAFVELFPGKDALLHISQISQERINKVEDVLKIGDTIEVKITEIDKQGRVNASHKVLEQSKN

SEQ ID NO: 2007 - DNA, 960 bp, Artificial Sequence; identical to SEQ ID NO: 791
  Description of Artificial Sequence: synthetic nucleic acid sequence

SEQ ID NO: 2008 - protein, 319 aa, Artificial Sequence; identical to SEQ ID NO: 792
  Description of Artificial Sequence: synthetic amino acid sequence

SEQ ID NO: 2009 - DNA, 2592 bp, Artificial Sequence
  Description of Artificial Sequence: synthetic nucleic acid sequence
gtgaaattaccttatggtgtgcaacaagacgctcatgaagtagaagatgcacttgagtttattaatcgtgtaattacacctttatcaccgatttcaacatttgctgcccgtaatccgtgggaggggctagaagatgcttcgtttgatcaagtggcacgttggttaaaaagtgtgagggatgttgacatttatcctaatgcgtctactattcacagagcgattagtaataaagaaatagatttaaaagtatttgaagaacggttggatgaaaatcgtgcgcattataataataggtcactatctgacagtgatatcaacacatatattcaaagagcgaaaaatttaaaaacgattgaagaaggttactttaatacaaaagataacgagaaactggaaaaatgggtacaaactaattttaaggattataagaaaaaagaagatgtgatagcgcaaagtgctagtgttttcacaaaggaaggtacacgacttattgatattttaaatgctcatatgattaagtggtctaaattatatgttgatgactttcaatcaagttggactatgccaaaaagagaaaaaggattctatcatgcctggcaacgtttagttaaacatgatccattattcacaaaaaaacaacgacttactttagcacatttgccaaatcaagcaaccgaagcaatagagtacgcctttcaagaattaggagtaaaagaagaacatcgacaatcatatattgagagtcatttattatctttaccaggttgggcaggaatcatgtatcatcggtcacagacacaaagtaatgatgcgtacttattaacagactatgttgcgattcgtctatcaattgagatggtacttttaaatgaccaccatacaacattattaaaaaaatctatatatcttcaaaaaaagttagagcaaatacgttatttgctatttaacatacaaatgaatgttgagcagtggttaaatctatcatctaaaaagcaacaagcatacattgaattggggacacgattcagcccgttttattttaaaaagttatggttagatgcatgggaagaaacgcatgaacgtcgattggttgatgaaatttatcgtgttccaaccgaagatactgatcaagcaaaagcaaaagtacaacttgcgttttgtattgatgtacgatccgaaccgtttagaagacatttagaaagtgaagggccttttgaaacaatagggattgctgggttctttggtctgccaattcaaaaagaagtacttgatgaacaatttgcacatccatctttaccagtgatggtagaacctgcatatcgtattaaagaatatgctgatcaacatgaaatgaaaatttataatcaacaacaacatacacttacatctatgttttacaactttaaattaatgaaaaacaacgtgttgccaagtttgcttttaccagaattaagtggtccttttttaagtattgcgactatagctaacacaattttccctaaaaaagcaaaacgtattgttcatcgattctcacaaaaatggctacgtaaaccaacaggtaaattaactattcagcgtgagcaagatgcgtattcaaaactaccaatcggctttactttagaagaacagattcaattttccaaaaaagcattacaattaatggacttaacagatgattttgcaccacttattgttctatgcggacacggtagtgaatcacataataatccctatcatgcttcattagagtgtggggcttgcggcggtgcctcgagtgggttcaatgcgaaattattagcagtaatgtgtaatcaagaaaatgttagacgtggattattgatggaaggaatcgacattccaagacatacagtgtttatagctgctgaacatcaaacgtcagttgatgagttagagtatatttatgttccacctttaactacagaagctcaaaatgcctttgacgaacttaagcatgtgatgccaaaagtatgttataaagccaatttagaacgtttggcatcgttgccaaatataaataacactgaccataatcctaatgctgaagcgcatcgtcacgctagcgattggagtgaagttcgtccagaatggggtctagcacgaaatgctgaattcattattgggaaacgtcaaatcacccaaaatagtaatctagagggacgggcatttcttcataattatgattggacaaaggatgaagacggtgagattttaaatacaattatttctgggccagcactagtagcacaatggattaatttacaatactacgcctcaaccgtggcacctcactattatggaagcggtagtaaaacaacgcaaactgtaacaagtggtgtaggtgtcatgcaaggaaatgctagtgatttaatgtatggcttaccatggcagtcagtaatgatgaatgacaaagaggcgtatcacgcacctattaggcttttaattgttattcaagcgccagatgcatatattcaacgtttgttaaaacatcataatcactttagacaaaaggttgatcatcaatggataagacttgccagtattgatgaaaataatagttggaaagactggtag

SEQ ID NO: 2010 - protein, 863 aa, Artificial Sequence
  Description of Artificial Sequence: synthetic amino acid sequence
VKLPYGVQQDAHEVEDALEFINRVITPLSPISTFAARNPWEGLEDASFDQVARWLKSVRDVDIYPNASTIHRAISNKEIDLKVFEERLDENRAHYNNRSLSDSDINTYIQRAKNLKTIEEGYFNTKDNEKLEKWVQTNFKDYKKKEDVIAQSASVFTKEGTRLIDILNAHMIKWSKLYVDDFQSSWTMPKREKGFYHAWQRLVKHDPLFTKKQRLTLAHLPNQATEAIEYAFQELGVKEEHRQSYIESHLLSLPGWAGIMYHRSQTQSNDAYLLTDYVAIRLSIEMVLLNDHHTTLLKKSIYLQKKLEQIRYLLFNIQMNVEQWLNLSSKKQQAYIELGTRFSPFYFKKLWLDAWEETHERRLVDEIYRVPTEDTDQAKAKVQLAFCIDVRSEPFRRHLESEGPFETIGIAGFFGLPIQKEVLDEQFAHPSLPVMVEPAYRIKEYADQHEMKIYNQQQHTLTSMFYNFKLMKNNVLPSLLLPELSGPFLSIATIANTIFPKKAKRIVHRFSQKWLRKPTGKLTIQREQDAYSKLPIGFTLEEQIQFSKKALQLMDLTDDFAPLIVLCGHGSESHNNPYHASLECGACGGASSGFNAKLLAVMCNQENVRRGLLMEGIDIPRHTVFIAAEHQTSVDELEYIYVPPLTTEAQNAFDELKHVMPKVCYKANLERLASLPNINNTDHNPNAEAHRHASDWSEVRPEWGLARNAEFIIGKRQITQNSNLEGRAFLHNYDWTKDEDGEILNTIISGPALVAQWINLQYYASTVAPHYYGSGSKTTQTVTSGVGVMQGNASDLMYGLPWQSVMMNDKEAYHAPIRLLIVIQAPDAYIQRLLKHHNHFRQKVDHQWIRLASIDENNSWKDW

SEQ ID NO: 2011 - DNA, 369 bp, Artificial Sequence
  Description of Artificial Sequence: synthetic nucleic acid sequence
atgaaaaagacgaaaggtatttatgaatctgaaattagtaaagccattacacaatgggagaaagattttttaggaagaggttctttgtctgtaaaaacagatattcttcgtgatatggttattgttagtttacaaggtattttgacacctgctgaatatcgcgtgtgtaaaacgaatgaagggcttttaaatattaaacgtacacgttctgaacttgtagagtctggtgaagaggacttgagtcgcattattaaagatttgactggacttaatgtgaaaagttttcatagtgatttaagtactattaccggtgaacgcgtaatgatttttaagttggaagatcgttttgataaagcattacatgagtaa

SEQ ID NO: 2012 - protein, 122 aa, Artificial Sequence
  Description of Artificial Sequence: synthetic amino acid sequence
MKKTKGIYESEISKAITQWEKDFLGRGSLSVKTDILRDMVIVSLQGILTPAEYRVCKTNEGLLNIKRTRSELVESGEEDLSRIIKDLTGLNVKSFHSDLSTITGERVMIFKLEDRFDKALHE

SEQ ID NO: 2013 - DNA, 591 bp, Artificial Sequence
  Description of Artificial Sequence: synthetic nucleic acid sequence
atgatacaacgtaaaggtgaattaatactttcatggattggcaatggattacatctgttgtatgtatttttaataggcatatttttcataatgacacaaacaagtgattttaaaaatgggatgattcaaggatttatagaagaaaatccgggggaatatgatttagcataccaaacttataacttgatgttaggtttaggtgttgtcctcattattatacttctcattttattaattgtatcaatagttgccgctattttaattggcaaaaatgccaaagtatcaggaatattacttgttattacaggaatcattggtctctttttaagttttattgctggtgccttatggttaatagcaggtatcatgcttttagtacgtaaaccacaaacacaaaatgaccaaatcaattctcaatatagtaatgacatacattcacatgttgtgccagaagaaaagaaacgtgaacaacaacaatataatatgaatgaaccacatattggtcaaacatcaacatctcatcatgatcacgcattgaatgatcaaaataaacgagaaaaccataatcatgataatcaaccatacaaatag

SEQ ID NO: 2014 - protein, 196 aa, Artificial Sequence
  Description of Artificial Sequence: synthetic amino acid sequence
MIQRKGELILSWIGNGLHLLYVFLIGIFFIMTQTSDFKNGMIQGFIEENPGEYDLAYQTYNLMLGLGVVLIIILLILLIVSIVAAILIGKNAKVSGILLVITGIIGLFLSFIAGALWLIAGIMLLVRKPQTQNDQINSQYSNDIHSHVVPEEKKREQQQYNMNEPHIGQTSTSHHDHALNDQNKRENHNHDNQPYK

SEQ ID NO: 2015 - DNA, 1230 bp, Artificial Sequence
  Description of Artificial Sequence: synthetic nucleic acid sequence
atgcaaacagtcggaattataccttcgccaggtatagcacatcaacatgcaaaaaaaataattccaaatgttaaacagttattgtcaaagcgtactaaacatagtcaatggaatttcgacatcaaagtcgatctcatgataggatctgcagaggatgtacatgaaagtgttgaaaaagcagcacaaattaaagaggaacatcagtgggattacgttgtttgtctgacagatttgcctagtatttcagataataaagtggttgtcagcgactttaatagtgacaaacatgttgcaatgctatcattaccgtcactaggttttattgatttgaagcgcaagctagttaaaacgatgacttcattgattgaacaattatattataatcaaccgaaagacaaaaatgcgccacatccttttgtacgcgtgaaggctgtagaacctgacgaagacgccacatcaaaacaacgatatattaatattttatttatcataagttggattcagttaattggtggactgacacgagcaaatcagccttggaaaaacatctttaattttaagaaaatcatttcagttgcctttgcaacaggaacttatgtctcaatattttcaatgccatgggaattaagcgtgatttattcaccgcttcgacttatcatattgatggtgattgctatacttgggatggctggatggctattctatgcgcatcaattgattgaaaagaaaactgctaaatctcagcgtgtatatcgatatatttataattcaaccacacttgttacactaagtttgattacactcataaattatgtcattttatatttattgttaatcatcagtattacactctttgtccctgtggaattatttaatagttggacgagtgcccaatcacaatttacgttctcaaattatatgagattgatttggtttgtatcatcattaggacttttagctggagctatgggatcaactgttgaaaatgaagagaaaatacgtcgtattacttattcttatagacaatatcatcgttataaagaagctggcaagaacaaaaagaacaagaaacttctcgtgatgtatcacaacaaaatgtcgaacaacaaacttcaagtaaagatgaaaataatgaacaatatgaaggtaaaaaacaaggacatagagaggaggatgacgcatgacaaatcaaaaaactgtgggtctagtcgtcgctccaggtgttactga

SEQ ID NO: 2016 - protein, 409 aa, Artificial Sequence
  Description of Artificial Sequence: synthetic amino acid sequence
MQTVGIIPSPGIAHQHAKKIIPNVKQLLSKRTKHSQWNFDIKVDLMIGSAEDVHESVEKAAQIKEEHQWDYVVCLTDLPSISDNKVVVSDFNSDKHVAMLSLPSLGFIDLKRKLVKTMTSLIEQLYYNQPKDKNAPHPFVRVKAVEPDEDATSKQRYINILFIISWIQLIGGLTRANQPWKNIFNFKKIISVAFATGTYVSIFSMPWELSVIYSPLRLIILMVIAILGMAGWLFYAHQLIEKKTAKSQRVYRYIYNSTTLVTLSLITLINYVILYLLLIISITLFVPVELFNSWTSAQSQFTFSNYMRLIWFVSSLGLLAGAMGSTVENEEKIRRITYSYRQYHRYKEAGKNKKNKKLLVMYHNKMSNNKLQVKMKIMNNMKVKNKDIERRMTHDKSKNCGSSRRSRCY

SEQ ID NO: 2017 - DNA, 351 bp, Artificial Sequence
  Description of Artificial Sequence: synthetic nucleic acid sequence
atgccagtgataagcaaactgaataataatccgagaccatccacatataaattaaaattcattccaatatgtggcatccaatttaagtttttcattacgttattacctgacatcgtcattgaaatcaatgatatgaaatatataaataagacaataggaacaggtaatacaaaccatcctaaatgtatacgtttaacgaaccggtataggaatggaataatgagtgcaaatattaacggtaatagtaccgcaatatgtaacaaactcactatgttttcctcctttaaaatttatttacgacacatattatacatcattgcgcttcttctgaaaaaccatgtaactgcttga

SEQ ID NO: 2018 - protein, 116 aa, Artificial Sequence
  Description of Artificial Sequence: synthetic amino acid sequence
MPVISKLNNNPRPSTYKLKFIPICGIQFKFFITLLPDIVIEINDMKYINKTIGTGNTNHPKCIRLTNRYRNGIMSANINGNSTAICNKLTMFSSFKIYLRHILYIIALLLKNHVTA

SEQ ID NO: 2019 - DNA, 2406 bp, Artificial Sequence
  Description of Artificial Sequence: synthetic nucleic acid sequence
gtgagtttgttacatattgcggtactattaccgttaatatttgcactcattattccattcctataccggttcgttaaacgtatacatttaggatggtttgtattacctgttcctattgtcttatttatatatttcatatcattgatttcaatgacgatgtcaggtaataacgtaatgaaaaacttaaattggatgccacatattggaatgaattttaatttatatgtggatggtctcggattattattcagtttgcttatcactggcataggaagtctagtggttttatattctatcggatatttaagcaaatcagaacaactcgggaatttttactgttatttattactatttatgggtgcaatgttaggagttgtactctctgataattttattattttatatttattttgggagttaacttctttctctagctttttattaatctctttctggagagagaaaaaagcttcaatttatggtgctcaaaaatctttaatcattaccgtattaggtggcttgagcatgctaggtggtatcattttactttccctagctactgatacttttagtattcaggctatgatttcaaaagcaagtgacattcaaaatagtcctttctttatcttagtaatgatactttttatgattggtgcatttacaaaatctgcacaagtgcctttttatatttggttaccagatgctatggaggcgcctacgccagtgagtgcataccttcattctgcaacgatggtaaaagcaggactatatctaatcgcaagaatcacacctatttttgcaatatccgaaggttgggtatggacaattacacttgttggtttaatcaccctattttgggcatcactcaatgcaacaaaacaacatgacttaaaaggtattttagctttctcaactgtgtctcaactagggatgattatgtctatgcttggtattggtgctgtaagttatcattatcaaggcgctaatagtcaactttatgttgctggatttgttgctgccatatttcatttaattaatcatgccacgtttaaaggtgcactatttatgattacaggtggtattgatcattcaactggtacacgtgatgttaaaaagttgggcggtttacttacaatcatgcctatctcattcacgcttacagttattacaacattaagtatggctggtgtgccgccttttaacggctttttatcaaaagagaaattcttagagtcaatgattaatgttacacatttaaatttaatgagtttaaatactttaggtattcttttaccaatcattgccattattggtagtattttcacatttgtatattcaattaaatttatattgcatatattctttggttcttataaacctgaagctctgccaaaacaagcgcatgaatcttcaattttaatgcttatttcacctatcattttaacatcactagttatagtattcggtttattcccaagtatattaacgcaatctattatagagccggcatctgtagcagttagtcaaacatcaaatataactgctgagttccatttattccatggtataactccagcattcctatcaacaataggtatttatattattggtattttattattaatttcatttagttattgggttcgtttattacaagcacatccatatcagttaacgttgaatcattggtatgacacttcaggccaacgtattccaggatattccgaaaatataacaaatagttatgttacaggtttttctagaaataatttggtgattatcttaggtattctcattgctttaacttttgttacagtcatcagtgtacccttcagtattgactttaaaaacgtgagtcatttacgcgtatttgaaggtgcaacagtattgtttttactgattgcttcaactttcattatatttgcaaaatcacgtttgtttagcattatcatgttaagcgctgtgggttacgctatatcagtattatttattttctttaaagcgcccgacttagcattaacacaatttgtagtggaatctatttctacagcattattcttactatgcttttatcacctacctaatttaaatcgctacaatgaaaaaccaacctttaaactgacaaatgctgtgatttcaattggagtgggattatcagtgattattttaggattaattggctatggtaatagacactttgactctattactaaattctatcaagaacatgtttttgatttagcacatggtaaaaatatggtaaatgtcatcctcgtagatttccgtggtatggatactttattcgagtcatctgtactaggtattgcaggtttaggcgtatatacaatgattaaattacgattaaaacagaaaaatcaatcaagtgaggtgaatgaccatgaatag

SEQ ID NO: 2020 - protein, 801 aa, Artificial Sequence
  Description of Artificial Sequence: synthetic amino acid sequence
VSLLHIAVLLPLIFALIIPFLYRFVKRIHLGWFVLPVPIVLFIYFISLISMTMSGNNVMKNLNWMPHIGMNFNLYVDGLGLLFSLLITGIGSLVVLYSIGYLSKSEQLGNFYCYLLLFMGAMLGVVLSDNFIILYLFWELTSFSSFLLISFWREKKASIYGAQKSLIITVLGGLSMLGGIILLSLATDTFSIQAMISKASDIQNSPFFILVMILFMIGAFTKSAQVPFYIWLPDAMEAPTPVSAYLHSATMVKAGLYLIARITPIFAISEGWVWTITLVGLITLFWASLNATKQHDLKGILAFSTVSQLGMIMSMLGIGAVSYHYQGANSQLYVAGFVAAIFHLINHATFKGALFMITGGIDHSTGTRDVKKLGGLLTIMPISFTLTVITTLSMAGVPPFNGFLSKEKFLESMINVTHLNLMSLNTLGILLPIIAIIGSIFTFVYSIKFILHIFFGSYKPEALPKQAHESSILMLISPIILTSLVIVFGLFPSILTQSIIEPASVAVSQTSNITAEFHLFHGITPAFLSTIGIYIIGILLLISFSYWVRLLQAHPYQLTLNHWYDTSGQRIPGYSENITNSYVTGFSRNNLVIILGILIALTFVTVISVPFSIDFKNVSHLRVFEGATVLFLLIASTFIIFAKSRLFSIIMLSAVGYAISVLFIFFKAPDLALTQFVVESISTALFLLCFYHLPNLNRYNEKPTFKLTNAVISIGVGLSVIILGLIGYGNRHFDSITKFYQEHVFDLAHGKNMVNVILVDFRGMDTLFESSVLGIAGLGVYTMIKLRLKQKNQSSEVNDHE

SEQ ID NO: 2021 - DNA, 387 bp, Artificial Sequence
  Description of Artificial Sequence: synthetic nucleic acid sequence
gtgattattttcttcatggtcattgtgtttggcttttcattatttttagctggacattatacacctggtggcggtttcgttggtggtttgcttttcgctagtgcattattagttattacaattgcatatgatgtaaaaacgatgcgaaagatttttcctttagattttaaaatcttaattggtattggtttattattttgcgtgggtacaccattaacaagttggttcatgtctaaaaacttttttacacatgtcacttttgacatccctttgcctttacttgaacctatgcacatgacgacagcgatgttttttgatttcggtgttttatgtgcagttgtaggaactattatgactataattatttcgattggagagaacgaatag

SEQ ID NO: 2022 - protein, 128 aa, Artificial Sequence
  Description of Artificial Sequence: synthetic amino acid sequence
VIIFFMVIVFGFSLFLAGHYTPGGGFVGGLLFASALLVITIAYDVKTMRKIFPLDFKILIGIGLLFCVGTPLTSWFMSKNFFTHVTFDIPLPLLEPMHMTTAMFFDFGVLCAVVGTIMTIIISIGENE

SEQ ID NO: 2023 - DNA, 336 bp, Artificial Sequence
  Description of Artificial Sequence: synthetic nucleic acid sequence
atgatctttgttagtggtattctcacatctataagtgtctatctcgttttgtctaaaagtttgatacgtatcattatggggactacactactaactcatgctgcaaatttatttttaattactatgggaggtttaaagcacggaactgttccaatatttgaaaaaggaacatcaagctatgttgaccctatcccccaagcattgattttaacagctatcgttatcgcctttgctacaacagctttctttttagttcttgcatttagaacatataaagaactaggcactgataacgttgagctaatgaaaggagcgccagaagatgatagagagtaa

SEQ ID NO: 2024 - protein, 111 aa, Artificial Sequence
  Description of Artificial Sequence: synthetic amino acid sequence
MIFVSGILTSISVYLVLSKSLIRIIMGTTLLTHAANLFLITMGGLKHGTVPIFEKGTSSYVDPIPQALILTAIVIAFATTAFFLVLAFRTYKELGTDNVELMKGAPEDDRE

SEQ ID NO: 2025 - DNA, 1152 bp, Artificial Sequence
  Description of Artificial Sequence: synthetic nucleic acid sequence
atgtttatgttgattggtattattggctcatttacaacaggagatattttcaacttgtttgtgttctttgaagtctttttaatgtcttcatattgtttactcgttattggtactactaaaatacaattacaagaaacaattaagtatattttagtcaatgttgtttcatcgtctttctttgtcatgggtgttgcagttttatattcagttgtaggaactttaaatctcgctcatattagtgaaagattgtcacaactttctgtacatgacagtggcttagtcaatattgtttttattttatttatctttgtctttgccactaaagcaggcgtttttcctatgtacgtatggctacctggtgcttattatgcccctccagtagcgatcatcacgttctttggtgcactattgactaaagtgggtgtatacgcaattgcgagaactctaagtttattctttaataatacagtaagcttttctcattatgtcatccttttcttagcattacttacaattatttttggatgtataggtgcgatagcttactatgatacgaagaaaatcatcctttacaatattatgattgcagtaggtgtcatattagttggtattgctatgatgaacgaatcaggcatgactggtgcaatatattacacactacatgatatgttagttaaagcttcattgttcttactcattggcgtcatgtacaaaatcactaaaacgactgacttacgtcattttggtggcttgataaaagggtatcctattctaggttggacattctttattgcagcgctaagcttagcgggtataccaccttttagtggtttctacggtaaattctatattgttcgagcgacctttgaaaaaggattttatctaagtggtatcattgtacttttatcaagtttaatcgtgttatattcagtcatacgtattttcttaaaaggatttttcggtgaagttgaaggatatactttatctaaaaaggtaaatgttaaatatctaacaactatcgctgttgcatctacagttattactgtaatctttggattatctgcagacacgttattcccaatcatcaaagatggcgctgaaacgtttgtcgatccaagtcaatatattcatagtgtgttaggaggtaaatag

SEQ ID NO: 2026 - protein, 383 aa, Artificial Sequence
  Description of Artificial Sequence: synthetic amino acid sequence
MFMLIGIIGSFTTGDIFNLFVFFEVFLMSSYCLLVIGTTKIQLQETIKYILVNVVSSSFFVMGVAVLYSVVGTLNLAHISERLSQLSVHDSGLVNIVFILFIFVFATKAGVFPMYVWLPGAYYAPPVAIITFFGALLTKVGVYAIARTLSLFFNNTVSFSHYVILFLALLTIIFGCIGAIAYYDTKKIILYNIMIAVGVILVGIAMMNESGMTGAIYYTLHDMLVKASLFLLIGVMYKITKTTDLRHFGGLIKGYPILGWTFFIAALSLAGIPPFSGFYGKFYIVRATFEKGFYLSGIIVLLSSLIVLYSVIRIFLKGFFGEVEGYTLSKKVNVKYLTTIAVASTVITVIFGLSADTLFPIIKDGAETFVDPSQYIHSVLGGK

SEQ ID NO: 2027 - DNA, 306 bp, Artificial Sequence
  Description of Artificial Sequence: synthetic nucleic acid sequence
atgcttatcattacatttttaactgagttaataaaagcaaactttggtgtactaaaaattattctcaaaccacgaattgagaataaacccggattctttgtgtacgagacggaattagaacgtgactggcaacttgttttactttccaacttgattacgttaacacctggcacagtcgttttaggtattagtgatgaccgtaaaaagatttatatccactcaattgatttcagtacaaaggaagaagagattcaaaatatcaaatcttcattagagaaggtcgttagaaaggtaggcgagaaataa

SEQ ID NO: 2028 - protein, 101 aa, Artificial Sequence
  Description of Artificial Sequence: synthetic amino acid sequence
MLIITFLTELIKANFGVLKIILKPRIENKPGFFVYETELERDWQLVLLSNLITLTPGTVVLGISDDRKKIYIHSIDFSTKEEEIQNIKSSLEKVVRKVGEK

SEQ ID NO: 2029 - DNA, 789 bp, Artificial Sequence
  Description of Artificial Sequence: synthetic nucleic acid sequence
gtgtatacttatactattaaaattagaaatgagattattatgaaaatagtagaagtaaaatctaagaatggtaccaattttatgattttagatggtaataatgaacctatagtagatgcagtaagatatttgaagtatctggatagtgttaagaaaagtttaaataccaagaaaacctatgcctatgcactaaaaaatttttttgtttacttagaaagtaaaaagatatgctataaagaagttagttttgataactttgttgattttataagatggatgaaaacaccttttgaatatgagaatgtcctctcttatcaccgaaaagaaaaaagcattagtcctaagacaattaatctgactatgactgtagtatctaatttttatgattatctctataggagtaaaaaattagatgttaatttctatgattttatgcatatggaaagtaaatactctaaaaaatataaaagtttcatgcatcacataaataaggactatagaacgttgaaaaatattttgaaagttaaagaaccaaagaaaaaaatagaagtgttaactaatgcggaggttaagaaattattagaggaagctaataatattagagataaattcttaatacaattactatatgaaaccggattacgtataggtgaggtattatcattacgtattgatgatattaaatttgactttagaaacccatcgattaaaacgatactaggtggtacaggaatatcaacctgttatccatcgcctacgcctgtcggcctcagcttaggacccgactaa

SEQ ID NO: 2030 - protein, 262 aa, Artificial Sequence
  Description of Artificial Sequence: synthetic amino acid sequence
VYTYTIKIRNEIIMKIVEVKSKNGTNFMILDGNNEPIVDAVRYLKYLDSVKKSLNTKKTYAYALKNFFVYLESKKICYKEVSFDNFVDFIRWMKTPFEYENVLSYHRKEKSISPKTINLTMTVVSNFYDYLYRSKKLDVNFYDFMHMESKYSKKYKSFMHHINKDYRTLKNILKVKEPKKKIEVLTNAEVKKLLEEANNIRDKFLIQLLYETGLRIGEVLSLRIDDIKFDFRNPSIKTILGGTGISTCYPSPTPVGLSLGPD

SEQ ID NO: 2031 - DNA, 345 bp, Artificial Sequence; identical to SEQ ID NO: 765
  Description of Artificial Sequence: synthetic nucleic acid sequence

SEQ ID NO: 2032 - protein, 114 aa, Artificial Sequence; identical to SEQ ID NO: 256
  Description of Artificial Sequence: synthetic amino acid sequence

SEQ ID NO: 2033 - DNA, 1041 bp, Artificial Sequence
  Description of Artificial Sequence: synthetic nucleic acid sequence
atgcaaaaagtacgttctgatataatgactcatcgtggttctcactatgatttaggagtaaagactgctctttggttacaaaccactcctttattaaaaaatcgaaataaagaatggcgaaagagaattccacgttttgatattgatgtcaaggaaacctatgatatatttcaaatctattcgccacagatttgggaagaaataattggtatgcaagatgtattgaatctacctacaaaacaaatgattttaaattttggccattatcgatttactgatttaaaggacagtggttgcacagtatataaaggtcgtgattttttagtccgaaattatgattatcatcctgcaacatatgatggtagatacttattatttcaacctaatgacgggggattatctcaaataggaccgacttcaagagtgactggtagaatggatggtatgaacgagtatggtttagttatggcatataattttatgcatcgtaaaaagcctgcaaatggatttgtatgttacatggttggtcggctaatacttgaaaattgcaaaaatgtaactgaagcaatcaaatttttaaaggaagtaccgcatcgtagttcattcagttatatactaatggatagacattcgaattatgccattgtcgaagttacacctcgatcaatagatgtaaggtatgaacatatatgcacaaatcattttgaattgcttacccatgaaaatagaaactatacaagagaatctaaagaacgcttaaatcgtgtaataaataaaacaactccttctacaaacaaagatatcgcattcaaattatttaacgacccgcaatacgaaatctatagcaacctatttaaaagttggtctggtacaattcatacttcactatatgaacctaattcattaatatcatggatggcattaggtcaaaacagtcatccaacctcaatcaatttttctaattggttaaaaggaaagaaattgaatataaattactttgaaggcgaaatagatacaccattaacttttgccacatactaa

SEQ ID NO: 2034 - protein, 346 aa, Artificial Sequence
  Description of Artificial Sequence: synthetic amino acid sequence
MQKVRSDIMTHRGSHYDLGVKTALWLQTTPLLKNRNKEWRKRIPRFDIDVKETYDIFQIYSPQIWEEIIGMQDVLNLPTKQMILNFGHYRFTDLKDSGCTVYKGRDFLVRNYDYHPATYDGRYLLFQPNDGGLSQIGPTSRVTGRMDGMNEYGLVMAYNFMHRKKPANGFVCYMVGRLILENCKNVTEAIKFLKEVPHRSSFSYILMDRHSNYAIVEVTPRSIDVRYEHICTNHFELLTHENRNYTRESKERLNRVINKTTPSTNKDIAFKLFNDPQYEIYSNLFKSWSGTIHTSLYEPNSLISWMALGQNSHPTSINFSNWLKGKKLNINYFEGEIDTPLTFATY

SEQ ID NO: 2035 - DNA, 363 bp, Artificial Sequence
  Description of Artificial Sequence: synthetic nucleic acid sequence
gtggcaaagttaaacattaacaacgaaataaagaaagtagaaaagcgacttgaagaagcaattataagttctgatcaaacattacaagaagcctcattccatttactatcttcagggggaaaaagagttagacccgcttttgttattttaagtggtcaatttggctctaacaacaaaccttcagaagacacgtatcgtgtagcagtagctttagaactaattcacatggctaccttagtccacgatgatgtgatagataaaagtgataaacgtagaggccgactcactatttcaaaaaaatgggaccaaagtacagctattttaacaggaaatttcttacttgctatggggctcaagcactga

SEQ ID NO: 2036 - protein, 120 aa, Artificial Sequence
  Description of Artificial Sequence: synthetic amino acid sequence
VAKLNINNEIKKVEKRLEEAIISSDQTLQEASFHLLSSGGKRVRPAFVILSGQFGSNNKPSEDTYRVAVALELIHMATLVHDDVIDKSDKRRGRLTISKKWDQSTAILTGNFLLAMGLKH

SEQ ID NO: 2037 - DNA, 375 bp, Artificial Sequence
  Description of Artificial Sequence: synthetic nucleic acid sequence
atgatcggacattatataggtatgagtttccaaataatagatgatgtgctagattttactagttctgaaaagaaacttggtaagccggttggtagtgaccttatgaatggtcatattacattacctgtactattagaaatgcgaaaaaataagacttttaaagataaaatttcacaacttaatcctgacagtcctcaacatgcctttgaaacttgtataacaataattagacagtccgaaagcatagaacaatcaaaacaaataagtgaaaagtatttaaataaagcaatcaatttaatcgatgaattagaggatggtcctaataaagaactatttagaaagcttattaaaaaaatgggaagtcgaaataagtaa

SEQ ID NO: 2038 - protein, 124 aa, Artificial Sequence
  Description of Artificial Sequence: synthetic amino acid sequence
MIGHYIGMSFQIIDDVLDFTSSEKKLGKPVGSDLMNGHITLPVLLEMRKNKTFKDKISQLNPDSPQHAFETCITIIRQSESIEQSKQISEKYLNKAINLIDELEDGPNKELFRKLIKKMGSRNK

SEQ ID NO: 2039 - DNA, 1062 bp, Artificial Sequence
  Description of Artificial Sequence: synthetic nucleic acid sequence
atgtttaaacgtcaagggggatatggtcgggggcgtcgtatgaaaattgaaaaagatactatagaaattgtgtcaggcgtcagaaatggctttactttaggaagtccaataactttagtagttactaacgacgatttcactcattggagaaaaataatgggcgtcgcaccaattagtgatgaagaaagagaaaatatgaaacgtaccattacaaaacctagaccgggccatgctgatcttataggtggcatgaaatataatcatcgtgatttaagaaatgtgcttgagcgttcatctgctagagaaacagcagcaagagttgctgtgggtgctgtttcaaaaattcttttagaacaattagatatccacttatatagccgtgtagtcgaaattggtggtattaaagacaaaggtttatatgatgtagatatgttcaaaaataatgtagataaaaatgatgtacgtgtaattgacgaaaatattgcgcaacaaatgagagataaaatagatgaagcgaaaaaagacggagattcaatcgggggcgtagttcaagtaatggctgaaaacatgcctattggagtgggaagttatgtacactatgaccgtaaattagatggacgcattgcacagggtgttgtgagtatcaacgccttcaaaggtgtaagttttggtgagggatttaaagcagctgaaaaacctggtagcgaaattcaagatgaaattcattataatcaagattcaggctattttagagctacaaatcacttaggtggatttgaaggaggcatgagtaatgggatgcctataattgttaatggtgtcatgaagcctattcctactttatataaaccactaaactcagttgatattaatactaaagaagacttcaaagctactatagaacgctcagatagttgtgcagtgcccgcagctagcgtagtatgtgaacacgttgtcgcttttgagttagcaaaagcagtactcgaagagtttcaatctaaccacatggaccaactcgtagcacaaattaaagagcgtcgacaactcaacatagaattttaa

SEQ ID NO: 2040 - protein, 353 aa, Artificial Sequence
  Description of Artificial Sequence: synthetic amino acid sequence
MFKRQGGYGRGRRMKIEKDTIEIVSGVRNGFTLGSPITLVVTNDDFTHWRKIMGVAPISDEERENMKRTITKPRPGHADLIGGMKYNHRDLRNVLERSSARETAARVAVGAVSKILLEQLDIHLYSRVVEIGGIKDKGLYDVDMFKNNVDKNDVRVIDENIAQQMRDKIDEAKKDGDSIGGVVQVMAENMPIGVGSYVHYDRKLDGRIAQGVVSINAFKGVSFGEGFKAAEKPGSEIQDEIHYNQDSGYFRATNHLGGFEGGMSNGMPIIVNGVMKPIPTLYKPLNSVDINTKEDFKATIERSDSCAVPAASVVCEHVVAFELAKAVLEEFQSNHMDQLVAQIKERRQLNIEF

SEQ ID NO: 2041 - DNA, 1569 bp, Artificial Sequence
  Description of Artificial Sequence: synthetic nucleic acid sequence
atggttgacggtgtcgtactagtggttgacgcatatgaaggtacaatgcctcaaactcgttttgttcttaaaaaagctttagaacaaaacttaaaaccggttgtagttgtgaataaaattgataaaccagctgctagacctgagggagttgtagatgaagtattagacttattcattgaattggaagcgaatgatgagcaattagacttcccagttgtttatgcttcagctgtgaatggaacagcaagtttagactctgaaaagcaagacgaaaatatgcaatccctatacgagacgattattgactatgtaccggcaccagtagataattcagatgaaccattacaattccaaattgctttactagattataatgattatgtaggtcgtataggcgttggacgtgtgttcagaggtaaaatgcgtgtaggtgataatgtatcactaattaaattagatggtacagttaagaactttcgtgtgacgaaaatatttggttactttggtcttaaacgtgaagaaattgaagaagcacaagcaggagacttaatagctgtttcaggtatggaagatattaacgttggtgaaacagttacaccacatgatcatcgtgacccattaccggtgttacgtattgatgaaccaaccctagaaatgacttttaaagtaaataactctccgtttgctggacgtgaaggtgattatgtaacagctcgacaaattcaagaaagattagatcaacaacttgaaacagatgtttctttaaaagttacacctactgatcaaccagattcatgggttgttgctggtcgtggtgaactacacttgtctattcttattgaaaacatgagacgtgaaggctttgaattacaggtttctaaacctcaagttattttaagagaaatcgatggtgtgttaagtgaaccatttgagcgtgtacaatgtgaagtgccttctgaaaatgccggggcagtgattgagtcattaggtgcacgaaaaggtgaaatgttagatatgatgacgaccgacaatggtttgacgcgtttaatctttatggtacctgcacgcggtatgattggttatactactgaatttatgtctatgacacgaggttatggaattattaaccatacatttgaagaatttagacctcgcgttaaagctcaaatcggtggtagacgtaacggtgcattgatttctatggaccaaggtcaagcaacatcttatgcgattattaacttagaagatcgtggtgttaactttatggaaccaggtactgaagtatatgaaggtatgattgttggtgaacataaccgtgagaacgatttaacagtaaatattactaaagcaaagcatcaaacaaacgtacgttcagctactaaagatcaaacacaaacgatgaatcgtcctagaattttaacattagaagaagcgttacaatttatcaatgatgatgaattggtggaagtaactcctgaaagtattcgcttaagaaagaaaatacttaataaatctgcccgtgaaaaagaagcaaaaagagttaaacaattaatgcaagacgaacaataa

SEQ ID NO: 2042 - protein, 522 aa, Artificial Sequence; identical to SEQ ID NO: 456
  Description of Artificial Sequence: synthetic amino acid sequence

SEQ ID NO: 2043 - DNA, 1014 bp, Artificial Sequence; identical to SEQ ID NO: 457
  Description of Artificial Sequence: synthetic nucleic acid sequence

SEQ ID NO: 2044 - protein, 337 aa, Artificial Sequence; identical to SEQ ID NO: 458
  Description of Artificial Sequence: synthetic amino acid sequence

SEQ ID NO: 2045 - DNA, 321 bp, Artificial Sequence; identical to SEQ ID NO: 293
  Description of Artificial Sequence: synthetic nucleic acid sequence

SEQ ID NO: 2046 - protein, 106 aa, Artificial Sequence; identical to SEQ ID NO: 294
  Description of Artificial Sequence: synthetic amino acid sequence

SEQ ID NO: 2047 - DNA, 303 bp, Artificial Sequence
  Description of Artificial Sequence: synthetic nucleic acid sequence
gtgttctgtagtaggggcaaaaccaatttgataagttgtttgagttttagttttagttatctttctctctacttttttaggttggagatctacagacttgttttggccatcccttttaatttttacagttgttttcgccgttttattttggtcaagaacatgtttgatatcatcaaaatttttaattttatgattacctacctgaactattttatcacctttgtgcaatccagcttcatcagctggagatttcttcacaacttctcctatgacattggttggcgtaccttggtagtatgctaa

SEQ ID NO: 2048 - protein, 100 aa, Artificial Sequence
  Description of Artificial Sequence: synthetic amino acid sequence
VFCSRGKTNLISCLSFSFSYLSLYFFRLEIYRLVLAIPFNFYSCFRRFILVKNMFDIIKIFNFMITYLNYFITFVQSSFISWRFLHNFSYDIGWRTLVVC

SEQ ID NO: 2049 - DNA, 1287 bp, Artificial Sequence
  Description of Artificial Sequence: synthetic nucleic acid sequence
atgagcattttaattacgattatttcatttatcatcgtatttggtgtactcgtaactgttcacgaatatggacacatgttttttgctaagcgagcaggaattatgtgtcctgaatttgcgattggtatgggtcctaaaatttttagttttcgtaaagatgaaacattatatacaattcgtctattaccggtgggtggttatgtcaggatggctggtgatggtcttgaagaaccaccagttcaaccaggtatgaacgtaaaaataaagttaaataaccaagacgaaatcacacatataattctagatgaccaacataaattccaacaaattgaagccatagaagttaagaaatgtgattttaaagatgacctatatattgaaggtatcacttcttatgatgatgaaaggcatcacttcactatagcgaaaaaggcattttttgtcgaaaatggaagccttgttcaaattgctccaagagatagacagtttacacataagaaaccattgccaaagtttttaacattatttgcaggtccgttatttaattttattttagctttagttctatttattggattagcatactaccaaggtacgccaaccaatgtcataggagaagttgtgaagaaatctccagctgatgaagctggattgcacaaaggtgataaaatagttcaggtaggtaatcataaaattaaaaattttgatgatatcaaacatgttcttgaccaaaataaaacggcgaaaacaactgtaaaaattaaaagggatggccaaaacaagtctgtagatctccaacctaaaaaagtagagagaaagataactaaaactaaaactcaaacaacttatcaaattggttttgcccctactacagaacacagcgtttttaaaccaataagctacggtatttataactttttcgataaaggtaagcttatttttacagctgttgttggtatgttagctagtatatttacaggagaattttcatttgatatgttaaatggccctgttggtatttatcacagtgttgattctgttgttaaatctggaattattaatttagtaggatacaccgctttattaagtgttaacttaggaataatgaatttgctacctattccagcgcttgatggtggtcgcatattatttgtactatatgaggctatttttagaaaaccagtgaataaaaaagcggaaacaggaattattgctgtaggcgcactttttgtggttattattatgattttagtcacttggaatgatatacaacggtatttcttataa

SEQ ID NO: 2050 - protein, 428 aa, Artificial Sequence
  Description of Artificial Sequence: synthetic amino acid sequence
MSILITIISFIIVFGVLVTVHEYGHMFFAKRAGIMCPEFAIGMGPKIFSFRKDETLYTIRLLPVGGYVRMAGDGLEEPPVQPGMNVKIKLNNQDEITHIILDDQHKFQQIEAIEVKKCDFKDDLYIEGITSYDDERHHFTIAKKAFFVENGSLVQIAPRDRQFTHKKPLPKFLTLFAGPLFNFILALVLFIGLAYYQGTPTNVIGEVVKKSPADEAGLHKGDKIVQVGNHKIKNFDDIKHVLDQNKTAKTTVKIKRDGQNKSVDLQPKKVERKITKTKTQTTYQIGFAPTTEHSVFKPISYGIYNFFDKGKLIFTAVVGMLASIFTGEFSFDMLNGPVGIYHSVDSVVKSGIINLVGYTALLSVNLGIMNLLPIPALDGGRILFVLYEAIFRKPVNKKAETGIIAVGALFVVIIMILVTWNDIQRYFL

SEQ ID NO: 2051 - DNA, 4329 bp, Artificial Sequence
  Description of Artificial Sequence: synthetic nucleic acid sequence
gtggttattattttggcaatgacaaatcgagaaaagtttaaagtgcttgccgatcaaataaaaatatcaaatcaactagaacaagatattcttgaacaaggtgaactcactcgtatagatgtttcaaataaaaacagaacatggactttccaaatatcactcccacattttttatctcatgaagattatcttctttttacacatgcaattgaagaagaatttaaagaaatagctacagtagcaattgatttttcaattaaagataccaacaatcaagatgagtttgctttaaaatatttcggacattgtattgatcaaacacgattgtcgccaaaagtgaaaggtcaattgaaacaaaaaaaactcattatgagtggaaatgttttaaaagtcttagtttcaaatgacattgagagaaatcattttgataaggcatgtaatggtagtttggttaaagcatttagacagtgtggctttgaaattgataaagtcgtttttgaaacagattcaacaaatcacgatgatgaccttgcatcgttagaagcacatattcaacaagaagatgaacaaagtgcaagagaagcaactgaaaaattagaaaaaatgaaagcagaaaaagcgaaacaacaagataataatgaaagtacagtggaaaaatgtcagattggaaaaccaattcagattgaaaatataaaaccaattgaatcaattattgaagaagaattcaaagtagctattgaaggtgttatatttgatattaacctaaaagaacttaaaagtggacgtcatatagttgagcttaaagttactgattacacagattcacttgtattaaaaatgtttacaagaaaaaataaagatgacttggaccactttaaggcacttagtgttggtaaatgggttagagctcaaggtcgtattgaagaagatacttttgttagggatcttgtcatgatgatgtcagatattgaagaaattaaaaagacacctaaacaagataaagcagaagataagcgtgtagagtttcatttacatacgtctatgagtcaaatggatggtattcctaatattagtgcatatgttgaacaagctgctaaatgggggcaccaagctttagcagtaacagatcacaacgtagtacaagcttttcctgatgcacataatgctgccgaaaaacatggtattaagatgatttatggtatggaaggtatgctagtagacgatggtgttcctatagcttataaaccaacagaccgtaatttaaaagatgcaacatatgtggtgtttgacgtagagacaacaggtctttctaatcaatatgataaaattattgaattagctgcagtaaaagtgcataacggtgaaattatagataagtttgaacgttttagtaatccacacgaaagattatctgaaaccattatcaatcttacacatatcactgatgatatgttaactgatgctcccgaaattgaagaagtgttaactgaatttaaagagtgggttggagatgctatatttgtagctcataatgcttcatttgatatgggatttattgacacaggatatgaaaggttaggctttggaccttctacaaacggtgtaattgatacacttgagctttcacgtacaattaataccgaatatgggaaacatggtttgaatttccttgccaaaaaatatggtgtcgaattaacgcaacatcatagagcgatttatgatacagaagcaacagcttatatttttataaaaatggttcaacaaatgaaagaactaggtgtgaacaaccatctagaaattaataaaaaattaactaatgaagatgcatataaaagagctcgtccatctcacgttacactcattgttcaaaatcaagaaggtcttaaaaatttatttaaaatagttagtgcttcattagttaagtattattaccgtacgccaagaattccacgttctcttttaaatgaatatcgagaagggatcttgattggtacagcttgtgatgagggtgaattattcacagcagtaatgcagaaggatcagtcggaagtagaaaaaatagcaaagttctatgattttatagaagttcaaccgcctgcgctttatcaagatttaatggatagagaattaatacgagataatgaaacgttaacacaaatttacaagcgattaatagatgctggtaaaagcgctaatatcccagtgattgctactggtaacgcgcattatctatatgaacatgatgctatagccagaaaaattttaattgcatcccaaccagggaatccattaaatcgttcaacattaccagaagctcactttagaaccactgatgaaatgttagatgattttcacttcttaggtgaagaaaaagcatatgaaatcgttgtaacaaatacaaatgagctcgctaataaaattgaaaaagtggttcctataaaagataaactatttacgccaagaatggatggggctaatgaagaaattcgtgagttgagttattctaatgcgaaaaaactatatggtgaagatttaccacaaattgttatagatcgccttgaaaaggaattagatagtattattggtaatggcttttctgttatttacctcatatctcaacgtttggtgaagaaatcgctagatgatggttatttagttggatcgcgtggttcagttggttctagtttcgtagcaacaatgactgaaattacagaagttaatccgcttccaccacactacatttgttcacattgtaagacaagtgagttctttgatgatggttcggttggatctggattcgatttaccagataaaaaatgtcctacttgtggtaatgaattaattaaagaaggacaagatatcccttttgagacattccttggatttaaaggagataaagttccagatattgatttgaactttagtggtgaatatcaacctaacgctcataattacacaaaagtattgtttggtgaagataaagtatttcgtgctggaacaataggtactgttgctgaaaaaacagcttttggtttcgtaaaaggttacttaaatgatcaaggtattcacaaacgtggtgctgaaattgatcggttggttaaaggttgtacaggggtcaaacgtacaactggtcaacatcctggaggaatcattgttgtaccggattacatggatatttatgattttacaccgattcaattcccagcagacgaccaaagtgcagcgtggatgacaacccatttcgacttccattcaatacacgataatgtcttaaaattagatatattaggacatgatgacccaacgatgattcgtatgttacaagacttatcaggaattgaccccaaaactataccagtagatgataaagaaacaatgcaaatatttagtggtcctgagagtttaggtgttacagaagacgaaatattatgtaagacaggtacatttggtgtaccagaatttggtactggatttgtacgtcaaatgcttgaagatactaagccaacgacattctcagaattagttcaaatttcaggtttatctcatggtacggacgtttggttaggtaatgcacaagagttaattcgtcaagggatatgtgacttatctagtgtgataggctgtcgtgatgatatcatggtatatctgatgtatgctggacttgaaccgtcaatggcttttaaaacgatggaatttgtacgtaaaggtcgtggcttaacagatgaaatggttgaagcgatgaaggaaaataacgtgccagattggtatttagattcttgtcgtaaaattaaatatatgttccctaaagctcatgccgctgcttatgtactgatggctgtaagaattgcatactttaaagtacatcatccactatattattatgcagcatactttaccataagagcttccgattttgaccttataacaatgattaaagataaaacgagtattcgtaatacagttaaagatatgtattcacgatatatggatttagggaaaaaagagaaagatgtattaactgtattagaaataatgaatgaaatggcgcatcgaggttttcgattgcaaccgattagtttagaaaaaagccaagcttttgacttcatcattgaaggggatacattgattcctccattcatttcagtgccaggacttggagaaaacgttgcacaaagaattgttgaagcgagagaagagggaccatttttatccaaagaagatttaaataaaaaagccggcttatctcaaaaggttattgactatttagatgaattaggctcattgccagatttacctgacaaggcacaattgtcgatatttgatatgtaa

SEQ ID NO: 2052 - protein, 1442 aa, Artificial Sequence
  Description of Artificial Sequence: synthetic amino acid sequence
VVIILAMTNREKFKVLADQIKISNQLEQDILEQGELTRIDVSNKNRTWTFQISLPHFLSHEDYLLFTHAIEEEFKEIATVAIDFSIKDTNNQDEFALKYFGHCIDQTRLSPKVKGQLKQKKLIMSGNVLKVLVSNDIERNHFDKACNGSLVKAFRQCGFEIDKVVFETDSTNHDDDLASLEAHIQQEDEQSAREATEKLEKMKAEKAKQQDNNESTVEKCQIGKPIQIENIKPIESIIEEEFKVAIEGVIFDINLKELKSGRHIVELKVTDYTDSLVLKMFTRKNKDDLDHFKALSVGKWVRAQGRIEEDTFVRDLVMMMSDIEEIKKTPKQDKAEDKRVEFHLHTSMSQMDGIPNISAYVEQAAKWGHQALAVTDHNVVQAFPDAHNAAEKHGIKMIYGMEGMLVDDGVPIAYKPTDRNLKDATYVVFDVETTGLSNQYDKIIELAAVKVHNGEIIDKFERFSNPHERLSETIINLTHITDDMLTDAPEIEEVLTEFKEWVGDAIFVAHNASFDMGFIDTGYERLGFGPSTNGVIDTLELSRTINTEYGKHGLNFLAKKYGVELTQHHRAIYDTEATAYIFIKMVQQMKELGVNNHLEINKKLTNEDAYKRARPSHVTLIVQNQEGLKNLFKIVSASLVKYYYRTPRIPRSLLNEYREGILIGTACDEGELFTAVMQKDQSEVEKIAKFYDFIEVQPPALYQDLMDRELIRDNETLTQIYKRLIDAGKSANIPVIATGNAHYLYEHDAIARKILIASQPGNPLNRSTLPEAHFRTTDEMLDDFHFLGEEKAYEIVVTNTNELANKIEKVVPIKDKLFTPRMDGANEEIRELSYSNAKKLYGEDLPQIVIDRLEKELDSIIGNGFSVIYLISQRLVKKSLDDGYLVGSRGSVGSSFVATMTEITEVNPLPPHYICSHCKTSEFFDDGSVGSGFDLPDKKCPTCGNELIKEGQDIPFETFLGFKGDKVPDIDLNFSGEYQPNAHNYTKVLFGEDKVFRAGTIGTVAEKTAFGFVKGYLNDQGIHKRGAEIDRLVKGCTGVKRTTGQHPGGIIVVPDYMDIYDFTPIQFPADDQSAAWMTTHFDFHSIHDNVLKLDILGHDDPTMIRMLQDLSGIDPKTIPVDDKETMQIFSGPESLGVTEDEILCKTGTFGVPEFGTGFVRQMLEDTKPTTFSELVQISGLSHGTDVWLGNAQELIRQGICDLSSVIGCRDDIMVYLMYAGLEPSMAFKTMEFVRKGRGLTDEMVEAMKENNVPDWYLDSCRKIKYMFPKAHAAAYVLMAVRIAYFKVHHPLYYYAAYFTIRASDFDLITMIKDKTSIRNTVKDMYSRYMDLGKKEKDVLTVLEIMNEMAHRGFRLQPISLEKSQAFDFIIEGDTLIPPFISVPGLGENVAQRIVEAREEGPFLSKEDLNKKAGLSQKVIDYLDELGSLPDLPDKAQLSIFDM

SEQ ID NO: 2053 - DNA, 1071 bp, Artificial Sequence
  Description of Artificial Sequence: synthetic nucleic acid sequence
atggacgaaggttcatttagagtgattgcacgtaaagaagtcgtagaagaagtgtttgatgacagagatgaagttgatttaagtactgctttagtcaaaaatcctgcctatgaagtaggagatatttatgaacaagatgtaacaccgaaagacttcggacgtgtaggagctcaagcagctaagcaagctgtgatgcaacgacttagagacgcagaaagagaaattttatatgatgaatttatcgataaagaagaagatattctaacaggtgtgattgaccgtgtagaccatcgctatgtatatgtgaatttaggaagaattgaagctgtgctgtcagaagctgaaagaagtcctaatgagaaatatattcctaatgaacgtatcaaggtgtacgtaaataaagttgaacagactacaaaaggtccacaaatttacgtatcaagaagtcatcctggattactaaaacgcttattcgaacaagaagttccagaaatttatgatggtactgttattgttaaatcagtagcgcgtgaagctggagatcgttctaaaattagcgtgtattctgataatcctgatatagatgctgttggcgcatgtgtaggttctaaaggagcacgagtagaagcggttgttgaagaacttggtggcgaaaaaatcgatatcgtccaatgggatgaagatccgaaagtatttgttcgtaatgctttaagtccatcacaagttttagaagtaattgttgatgaagagaatcaatcaactgtagttgtagttcctgattaccaattatccttagctataggtaaaagagggcaaaacgcacgtttagctgctaaattaacaagttggaagatagatattaaatcagaatctgatgcccgagaagctggaatttatcctgttattgaatcagaagaagttgcagatgaaattgttaattccggtgacgaagatgttgagtttgataatgttaacttggaagagacaaacttaactagtacagaattagctgctgaaaatgatgaagataaaaaagataaaacagaagaagataatgacacagaatcatag

SEQ ID NO: 2054 - protein, 356 aa, Artificial Sequence
  Description of Artificial Sequence: synthetic amino acid sequence
MDEGSFRVIARKEVVEEVFDDRDEVDLSTALVKNPAYEVGDIYEQDVTPKDFGRVGAQAAKQAVMQRLRDAEREILYDEFIDKEEDILTGVIDRVDHRYVYVNLGRIEAVLSEAERSPNEKYIPNERIKVYVNKVEQTTKGPQIYVSRSHPGLLKRLFEQEVPEIYDGTVIVKSVAREAGDRSKISVYSDNPDIDAVGACVGSKGARVEAVVEELGGEKIDIVQWDEDPKVFVRNALSPSQVLEVIVDEENQSTVVVVPDYQLSLAIGKRGQNARLAAKLTSWKIDIKSESDAREAGIYPVIESEEVADEIVNSGDEDVEFDNVNLEETNLTSTELAAENDEDKKDKTEEDNDTES

SEQ ID NO: 2055 - DNA, 309 bp, Artificial Sequence
  Description of Artificial Sequence: synthetic nucleic acid sequence
atgaaaatttttaatttgcttggtttagctatgagagctggtaaaatcaaaagtggcgaatcggtcatcttaaatgagcttaaaaagaatcaaataaaacttgtcatattagctagcgatgcatctagtaacactctaaaacaaatgaataataaatgtaatagttaccaagtgccattaaaagtgtttggtactagaaatgaattagggttagcaataggtaaaagcgatagagttaatattggtataacagataatggttttgcaaaaaaattgttatcaatgatagatgaatatggtaaggagtga

SEQ ID NO: 2056 - protein, 102 aa, Artificial Sequence
  Description of Artificial Sequence: synthetic amino acid sequence
MKIFNLLGLAMRAGKIKSGESVILNELKKNQIKLVILASDASSNTLKQMNNKCNSYQVPLKVFGTRNELGLAIGKSDRVNIGITDNGFAKKLLSMIDEYGKE

SEQ ID NO: 2057 - DNA, 2163 bp, Artificial Sequence
  Description of Artificial Sequence: synthetic nucleic acid sequence
atgagtaaaaaaagaatttacgaatatgcgaaagaattaaatctaaagagtaaagagattatagatgagttaaaaagtatgaatgttgaagtgtcaaatcatatgcaagctttagaagaagaacaaatcaaagcattagataaaaaatttaaagcctctcaagcgaaagacactaataaacaaaatactcaaaataatcaccaaaaatctaataataaacaaaattctaacgataaagaaaaacaacaaagtaagaataatagtaaaccaacgaagaaaaaagaacaaaacaacaaaggaaaacagcaaaataaaaacaataaaactaataagaatcaaaaaaacaataaaaataaaaagaataataaaaataataaacctcaaaatgaggtagcagaaacaaaagaaatgccctctaaaatcacttatcaagaaggcataactgtcggtgagttagctgaaaagctaaatgtagaatcagctggtattattaaaaaattgttcttactaggtattatggctaatatcaatcaatcattggatgaagaaacattagaattaattgcagatgactatggcgttgaaatagagaaagaagtagtcgttgatgaagaagatttatcaatttattttgatgatgagactgatgattctgatgcaattgaacgtccagcagttgttacaatcatgggccacgtagaccatggtaaaacgactttattagattctattcgtaacactaaagttacagaaggagaagctggcggaatcactcaacatattggtgcttatcaaattgaaaattcaggtaaaaaaattacgttcttagatactcctggacatgctgcatttacgactatgcgtgcacgtggtgctcaagttactgatattacaattttagtcgtggccgctgatgatggtgtgatgcctcaaacaattgaagctataaatcacgctaaagaagcagaagtacctacgattgttgcagtaaacaaaattgataaaccaactgctaaccctgatcgtgttatgcaagaactcactgagtatggattaattccagaagactggggcggtgacacaatctttgtaccactatctgcattgagtggagacggtattgatgatttattagaaatgatcggtttagtagcggaggtacaagaacttaaagctaatcctaataaacaagctgtaggtactgtgattgaggctgaattagataaatcacgaggtccagctgcatctttacttgttcaaaatggtactttaaacgttggagatgcaattgttgtaggtaatacttatggacgtatacgtgcaatggttaatgatttaggaaaaagaattaaatctgccggtccttcaacacctgtagaaattactggtattaacgatgttccacttgcaggtgatcgttttgttgtatttggtgatgaaaaacaagcacgtcgaattggtgaagcacgtcatgaggcaagtgtcatacagcaacgtcaagaaagtaaaaatgtttcattagacaatttatttgagcaaatgaaacaaggtgaaatgaaagatttaaatgtcatcattaaaggtgatgtacaaggttcagttgaagcattggccgcatctctaatgaaaatagatgttgaaggtgtgaatgtacgaattattcatacagctgttggtgctatcaatgaatcagatgttacattagcaaatgcatcaaatggtattattattggttttaatgtacgcccagatgcaggtgcgaaacgtgcggctgaagctgaaaatgtagatatgcgattacacagagttatctataatgttattgaagagatagaatcagctatgaaaggtttacttgacccagaatttgaagagcaagtcattggacaagctgaagtgcgtcaaacatttaaagtttctaaagttggtacaattgctggtagttatgtgactgaaggtaaaatcactcgtaacgctggtgtacgcgtaattagagatggtatcgtgttatttgaaggtgaacttgacacattaaaacgtttcaaagatgatgctaaagaagtagctcaaggctatgaatgtggtattacaattgaaaaatataatgatctcaaagaaggagacattattgaagcgtttgaaatggtagaaattcaaagataa

SEQ ID NO: 2058 - protein, 720 aa, Artificial Sequence
  Description of Artificial Sequence: synthetic amino acid sequence
MSKKRIYEYAKELNLKSKEIIDELKSMNVEVSNHMQALEEEQIKALDKKFKASQAKDTNKQNTQNNHQKSNNKQNSNDKEKQQSKNNSKPTKKKEQNNKGKQQNKNNKTNKNQKNNKNKKNNKNNKPQNEVAETKEMPSKITYQEGITVGELAEKLNVESAGIIKKLFLLGIMANINQSLDEETLELIADDYGVEIEKEVVVDEEDLSIYFDDETDDSDAIERPAVVTIMGHVDHGKTTLLDSIRNTKVTEGEAGGITQHIGAYQIENSGKKITFLDTPGHAAFTTMRARGAQVTDITILVVAADDGVMPQTIEAINHAKEAEVPTIVAVNKIDKPTANPDRVMQELTEYGLIPEDWGGDTIFVPLSALSGDGIDDLLEMIGLVAEVQELKANPNKQAVGTVIEAELDKSRGPAASLLVQNGTLNVGDAIVVGNTYGRIRAMVNDLGKRIKSAGPSTPVEITGINDVPLAGDRFVVFGDEKQARRIGEARHEASVIQQRQESKNVSLDNLFEQMKQGEMKDLNVIIKGDVQGSVEALAASLMKIDVEGVNVRIIHTAVGAINESDVTLANASNGIIIGFNVRPDAGAKRAAEAENVDMRLHRVIYNVIEEIESAMKGLLDPEFEEQVIGQAEVRQTFKVSKVGTIAGSYVTEGKITRNAGVRVIRDGIVLFEGELDTLKRFKDDAKEVAQGYECGITIEKYNDLKEGDIIEAFEMVEIQR

SEQ ID NO: 2059 - DNA, 384 bp, Artificial Sequence
  Description of Artificial Sequence: synthetic nucleic acid sequence
gtgagtaaagtaaaaataaagagaggtgagatgatgaataatataagagcagaacgtgtaggagaacaaatgaaacaggaaatcatggacattgttaataataaagttaaagaccctagagttggttttttaacaattactgatgttgaactaaccaatgacctttcacaagcaaaggtatatttaacagtgttagggaatgataaagaagttgataatacgtttaaagctttgcataaagcaactgggtttataaaatctgaacttggttctcgaatgcgcctaagaattatacctgagttaacattcgaatatgatgaatctatcgaatacggtaataagatagaacgcatgattcaagagttacacaaaaatgataaataa

SEQ ID NO: 2060 - protein, 127 aa, Artificial Sequence
  Description of Artificial Sequence: synthetic amino acid sequence
VSKVKIKRGEMMNNIRAERVGEQMKQEIMDIVNNKVKDPRVGFLTITDVELTNDLSQAKVYLTVLGNDKEVDNTFKALHKATGFIKSELGSRMRLRIIPELTFEYDESIEYGNKIERMIQELHKNDK

SEQ ID NO: 2061 - DNA, 918 bp, Artificial Sequence
  Description of Artificial Sequence: synthetic nucleic acid sequence
atgtataatggcatactaccggtatttaagaaacgaggtttaacaagtcacgacgtcgtttttaaattacgtaaaattttaaaaatgaaaaaaattggtcatacaggaacattagatcctgaagttaatggtgtgttaccaatttgtttaggcgatgcgacaaaagtcagtgattatatcatggaaatgggaaaaacttatcacgctatgataacgctaggaaagagtacgactactgaagaccaaactggagatattttagaaactagggctgttgataagaatgatattaatgaagatacgattgaccaagtgttgcagcaatttgaggggcatattcaacaaattccgcctatgtattcttctgttaaagtaaatggaagaaaattatatgaatatgcgagaaataatgaaactgtcgaacgccctaaacgacaagtttttattaaagatatacatagaatatctgaagttacttttcaggagcagacatgtcattttgaagttgaagtaacatgtggtaaaggaacttatattagaactttagctacagatattggacttaaacttggttttccagctcatatgtcacgtctaactagaattgcttctggcggttttcaattagaaagtagtttaacgattgatcaaattaaagaattacatgagcatgattcattacataatgaattgtttcctatagaatatggcttaaaaggtctgaaatcattccaagtgaaagattcaaattttaaaaagaaaatctgtaacggtcaaaaatttcataaaaaagtgttaagtcaaaatgttaaagaaccttttatatttgtcgatagtagcactcaaaaagttttagcaatatatatagttcatccagataaaccttatgaaataaaacctaaaaaagtttttaattaa

SEQ ID NO: 2062 - protein, 305 aa, Artificial Sequence
  Description of Artificial Sequence: synthetic amino acid sequence
MYNGILPVFKKRGLTSHDVVFKLRKILKMKKIGHTGTLDPEVNGVLPICLGDATKVSDYIMEMGKTYHAMITLGKSTTTEDQTGDILETRAVDKNDINEDTIDQVLQQFEGHIQQIPPMYSSVKVNGRKLYEYARNNETVERPKRQVFIKDIHRISEVTFQEQTCHFEVEVTCGKGTYIRTLATDIGLKLGFPAHMSRLTRIASGGFQLESSLTIDQIKELHEHDSLHNELFPIEYGLKGLKSFQVKDSNFKKKICNGQKFHKKVLSQNVKEPFIFVDSSTQKVLAIYIVHPDKPYEIKPKKVFN

SEQ ID NO: 2063 - DNA, 453 bp, Artificial Sequence
  Description of Artificial Sequence: synthetic nucleic acid sequence
atgtatgatgaattagaggttaataaaagtcgttttaaaaactgtaattttaatgaaggtatttttaagaatatagaagcaatttgtaattgtaaatttacaacgtgcgggtttaataattgtattttcgaagatgttcatttttacaaaaaccaatttaaagattcaacatttgtgaatacaccatttgatcaatccgtatttaatagtactttattccaaaatgcaatgttcgatagcaatctcattcgtagcgtaaaatggactgatatcatttttaaaaacgtttctttcaaaaatgtagaaattgaaggaacaacatttaaagatgtaaaattcaaaaattgtgagttcaaaaatgtaattattactaattcaactatgtcgcaaaagttaatgaatgaattacaaaaacaagatgttactttagaaaatatagacacttctatttaa

SEQ ID NO: 2064 - protein, 150 aa, Artificial Sequence
  Description of Artificial Sequence: synthetic amino acid sequence
MYDELEVNKSRFKNCNFNEGIFKNIEAICNCKFTTCGFNNCIFEDVHFYKNQFKDSTFVNTPFDQSVFNSTLFQNAMFDSNLIRSVKWTDIIFKNVSFKNVEIEGTTFKDVKFKNCEFKNVIITNSTMSQKLMNELQKQDVTLENIDTSI

SEQ ID NO: 2065 - DNA, 801 bp, Artificial Sequence
  Description of Artificial Sequence: synthetic nucleic acid sequence
atgaaagatagggttgaaacagaagaatatgctagaaatcaattaatctctaaaaattcaattttaagtgaagaaaatttatcattgaaaaaccaaatgttaagtacaaacaatgacgtcggtcaacacgcttttaaaaacgccaagcgtgaattaagaaaaatattaaatagatttaaagaagagggtcgtttacgatcatatacaattgttcctacgagtaatttggctgttaaacatccccttttcgaatatgcacgttcattcgattttattatcattactgatgttggtttgataaatgtggatgttaaaaattggaaccaaaaaacgttttatcattttgatgtgccagatcaacatcttgaagaaggacaaccacaatataataccgaaaaagttgtcggtcattatattagcaatcgatatcatagtcagtttaaaacaacacgttctggtgtctatacttttattgagattttacaggataatcgtgtaatatatgaattttatgaccacgatccatacgataaagccgcaaacaatgcaaaagcattaaaagataaaattgaaaatgattataattttaaaattcaaagtattggcgtcatatattttagtgatggtagcgttaatattattgaaggatccgacgagagtgataaatacgtcgacaccgtatctacaccgatatcacttgaaaaagtaattgaggaagctatcgatttatctaagcacccccttactgataaacaaatcgaagaaatttctgaaaactttaaacaacatatgaataattaa

SEQ ID NO: 2066 - protein, 266 aa, Artificial Sequence
  Description of Artificial Sequence: synthetic amino acid sequence
MKDRVETEEYARNQLISKNSILSEENLSLKNQMLSTNNDVGQHAFKNAKRELRKILNRFKEEGRLRSYTIVPTSNLAVKHPLFEYARSFDFIIITDVGLINVDVKNWNQKTFYHFDVPDQHLEEGQPQYNTEKVVGHYISNRYHSQFKTTRSGVYTFIEILQDNRVIYEFYDHDPYDKAANNAKALKDKIENDYNFKIQSIGVIYFSDGSVNIIEGSDESDKYVDTVSTPISLEKVIEEAIDLSKHPLTDKQIEEISENFKQHMNN

SEQ ID NO: 2067 - DNA, 507 bp, Artificial Sequence
  Description of Artificial Sequence: synthetic nucleic acid sequence
atgcatctatttctgaatgatgattttatattaccatcgaaaatagatatttgtgttgagcgcaaaaagttattggaaattatcagggtgattcctgaagaatttacgattcactattatgataatcagttatatgaaagattaagagaatctttatctttatcagatgttgaacatgttaaagtctttaaaaacgatacagaagtcatgacaatatttgtttatgatgttgtaaatgatgaatggctatttaggttagatcatcatatacgtttaccaaaaaataatatatattttcattctttaagttggaacgtagattatattaagccagaaatagttcttatgtatgatttaatgagtgaacaaaaatatcatcagtttagtaattataaagctgttattgattctcttagttattatcaattctatattttaaaattggtagtaggtgaacagcgtattaaaaaagctatagtaaatagttccactaaaaagatatcttaa

SEQ ID NO: 2068 - protein, 168 aa, Artificial Sequence
  Description of Artificial Sequence: synthetic amino acid sequence
MHLFLNDDFILPSKIDICVERKKLLEIIRVIPEEFTIHYYDNQLYERLRESLSLSDVEHVKVFKNDTEVMTIFVYDVVNDEWLFRLDHHIRLPKNNIYFHSLSWNVDYIKPEIVLMYDLMSEQKYHQFSNYKAVIDSLSYYQFYILKLVVGEQRIKKAIVNSSTKKIS

SEQ ID NO: 2069 - DNA, 744 bp, Artificial Sequence
  Description of Artificial Sequence: synthetic nucleic acid sequence
atgtcgtcattatgccttttgcctggagctgaaacgataatgattttacgttcagggtcttcattcactataggacaatcgttttttacgctgtccctaggtacaaccggaatgattacttatgcaagctatgcacctaaaaatatgacgataaagtcttcagcactttcaattgtcgtaatgaatattttaatttctgtcttggctggattagctatatttcctgcgcttaaaacatttggttaccaaccccaagaaggccctggcttattatttaaggttttaccactagtatttagcgaaatgacttttggtacattcttttactttatatttttactattattcttatttgcggcattaacgtcttctatatcattattagagttaaatgtatctaattttactaaaaatgataatagtaaaagacaaaaagtggcaatcataggtagtatacttgtatttatcattagtatcccagcaacattatcttttagtagtctaagtcatttgcgttttggcgctggtacgatatttgataatatggattttattgtatctaatattcttatgccattaggggcactaggaacaacattagtggttggccaattactagataaaaaattattaaaagaaagctttgggaaagacaaattcaacctatttttaccgtggtattatttaattaagttcatcatgcctattgttattattttagtatttatagttcaattattttaa

SEQ ID NO: 2070 - protein, 247 aa, Artificial Sequence
  Description of Artificial Sequence: synthetic amino acid sequence
MSSLCLLPGAETIMILRSGSSFTIGQSFFTLSLGTTGMITYASYAPKNMTIKSSALSIVVMNILISVLAGLAIFPALKTFGYQPQEGPGLLFKVLPLVFSEMTFGTFFYFIFLLLFLFAALTSSISLLELNVSNFTKNDNSKRQKVAIIGSILVFIISIPATLSFSSLSHLRFGAGTIFDNMDFIVSNILMPLGALGTTLVVGQLLDKKLLKESFGKDKFNLFLPWYYLIKFIMPIVIILVFIVQLF

SEQ ID NO: 2071 - DNA, 399 bp, Artificial Sequence
  Description of Artificial Sequence: synthetic nucleic acid sequence
atgattgcatacgatttgataggacaaactccattagttttattagaaagctttagtgacgagaatgttaaaatatacgccaaacttgagcaatttaatcctggtggtagcatcaaagaccgtctagggaagtacttaattgaaaaagcaatagatgaaggacgacttaaagaaggggatacaatagtcgaagcgactgctggtaatacaggcattggacttgctattgcttctaatcggcacaaagtaaaatgtatcatctttgctccagaaggatttgcagaagaaaaaatttcaattatgaaagcattgggtgcagatgttagacgtacccccaaagctgagggaatgactggcgcacagcaagaggcgttggcatacgcaacacgatatgtacta

SEQ ID NO: 2072 - protein, 133 aa, Artificial Sequence
  Description of Artificial Sequence: synthetic amino acid sequence
MIAYDLIGQTPLVLLESFSDENVKIYAKLEQFNPGGSIKDRLGKYLIEKAIDEGRLKEGDTIVEATAGNTGIGLAIASNRHKVKCIIFAPEGFAEEKISIMKALGADVRRTPKAEGMTGAQQEALAYATRYVL

SEQ ID NO: 2073 - DNA, 312 bp, Artificial Sequence; identical to SEQ ID NO: 1707
  Description of Artificial Sequence: synthetic nucleic acid sequence

SEQ ID NO: 2074 - protein, 103 aa, Artificial Sequence; identical to SEQ ID NO: 1708
  Description of Artificial Sequence: synthetic amino acid sequence

SEQ ID NO: 2075 - DNA, 1423 bp, Artificial Sequence
  Description of Artificial Sequence: synthetic nucleic acid sequence
atgacctgtttagatagaataactggtcgtatgctacctggaacaaagcttcagtctggtttacatcaagctatagaggctctggaaaatgttgaaatttctcaagatatgagtgtgatggcaaccataacattccaaaacttatttaagcaatttgatgaattttcaggtatgactggaacaggtaaattaggggaaaaagaattctttgatttatattcaaaagttgttatagagattccgactcacagtccgattgaacgagatgatagacctgatagagtatttgctaatggtgacaaaaagaacgatgcaattttaaagacagtgattggtatacatgaaactcaacaacctgtgttactaattacacgtactgcagaagcggcagaatatttttcagctgagttatttaaacgtgatatacccaacaatttattaatcgctcaaaatgtagctaaagaggcacaaatgattgctgaggcgggacaattatctgcagttactgttgctacaagtatggcagggcgtggaactgatataaagttatcaaaagaggttcatgatatcggtggcttagcagtgattattaatgaacatatggataatagccgtgttgatcgtcaattaagaggacgctcaggtcgccaaggagatcctggatattcacagatttttgtatcacttgatgatgatttagtaaaacgttggagtaactctaacttggcagaaaataaaaacctccaaacgatggatgcatctaaactagaaagtagtgcactctttaaaaaacgtgtaaagtcaattgttaataaagcgcaacgtgtatctgaagagactgctatgaaaaatagagaaatggcaaatgaattcgaaaaaagtattagtgttcaacgagataaaatttatgctgaacgtaatcacatacttgaagcaagcgattttgatgattttaattttgaacagcttgcacgagatgtgtttacaaaagacgttaaaaatcttgacttaagtagtgaacgtgcacttgtgaattatatatacgaaaacttaagttttgtcttcgatgaagatgtatcaaatattaatatgcaaaatgatgaagaaatcatacaattcttaatacaacaatttactcaacaatttaacaatcgtttagaagttgctgctgattcatatttaaaacttcgtttcattcaaaaatcaattttgaaagcgatagatagcgaatggattgaacaagtagataacttacaacaacttaaagccagtgtaaacaatcgacaaaatggacagcgtaatgtcatttttgaatatcataaagtggctcttgaaacgtatgaatatatgtctgaagatataaaaaggaagatggttagaaatttatgtttaagtattctagcctttgataaggacggagata

SEQ ID NO: 2076 - protein, 475 aa, Artificial Sequence
  Description of Artificial Sequence: synthetic amino acid sequence
  MOD_RES (475): variable amino acid
MTCLDRITGRMLPGTKLQSGLHQAIEALENVEISQDMSVMATITFQNLFKQFDEFSGMTGTGKLGEKEFFDLYSKVVIEIPTHSPIERDDRPDRVFANGDKKNDAILKTVIGIHETQQPVLLITRTAEAAEYFSAELFKRDIPNNLLIAQNVAKEAQMIAEAGQLSAVTVATSMAGRGTDIKLSKEVHDIGGLAVIINEHMDNSRVDRQLRGRSGRQGDPGYSQIFVSLDDDLVKRWSNSNLAENKNLQTMDASKLESSALFKKRVKSIVNKAQRVSEETAMKNREMANEFEKSISVQRDKIYAERNHILEASDFDDFNFEQLARDVFTKDVKNLDLSSERALVNYIYENLSFVFDEDVSNINMQNDEEIIQFLIQQFTQQFNNRLEVAADSYLKLRFIQKSILKAIDSEWIEQVDNLQQLKASVNNRQNGQRNVIFEYHKVALETYEYMSEDIKRKMVRNLCLSILAFDKDGDX

SEQ ID NO: 2077 - DNA, 597 bp, Artificial Sequence; identical to SEQ ID NO: 1703
  Description of Artificial Sequence: synthetic nucleic acid sequence

SEQ ID NO: 2078 - protein, 198 aa, Artificial Sequence; identical to SEQ ID NO: 1704
  Description of Artificial Sequence: synthetic amino acid sequence

SEQ ID NO: 2079 - DNA, 1236 bp, Artificial Sequence
  Description of Artificial Sequence: synthetic nucleic acid sequence
gtggcgcttttagtcacacctttagttaaagaacatggtgttgaatatctttttgctgctacgatattgatggggttaatacaattacttttaggaatacttaaagtcggtcgtttaatgaaatttattccccgtccagttatgattggatttgttaatgcattgggtattatgatttttatgtctcaaatagagcatatttttaatatatctatagcaacttatatatacgttattataactttactaattgtatatgttattcctagattttataaagctatacctgccccattaatagctataattgttttaacagcattgtatatgtatacaggatctgacgtaagaactgtaggtgatttaggtaatattaagcaaactttgcctcatttcttaatccctaacattccttttaatttagaaacacttcaaattattttcccatattcattatcaatggctattgtgggtctagtagaaagcctacttacagctaaaattgtagatgatgcaactgatacacacagtagtaaaaacaaagaatcaagaggtcaagggattgctaatattattactggtttctttggcggtatgggaggttgtgccatgattggacaatcagtaatcaatgttaagtcaggtgcaaatagtagattgtctacatttacagcaggtattgtacttatgtttatgattattgttctcggtggtgtagtcgttcaaatcccgatgccaattcttgcagggataatggttatggtttctatcgggactgttgattggaattcatttaagtatataaaaaaagcacctaaaacagatgcattcgttatggttttaacggttattattgtattaataacacataacttagctatcggtgtagttgtaggtgttgttttcagtgctatattctttgcgactaaaatttctaaagttgaagttatttataaagagttaggtaagcagcatcgtttttcttttaaaggtcagatattctttgtatcaattgattctatgatggagaaaattgattttaatattgaagatagtgtcatagtgttgaattttgatcacgctcacctatgggatgattcagcagtaaatgccattgatacgattgttaggaaatttgaagagaaaaacaatattgtgtatgttgaaaaattaaacgcagatagccgaaaaattatttcagaactaagttatttaaatgaaactcatttaaattaa

SEQ ID NO: 2080 - protein, 411 aa, Artificial Sequence
  Description of Artificial Sequence: synthetic amino acid sequence
VALLVTPLVKEHGVEYLFAATILMGLIQLLLGILKVGRLMKFIPRPVMIGFVNALGIMIFMSQIEHIFNISIATYIYVIITLLIVYVIPRFYKAIPAPLIAIIVLTALYMYTGSDVRTVGDLGNIKQTLPHFLIPNIPFNLETLQIIFPYSLSMAIVGLVESLLTAKIVDDATDTHSSKNKESRGQGIANIITGFFGGMGGCAMIGQSVINVKSGANSRLSTFTAGIVLMFMIIVLGGVVVQIPMPILAGIMVMVSIGTVDWNSFKYIKKAPKTDAFVMVLTVIIVLITHNLAIGVVVGVVFSAIFFATKISKVEVIYKELGKQHRFSFKGQIFFVSIDSMMEKIDFNIEDSVIVLNFDHAHLWDDSAVNAIDTIVRKFEEKNNIVYVEKLNADSRKIISELSYLNETHLN

SEQ ID NO: 2081 - DNA, 423 bp, Artificial Sequence
  Description of Artificial Sequence: synthetic nucleic acid sequence
gtgttttttatgtataattcaattttgcttgcagcagatggttcaaaaaatagtatacgtgcagcccaagagttactaaattttataggtgattatacaattgtcacaatacttacggttgtagatattgaagaatcaaaaacagatgttttacatgatcaccaaggaactaatctaactcaaaaaagggaaagtaaattacaatctattaaagatttatttacagaacacaatgtgaattacaaaattaaaattgttcacggtactccaacagataaagtggttgaagtttcaaatagtggtgaatatcaagctatcattttaggtacacgtggcttaaacagttttcaaaaaatggttcttggtagtgtaagtcataaagttgctaaacgttctcaaatacctgtaattattgttaaataa

SEQ ID NO: 2082 - protein, 140 aa, Artificial Sequence
  Description of Artificial Sequence: synthetic amino acid sequence
VFFMYNSILLAADGSKNSIRAAQELLNFIGDYTIVTILTVVDIEESKTDVLHDHQGTNLTQKRESKLQSIKDLFTEHNVNYKIKIVHGTPTDKVVEVSNSGEYQAIILGTRGLNSFQKMVLGSVSHKVAKRSQIPVIIVK

SEQ ID NO: 2083 - DNA, 1140 bp, Artificial Sequence
  Description of Artificial Sequence: synthetic nucleic acid sequence
atgaaaaaaatatggattttaactataggtatgtttgccttaggtatggatgcttatatagtagcaggattaataccttcaataagtaaaagttttaataaaagtagctctgctattgggcaaggagtaacagtttttacattgtttttctctatctctgcccccattttttcaacaatattagctaaatccccagttaaaaaaatactaataatagcattcagtatatttactttagccaatattataaccgcaatatctatgaactacatgctatatatcgtatcaagagcaatcgctggtttaggagctggcgtattctcaccaattgcaataagtgcaagcaatcatttagtctccgaaaagcataaaggaaaagcaatcgcttttacagtaggcggaatgagtgtaggaactgttataggagttcctctcggactagaaattgccaacatttctaattggcgatttgcaatgttggttattattgtcattagttttattgcattaataagcatatctatattgatgcctaaatttaaaatagaagctcctccaaatttaaaagatcgttttcaattatttttaaacaagcatgtactaagagttatttcggttacattatgcgctgccattgctagtttaggtttgtatacttatttagccgatattattaaaacaaatacagatacaaaaaatttaactcattaccttacagcgtggggaataggcggattaataggaagttttggtataggatttattatagatagatttaaaaatacaagatttgttatgctaattattttaattttactagcattaagttttggtttaattcctatttctattaacttgcctatattaggtttaattccctttattttatggggagctatgggatgggctacacaagctcctcaacaacatatattattgaaaaaacatcctgaatatggaggctctgctgtcgctttaaatagttctattaattatttaggcagtgctatgggatcagcaatcggaggaattattttatttaatgctaatagtacaaatgtactaatatatagtgctttaggaattactattattggtattttattacaattactaaatttatccctagaaaaaaattaa

SEQ ID NO: 2084 - protein, 379 aa, Artificial Sequence
  Description of Artificial Sequence: synthetic amino acid sequence
MKKIWILTIGMFALGMDAYIVAGLIPSISKSFNKSSSAIGQGVTVFTLFFSISAPIFSTILAKSPVKKILIIAFSIFTLANIITAISMNYMLYIVSRAIAGLGAGVFSPIAISASNHLVSEKHKGKAIAFTVGGMSVGTVIGVPLGLEIANISNWRFAMLVIIVISFIALISISILMPKFKIEAPPNLKDRFQLFLNKHVLRVISVTLCAAIASLGLYTYLADIIKTNTDTKNLTHYLTAWGIGGLIGSFGIGFIIDRFKNTRFVMLIILILLALSFGLIPISINLPILGLIPFILWGAMGWATQAPQQHILLKKHPEYGGSAVALNSSINYLGSAMGSAIGGIILFNANSTNVLIYSALGITIIGILLQLLNLSLEKN

SEQ ID NO: 2085 - DNA, 834 bp, Artificial Sequence
  Description of Artificial Sequence: synthetic nucleic acid sequence
atgggggattttatgaattttaattatatgaaggacttcattaaagttgtcgagtacaatagcttaaataaagcttctagagaattgaatataagtacaccagccttaagtaaaagaattagaagtattgaagattattttgattgtcagttattttatagaacttctaagggtatttttttaactcaaaaaggaaatgctgtttatcattcgtttttaaaaataaacgagcaatttgaagaattaaaaagtaaaataagtgagtctaaagataaaagaattaaattaggagtcatacctagcttttctttatataagctacatgaaaagaattatattaatgaaagtgtcgttttagttattgaaaatagtacttcaattttacttgaggaaatttataaagataatatagatgttgttattggtgatattacacatttaaaaaataactcgctctatacacaagaaatttacactgaggactttattgtggcttatggtgatgaaaataagtttaaaaacactaaccaagtaagtataaaatctttaaaaaatgagaatatttatatacaaacaccgccatgtgatacatatgatcttcttaaaaattattccttgaaagataagttacatattgattatgttgattattatgaaactatattagctaatgtcaaagcaaataaaggtattactttgactcctcaatctttgactacaagacttgaaagtatgaacttatatcaaaaaaaattacaaagttataaaagagttgtaggcgtagtatcacgtgataaagataagatgaataaaattattgatataattcagtaa

SEQ ID NO: 2086 - protein, 277 aa, Artificial Sequence
  Description of Artificial Sequence: synthetic amino acid sequence
MGDFMNFNYMKDFIKVVEYNSLNKASRELNISTPALSKRIRSIEDYFDCQLFYRTSKGIFLTQKGNAVYHSFLKINEQFEELKSKISESKDKRIKLGVIPSFSLYKLHEKNYINESVVLVIENSTSILLEEIYKDNIDVVIGDITHLKNNSLYTQEIYTEDFIVAYGDENKFKNTNQVSIKSLKNENIYIQTPPCDTYDLLKNYSLKDKLHIDYVDYYETILANVKANKGITLTPQSLTTRLESMNLYQKKLQSYKRVVGVVSRDKDKMNKIIDIIQ

SEQ ID NO: 2087 - DNA, 591 bp, Artificial Sequence
  Description of Artificial Sequence: synthetic nucleic acid sequence
gtgggtgaattcaaattccctagtggatcgataaaagtaacacgtaaaggtattgaaaaagatcaggaagagtatttaagacagtttgaaaaagaaaatgataaaagtatagaatttgatgctgatgagatgagcgctaaaatcggagaattatttggagtagaatataaagatggtttgcctattgataattctggtggtggtggtgctccacctaaatcagaaagttataacccctcagtttttaacgctcatctattttctatagtggctagtgaagattctttaaaagaagagtataaatttttcggtttcaaagagaccattatctctttatatactgcctatttatctaattataaaaaagataagtgggttactaaaggtggtgctccttatcatgtttcaaatagagaagagagcttagagaagaaagcatttgatattataactgggtattatttagaagctatgaatactcgtaaagaatggaactttaatactataaaatcttatcaaaagttaataagagttgtgttggtttcttatcaagttatagaacgagaacttatggaggaaaatgaagaataa

SEQ ID NO: 2088 - protein, 196 aa, Artificial Sequence
  Description of Artificial Sequence: synthetic amino acid sequence
VGEFKFPSGSIKVTRKGIEKDQEEYLRQFEKENDKSIEFDADEMSAKIGELFGVEYKDGLPIDNSGGGGAPPKSESYNPSVFNAHLFSIVASEDSLKEEYKFFGFKETIISLYTAYLSNYKKDKWVTKGGAPYHVSNREESLEKKAFDIITGYYLEAMNTRKEWNFNTIKSYQKLIRVVLVSYQVIERELMEENEE

SEQ ID NO: 2089 - DNA, 399 bp, Artificial Sequence
  Description of Artificial Sequence: synthetic nucleic acid sequence
atgcaaatgttacttaaagataaagttgacagtgaaggtaaatctattatctatgaaggacaaagaggatctgggggaggagaattagatactcatgatcccatgtatttttcgaatttaattactagtaaaatatttttaattaatcaagtagaaaaacataataagttttttatagctgaaaagctttttgaaggttatgaaagtaaatgtatggaaaaatatggaacaaattatcacggagcaataatagagacaagagatgaaaataggatattagccgatgaaacaatacgtaaattttactttttaacgaaagacatggaaaaagagaatgaatatttaagcttagatgatttaaataaatttagacttttaatatttgcatttactcattga

SEQ ID NO: 2090 - protein, 132 aa, Artificial Sequence
  Description of Artificial Sequence: synthetic amino acid sequence
MQMLLKDKVDSEGKSIIYEGQRGSGGGELDTHDPMYFSNLITSKIFLINQVEKHNKFFIAEKLFEGYESKCMEKYGTNYHGAIIETRDENRILADETIRKFYFLTKDMEKENEYLSLDDLNKFRLLIFAFTH

SEQ ID NO: 2091 - DNA, 468 bp, Artificial Sequence
  Description of Artificial Sequence: synthetic nucleic acid sequence
atgcaattagatgtttttcctgaattaaacgtagatcaactatctcaaaaagtgagaaaaatacttaatgcagaaccagataaatatattaaaaatagcttgcgaggattaatagaagagcggtatttattgtttattctcgaacaatctggtattaatgatgaaatgactgcacatcatttatcaaatcaacagtttcaaacttttattaatcttctaaagacttttacctttacagtagatggcacacttccattagacaaagcttttgtgacaggcggcggtatttctttaaaagaaatagaaccaaaaactatgatgtctaaattagtgccaggattatttttatgtggcgaagtcctagatattcatggatacactggaggttataatataacaagcgcattagttacgggtcatgttgctggaatgtttgctggtgaatttaaaatagatcaaaacaaataa

SEQ ID NO: 2092 - protein, 155 aa, Artificial Sequence
  Description of Artificial Sequence: synthetic amino acid sequence
MQLDVFPELNVDQLSQKVRKILNAEPDKYIKNSLRGLIEERYLLFILEQSGINDEMTAHHLSNQQFQTFINLLKTFTFTVDGTLPLDKAFVTGGGISLKEIEPKTMMSKLVPGLFLCGEVLDIHGYTGGYNITSALVTGHVAGMFAGEFKIDQNK

SEQ ID NO: 2093 - DNA, 381 bp, Artificial Sequence
  Description of Artificial Sequence: synthetic nucleic acid sequence
atgataaatgcaaatttaagtgctagtactagagtgaaacaaaatgctcgtacattgataaatgaaattgttagtaacgctttaagtcaacttaataaagtaaccacaaataaagaagttgatgaaatagttaacgaaacgattgaaaaacttaagtcaatacaaataagagaagataaaatattgagtagtcaacgttcatcaacatctatgacggaaaaatctaatcaatgttatagttccgagaataatacaattaaatctctaccagaggcaggaaatgctgataaatcactaccattagcaggagttactttaatatctggtttagcaatcatgtcctcacgtaaaaagaaaaaagataaaaaagtaaatgactaa

SEQ ID NO: 2094 - protein, 126 aa, Artificial Sequence
  Description of Artificial Sequence: synthetic amino acid sequence
MINANLSASTRVKQNARTLINEIVSNALSQLNKVTTNKEVDEIVNETIEKLKSIQIREDKILSSQRSSTSMTEKSNQCYSSENNTIKSLPEAGNADKSLPLAGVTLISGLAIMSSRKKKKDKKVND

SEQ ID NO: 2095 - DNA, 497 bp, Artificial Sequence
  Description of Artificial Sequence: synthetic nucleic acid sequence
atggatatttttctttttttgatttttctgctctttataaacaaactgactactggagatgattcaatgaagacctataagccgtaccgacatcaattaaggcgttcgctatttgcctcaacgattttcccagtatttatggtgatgattattggtttaataagcttttatgctatttatatatgggtcgaacattgcaccattcatcagcatacctatcaaactcaaaccgaattacaacgtatcgacaaacattttcatacgtttgttacgcagcaacaaaaacaatggcgtcatgttgatttatcacatccaactgatatcacaaagatgaaacgccaactattaaaacaagtccatcaacaacctgcgatattgtattacgatttaaaaggttcttcacaatctttcacaaacaattatgaacaattagacacaacaaagatgtatttaatatcaaaatatcgaattgattttaaagacgatacttatatcct

SEQ ID NO: 2096 - protein, 166 aa, Artificial Sequence
  Description of Artificial Sequence: synthetic amino acid sequence
MDIFLFLIFLLFINKLTTGDDSMKTYKPYRHQLRRSLFASTIFPVFMVMIIGLISFYAIYIWVEHCTIHQHTYQTQTELQRIDKHFHTFVTQQQKQWRHVDLSHPTDITKMKRQLLKQVHQQPAILYYDLKGSSQSFTNNYEQLDTTKMYLISKYRIDFKDDTYIL

SEQ ID NO: 2097 - DNA, 2055 bp, Artificial Sequence
  Description of Artificial Sequence: synthetic nucleic acid sequence
gtgatttctttgacaaataataatagaataaaaagatttagcattagaaaatacgcagtgggagtagtatcaattattacaggtgtaacaattttcatcggagggcaacaagctcaagcagctgaaacttcagtgcaacatgcggatgcacacccagaagactcgcaaacaacacaacaattaaaaaatgataaggtagaagaaacgttaaaagcttcaaaacaaggtactgcttatagtcaacaagtacaaacaattaatcaatctaaaacaaatcaaaacaaccaacattctgtagctgaaagtgaacaactgaaaagtgatgagacagctaatcagccaaaaaaagaagaaggtagttcagtaaaacaagacgtccaaccatctaaaaatgtaaatcaacaagacgcagctactcaatcaaatgagagaaaaaatattgacataaaaggtgaaggtcaaacttcaaagacaagcaatcaacatattcagagttctaacagtcataatcaatcaacagaaacaaaagacagcgactcagaagaaatcgatcaaccattagtgaaattacaaaagccgtctaatgattctacatatcaaacacaatcaaaagctaaacaagatagttctaaacagctccctcaagaaaaaacaacaaaacgtcaaatccaaacaactgaaaatgaacagacaactaaagttgattctaaaaaagctaatgacactcaaaatgttgaacaacatactcaagagcctaaaaatgatacatcaacatcacaaaaaaatcatcatcaagtagctacaaaagaacaatctaatagaagtacaacaagggagacgcaaaagcaatcagcaaatgctaatcaaaatcatcagtctacacatcaagcacagttcaaaaaccaatatccagtagtatttgtccatggtttcctaggctttgcaggtgataatcaatttagtttagctccaaaatattggggtggtacaaaatacaatattgacagaaatttaactaatgagggatacaatgtacatgaggcaaatattggtgcttttagtagtaactatgatcgcgcagtagaattgtattactatgtcaaaggaggacgtgttgattacggtgcagcgcatgcagctaaatatggtcatcatcgctatggtcgaacatacaagggcatcatgcgtgattgggaacctggcaaaaaaattcattttataggtcacagtatgggtggtcaaaccattcgtcaaatggaagaattcttaagaaatggtaaccaagaagaaatagaatatcaacgtcaacatgggggtactatatccgatttatttacaggtggtaaagataatatggttgcttcaattactacacttggcacaccacataatggtacacctgctgcagataaaattggcacacgtaaacttgtaaaagaaacgattaatcgtattggtagattaagtggtggtaaagatgtagatatagatttaggtttttctcaatggggattaaaacaacaaccaaatgaaagctacattgattacgcggaacgtgtatccaaaagtaagatttggaatactgaagatcaagctgttaatgatctgacaacgcaaggtgctgaaaaaattaatcaacaaacaagtctaaatcctaatattgtctacactacttatacagggtcagcgactcacacaggacctcttggtaatgaattacctaattctagtgaaattcttttgttgaacttaaccagccgtattattggtaaagatgcaaacaaagaaattagaccgaatgatggtgtagttccagttatatcatcacaacatccttctaatcaagcctttaaaaaagttgatgatcatacaccagctactgataaaggtgtttggcaagtgagacccgttcaacatgattgggaccatttagatttagtaggtatggatgcatttgatttaacacatacaggtagagaattaggtcaattctatctaggtattatggataatatcatgagaatcgaagaagcagacggtattacaaataaataa

SEQ ID NO: 2098 - protein, 684 aa, Artificial Sequence
  Description of Artificial Sequence: synthetic amino acid sequence
VISLTNNNRIKRFSIRKYAVGVVSIITGVTIFIGGQQAQAAETSVQHADAHPEDSQTTQQLKNDKVEETLKASKQGTAYSQQVQTINQSKTNQNNQHSVAESEQLKSDETANQPKKEEGSSVKQDVQPSKNVNQQDAATQSNERKNIDIKGEGQTSKTSNQHIQSSNSHNQSTETKDSDSEEIDQPLVKLQKPSNDSTYQTQSKAKQDSSKQLPQEKTTKRQIQTTENEQTTKVDSKKANDTQNVEQHTQEPKNDTSTSQKNHHQVATKEQSNRSTTRETQKQSANANQNHQSTHQAQFKNQYPVVFVHGFLGFAGDNQFSLAPKYWGGTKYNIDRNLTNEGYNVHEANIGAFSSNYDRAVELYYYVKGGRVDYGAAHAAKYGHHRYGRTYKGIMRDWEPGKKIHFIGHSMGGQTIRQMEEFLRNGNQEEIEYQRQHGGTISDLFTGGKDNMVASITTLGTPHNGTPAADKIGTRKLVKETINRIGRLSGGKDVDIDLGFSQWGLKQQPNESYIDYAERVSKSKIWNTEDQAVNDLTTQGAEKINQQTSLNPNIVYTTYTGSATHTGPLGNELPNSSEILLLNLTSRIIGKDANKEIRPNDGVVPVISSQHPSNQAFKKVDDHTPATDKGVWQVRPVQHDWDHLDLVGMDAFDLTHTGRELGQFYLGIMDNIMRIEEADGITNK

SEQ ID NO: 2099 - DNA, 948 bp, Artificial Sequence
  Description of Artificial Sequence: synthetic nucleic acid sequence
atgacggtgaccgttagatttcaatctttatcgcaacctcttacattagtttcaaatgtgaaagagattcctaaagatgcaacgattatatggtatgattttgaaaatgccactgatgaagaaaatgagtatttaaaaaatcattttgatttcaattacttagaaatagatgatgctatcaatggtgacccacgagttaaatatatagaatatgacgcgtatcaatatatgatatttcatagtattattaatgatgattactcaccaatctcactaagtgtatttttagaaggtaatgttttagtgacataccatcacaaacattttccatcattaaagcgtgtggctcaatacaatgcagaaaatcatgatagtgaattagattgtgcagacatcgtcattcatattctggattgtatggtggataaatattttaactttgtttatggtattgaagataaagtgtataattttgaagctaagcatgtcgatgaccgctatagtaagagcgttatggaaaatgtctttcaattacgttcggatttaattaaaatcaaacgcgtattatttccgatgcaagaagttgtagatacaatgaaacaagaaggaaatataattaaagatgccaaacatagaatgtatattcaacatattgatgatcatcttattaaacaaagaagtgttattcggacttctcaagaaatgacgaatgagattcgtgaaaattatgaatcattcacctcatttaggatgaatagtataatgcagatacttacgcttgtatctgttatattctcaccactcacttttattgctggtgtatatggaatgaactttgaatttatgcctgagttgaaatggcattatgcttatttcgtgtgcttaactttaatgctaattataacaataatattaatcatattctttaaaaagaaaaaatggttttaa

SEQ ID NO: 2100 - protein, 315 aa, Artificial Sequence
  Description of Artificial Sequence: synthetic amino acid sequence
MTVTVRFQSLSQPLTLVSNVKEIPKDATIIWYDFENATDEENEYLKNHFDFNYLEIDDAINGDPRVKYIEYDAYQYMIFHSIINDDYSPISLSVFLEGNVLVTYHHKHFPSLKRVAQYNAENHDSELDCADIVIHILDCMVDKYFNFVYGIEDKVYNFEAKHVDDRYSKSVMENVFQLRSDLIKIKRVLFPMQEVVDTMKQEGNIIKDAKHRMYIQHIDDHLIKQRSVIRTSQEMTNEIRENYESFTSFRMNSIMQILTLVSVIFSPLTFIAGVYGMNFEFMPELKWHYAYFVCLTLMLIITIILIIFFKKKKWF

SEQ ID NO: 2101 - DNA, 558 bp, Artificial Sequence
  Description of Artificial Sequence: synthetic nucleic acid sequence
atgtcacaaaaagatgcgctggtttcagattttgataaagtgagatttgttcatcattccatccccagtattgatgttagtcaagtcgatatgacaagtcatactacgaaattcgatttggcatatccaatctatataaatgcaatgactggtggaagtgattggacaaaacaaattaatgaaaaattagcaattgttgctagagaaactggaattgcaatggcggtgggatcaacacatgcagctttgcgcaatcctaatatgattgaaacatttagcattgtgcgtaaaacaaatcccaaaggaacaattttcagcaatgtgggtgccgatgtaccagtggataaagctctacaagcggttgaattattagatgctcaagcgctacaaattcatgtgaactcacctcaagaattagtcatgcctgaagggaaccgtgaatttgcttcatggatgtcaaatattgaatctattgttaaacgcgttgatgttccagttattattaaagaagttggtttcggaatgagtaaagaaacattacaagcgttatatgattaa

SEQ ID NO: 2102 - protein, 185 aa, Artificial Sequence
  Description of Artificial Sequence: synthetic amino acid sequence
MSQKDALVSDFDKVRFVHHSIPSIDVSQVDMTSHTTKFDLAYPIYINAMTGGSDWTKQINEKLAIVARETGIAMAVGSTHAALRNPNMIETFSIVRKTNPKGTIFSNVGADVPVDKALQAVELLDAQALQIHVNSPQELVMPEGNREFASWMSNIESIVKRVDVPVIIKEVGFGMSKETLQALYD

SEQ ID NO: 2103 - DNA, 1476 bp, Artificial Sequence; identical to SEQ ID NO: 405
  Description of Artificial Sequence: synthetic nucleic acid sequence

SEQ ID NO: 2104 - protein, 491 aa, Artificial Sequence; identical to SEQ ID NO: 406
  Description of Artificial Sequence: synthetic amino acid sequence

SEQ ID NO: 2105 - DNA, 1131 bp, Artificial Sequence
  Description of Artificial Sequence: synthetic nucleic acid sequence
atggttggtaatgtaggattattaattggtaatgataagttagatattacaggtattctgacaacactcgactgcaccgatgatgttgttaaccaagcaattgaacttaataccaataccatcattgctcatcatccacttattttcaaaggagtaaaacgtatcgttgaagatggatatggtagtataattcgtaaacttatccaaaataatatcaatcttatagcattacacactaatcttgatgtaaatcctaaaggtgtcaatcgaatgttagcggatcaaataggtttagagaacatatcaatgattaatacaaatagctcatattattacaaagttcaaacttttatacctaaaaattatattgaagatttcaaagacagtttaaacgaacttggattagctaaagaaggtaattacgaatattgtttctttgaaagtgaaggtaaagggcaatttaaaccagtaggtgatgcaagtccttatatagggaagttagatagtatcgaatatgttgatgaaataaaacttgagtttatgataaaagacaatgaattagaaataactaaacgtgctattttagataatcacccatacgaaacaccagtttttgattttattaaaatgaacaaagaaagtgagtatggattagggattattggacaattaaaccaaactatgactttagatgaattttctgaatatgccaaaaaacagctcaatataccgagcgtacgatatacaggtcaacatgatagtccaattaagaaagtagctatcataggtggttcaggtataggatttgagtataaagctagccaacttggagcagatgtttttgttactggtgatattaaacaccatgatgctttagatgctaaaatccaaaatgtaaatttattagacatcaatcattatagtgagtatgttatgaaagaaggattaaaagaattattagaaaaatggttatttaaatatgaaaatcaatttccaatatatgcttctgaaatcaacacaagtgttttattttcgatgtcttcttcaaaatgctctttcgcgggatattcatcatcccattggttgttgttgaattcttccataatctgtttagcctctttgactaattga

SEQ ID NO: 2106 - protein, 376 aa, Artificial Sequence
  Description of Artificial Sequence: synthetic amino acid sequence
MVGNVGLLIGNDKLDITGILTTLDCTDDVVNQAIELNTNTIIAHHPLIFKGVKRIVEDGYGSIIRKLIQNNINLIALHTNLDVNPKGVNRMLADQIGLENISMINTNSSYYYKVQTFIPKNYIEDFKDSLNELGLAKEGNYEYCFFESEGKGQFKPVGDASPYIGKLDSIEYVDEIKLEFMIKDNELEITKRAILDNHPYETPVFDFIKMNKESEYGLGIIGQLNQTMTLDEFSEYAKKQLNIPSVRYTGQHDSPIKKVAIIGGSGIGFEYKASQLGADVFVTGDIKHHDALDAKIQNVNLLDINHYSEYVMKEGLKELLEKWLFKYENQFPIYASEINTSVLFSMSSSKCSFAGYSSSHWLLLNSSIICLASLTN

SEQ ID NO: 2107 - DNA, 408 bp, Artificial Sequence
  Description of Artificial Sequence: synthetic nucleic acid sequence
atgaaattatctatttttcatgatggtcaattttttgtaggtgtcgttgaataccaagaaggcttcattcataaatatctaaaagttacatttggcaatgaacctagcgatgaaacagtgttacgattcataacttttaaacttattcctttattaaatcaaacacacggtaagaagaaacctattcaaaagcataaaaagattaatccaaaacgtttacaacgtaaaatcgctaaagaacaaaaagagaccaatttaactacatttgctcaacaagcgattaaagaagaacaagagttgaataagctaaagagtaaaaaacttcagcgattagaaaaagaacgacacagacaatacaaaagaatgttaaaaagaaaaaaagcacatgaaaagcacaaaggtcactaa

SEQ ID NO: 2108 - protein, 135 aa, Artificial Sequence
  Description of Artificial Sequence: synthetic amino acid sequence
MKLSIFHDGQFFVGVVEYQEGFIHKYLKVTFGNEPSDETVLRFITFKLIPLLNQTHGKKKPIQKHKKINPKRLQRKIAKEQKETNLTTFAQQAIKEEQELNKLKSKKLQRLEKERHRQYKRMLKRKKAHEKHKGH

SEQ ID NO: 2109 - DNA, 519 bp, Artificial Sequence; identical to SEQ ID NO: 1791
  Description of Artificial Sequence: synthetic nucleic acid sequence

SEQ ID NO: 2110 - protein, 172 aa, Artificial Sequence; identical to SEQ ID NO: 1792
  Description of Artificial Sequence: synthetic amino acid sequence

SEQ ID NO: 2111 - DNA, 345 bp, Artificial Sequence
  Description of Artificial Sequence: synthetic nucleic acid sequence
atggagatgatagaagaacgtaatttatcagggcttattcaaacactaactttcaatcatcccatcattcaaattcttaaagagaacacattaaatcaacttaaaatactctctcattatttaccagagcgacaccctgcaatggtggcaattcaatcttggtcacaatggtttactgatcatgggattactgaaatccaccttgatgtaactgcacaagcgcctagatcttattacaaaggtatttttataaaatgtcatcttaaaaatactgctcatagcgttttgacaggtggatattatcacggttcactagaaggttttggtttaggattaacactttaa

SEQ ID NO: 2112 - protein, 114 aa, Artificial Sequence
  Description of Artificial Sequence: synthetic amino acid sequence
MEMIEERNLSGLIQTLTFNHPIIQILKENTLNQLKILSHYLPERHPAMVAIQSWSQWFTDHGITEIHLDVTAQAPRSYYKGIFIKCHLKNTAHSVLTGGYYHGSLEGFGLGLTL

SEQ ID NO: 2113 - DNA, 334 bp, Artificial Sequence
  Description of Artificial Sequence: synthetic nucleic acid sequence
atgttacgagttgcattagcaaagggtcgtttattaaagagttttatcgaatatttacaacaagttaatcagatagatattgcaactgtacttttaaatagacagcgacagttattgcttacagtcgacaacattgaaatgattttagttaaaggaagcgatgtgcctacttatgtagaacaaggtattgctgatgtaggaatagtgggaagtgatattctgaatggtcaaaaatataatattaataaattactcgatttgccatttggtaaatgtcattttgcgttggcggcaaagccagaaacatctcgctataaaaaagtagcaagtattg

SEQ ID NO: 2114 - protein, 112 aa, Artificial Sequence
  Description of Artificial Sequence: synthetic amino acid sequence
  MOD_RES (112): variable amino acid
MLRVALAKGRLLKSFIEYLQQVNQIDIATVLLNRQRQLLLTVDNIEMILVKGSDVPTYVEQGIADVGIVGSDILNGQKYNINKLLDLPFGKCHFALAAKPETSRYKKVASIX

SEQ ID NO: 2115 - DNA, 630 bp, Artificial Sequence
  Description of Artificial Sequence: synthetic nucleic acid sequence
atgcctttttctaaacctataattgcgcttggtgaagtaataccattttcttctgtaattagacctatagctttttcaacatatggtactaatgtttcatcaacagaatttgtaataataactttatcagataaatctttaccttctaaatcactagcactatctgcgacaattgcatggcctacaacagatcctctaccaacaccttggcctttagcaatctcatcacctactaagtggattttcatcatatttgtagttcctttttctccagtaggtacaccagcagtaataataattaaatctccgtttgaaactctaccagtttctactgctgttgctacagcattatttagtaaagcatcagttgttttacgtccttctttaacgaccggatttactccccatacaattgcacattgtctagcagttttttcgctaggtgttacagcaatgatatctgaatgtggacgatatttagaaatcgtacgtgctgttgaaccactttcagttgctgctacaatagcttttacatttaagtttaaggcagtatgtgcaacagaaacaccaattgcatttactaatgaagtttcaactaatttagtacgatcacttaataattttttatag

SEQ ID NO: 2116 - protein, 209 aa, Artificial Sequence
  Description of Artificial Sequence: synthetic amino acid sequence
MPFSKPIIALGEVIPFSSVIRPIAFSTYGTNVSSTEFVIITLSDKSLPSKSLALSATIAWPTTDPLPTPWPLAISSPTKWIFIIFVVPFSPVGTPAVIIIKSPFETLPVSTAVATALFSKASVVLRPSLTTGFTPHTIAHCLAVFSLGVTAMISECGRYLEIVRAVEPLSVAATIAFTFKFKAVCATETPIAFTNEVSTNLVRSLNNFL

SEQ ID NO: 2117 - DNA, 450 bp, Artificial Sequence
  Description of Artificial Sequence: synthetic nucleic acid sequence
atgaattttaataatttggatcaattatatagatctgtaattatggatcattacaaaaaccctagaaacaaaggtgtcttagacaatggctcaatgactgttgatatgaataaccctacatgtggtgatcgcatacgtttgacatttgatattgaagacggaatcattaatgatgctaagtttgaaggagaaggatgttcaatttcaatgtctagtgcatctatgatgactgaagcagttaaaggtcattcacttggtgaagcaatgcaaatgagccaagagtttactaaaatgatgctcggtgaagactacgagattacagaagaaatgggagatattgaggcgcttcaaggtgtctcacaattcccagctagaattaaatgtgcaacgcttgcatggaaagcattagaaaaagggacagtcgaaaaagaaggtaagtcagaaggtaca

SEQ ID NO: 2118 - protein, 150 aa, Artificial Sequence
  Description of Artificial Sequence: synthetic amino acid sequence
MNFNNLDQLYRSVIMDHYKNPRNKGVLDNGSMTVDMNNPTCGDRIRLTFDIEDGIINDAKFEGEGCSISMSSASMMTEAVKGHSLGEAMQMSQEFTKMMLGEDYEITEEMGDIEALQGVSQFPARIKCATLAWKALEKGTVEKEGKSEGT

SEQ ID NO: 2119 - DNA, 588 bp, Artificial Sequence
  Description of Artificial Sequence: synthetic nucleic acid sequence
atgcttgaactaattgatctacatcttctttcgtattataaacgtaaaaacttgcacgtgctgttgaagagacacctaaccatttcatcaaaggttgcgcacagtgatggcctgcacgaactgcaacaccttctaggtgtatctgtagcggatatattaactcaagatatggtgaagacaatggctgatgatccaattatttttgctatggctaatcctaatcctgaaatcaatcccaatgaagccaaacaggcaggtgcaaaggtcgtaggtacaggtcgatctgattttccaaaccaaattaataatgtattagcatttccaggtatttttagaggtgcattggatgttgaagccactcatattaacgaagatatgaaaaaggcagctgtagaagctatcgttcatttaatagacgaaaatgagttacatcctgattactgtataccaggaccatttgataaaagagtagctccatcagtagccaaaaatgtagctaaagctgctatggaatccggtgtagcaagaattaaaattgatacacaagaaatatttgataaaactatgaaacttactgacttaaaatag

SEQ ID NO: 2120 - protein, 195 aa, Artificial Sequence
  Description of Artificial Sequence: synthetic amino acid sequence
MLELIDLHLLSYYKRKNLHVLLKRHLTISSKVAHSDGLHELQHLLGVSVADILTQDMVKTMADDPIIFAMANPNPEINPNEAKQAGAKVVGTGRSDFPNQINNVLAFPGIFRGALDVEATHINEDMKKAAVEAIVHLIDENELHPDYCIPGPFDKRVAPSVAKNVAKAAMESGVARIKIDTQEIFDKTMKLTDLK

SEQ ID NO: 2121 - DNA, 924 bp, Artificial Sequence
  Description of Artificial Sequence: synthetic nucleic acid sequence
atgaacgctgctgttcgtgcagtgactcggacagcaatttacaataatattgaagtttatggtgtttatcaaggttaccaaggtttacttgatgatgatattcataagcttgaattgggttcagtaggggatacaattcaacgaggaggaactttcctcttttccgcaaggtgccctcagttcaaagaagaggatgtacgtaagaaagctattgagaatttacgtaagcgtggtatcgaaggtttagttgttattggaggagatggcagctatagaggggcacaacgaattagtgaggaatgtaaagaaattcaaacaattggtattcctggtacaattgataatgatattaatggtacagattttacaattggttttgatactgcattaaacactattattgaatcagtcgataagattagagatacggcatcaagtcacgcaagaacgtttattgttgaagttatggggcgtgattgtggagatttagctttatgggctggattatctgtaggtgctgaaacgattgttttaccagaagtcaatacagatattaaggatgtagctgaaaagattgaacagggtattaaaagagggaaaaaacattctatcgttatggttgcagaaggttgtatgagcggccaagaatgtgcagatgagttaacgaagtatattaacattgatacacgagtttcagtgttaggtcacattcaacgtggcggtagcccatctggtgctgatcgagtattagcttctcgacttggtggatatgctgttgaactattaaaacaaggcgagacagctaaaggtgttggcattaggaataatcaattaacctctacgccgtttgatgaaatttttgctgaaagtgatcgcaaatttaatagtcaaatgtatgaattagcaaaagaattatcaatttaa

SEQ ID NO: 2122 - protein, 307 aa, Artificial Sequence
  Description of Artificial Sequence: synthetic amino acid sequence
MNAAVRAVTRTAIYNNIEVYGVYQGYQGLLDDDIHKLELGSVGDTIQRGGTFLFSARCPQFKEEDVRKKAIENLRKRGIEGLVVIGGDGSYRGAQRISEECKEIQTIGIPGTIDNDINGTDFTIGFDTALNTIIESVDKIRDTASSHARTFIVEVMGRDCGDLALWAGLSVGAETIVLPEVNTDIKDVAEKIEQGIKRGKKHSIVMVAEGCMSGQECADELTKYINIDTRVSVLGHIQRGGSPSGADRVLASRLGGYAVELLKQGETAKGVGIRNNQLTSTPFDEIFAESDRKFNSQMYELAKELSI

SEQ ID NO: 2123 - DNA, 1758 bp, Artificial Sequence
  Description of Artificial Sequence: synthetic nucleic acid sequence
atgagaaagactaaaattgtatgtacaataggaccagcttcagaatcagaggaaatgctcgaaaaactaatgaatgcaggaatgaacgttgcgcgtttaaatttctcacatggtagtcatgaagaacataaagcaagaattgatacaattcgtaaagttgctaaacgtttaaataaaacaattggcttgttattggatactaaagggccagaaattcgtacgcacaatatgaaagatggacttattgttttagaaaaaggcaaagaagtcattgtcagtatgaatgaagttgaaggaacacctgaaaaattctctgtaacatatgaaaatctaatcaatgatgtcaatattggatcatatatactattagatgatggtttagttgaacttcaagtcaaagaaattaacaaagataaaggcgaagttaaatgtgatatcttaaatactggtgaattaaaaaataaaaaaggtgttaacttacctggtgttaaagttaatttacctggtatcactgataaagatgccgatgatatcagatttggtataaaggaaaatgtagactttatagctgcaagttttgtaagacgtccaagtgatgttttagatatccgtcaaattcttgaagaagaaaaagcagaaataacaattttccctaaaatcgaaaaccaagaaggtatcgataatattgaagaaattcttgaagtatctgatggattaatggtagcacgtggtgatatgggtgttgaaattccaccagaaagcgtaccaatggttcaaaaagatttaattagaaaatgtaataaattaggaaaacctgtaattactgcgactcaaatgcttgattctatgcaacgtaatccacgtgcgacacgtgcagaagcaagtgacgtagctaatgcaatatacgatggtactgacgctgtaatgttatcaggcgaaactgcagcaggtcaatatcctgaagaagctgttaaaactatgcgtaatattgcagtttctgctgaagcagcgcaagactataaaaaattattaagtgatcgtactaaattagttgaaacttcattagtaaatgcaattggtgtttctgttgcacatactgccttaaacttaaatgtaaaagctattgtagcagcaactgaaagtggttcaacagcacgtacgatttctaaatatcgtccacattcagatatcattgctgtaacacctagcgaaaaaactgctagacaatgtgcaattgtatggggagtaaatccggtcgttaaagaaggacgtaaaacaactgatgctttactaaataatgctgtagcaacagcagtagaaactggtagagtttcaaacggagatttaattattattactgctggtgtacctactggagaaaaaggaactacaaatatgatgaaaatccacttagtaggtgatgagattgctaaaggccaaggtgttggtagaggatctgttgtaggccatgcaattgtcgcagatagtgctagtgatttagaaggtaaagatttatctgataaagttattattacaaattctgttgatgaaacattagtaccatatgttgaaaaagctataggtctaattacagaagaaaatggtattacttcaccaagcgcaattataggtttagaaaaaggcatacctactgttgttggtgtagaacaagcaactaaagaaattaaaaatgatatgttagtgactttagatgcgtcacaaggtaaagtgtttgaaggttatgctaacgtcctttaa

SEQ ID NO: 2124 - protein, 585 aa, Artificial Sequence
  Description of Artificial Sequence: synthetic amino acid sequence
MRKTKIVCTIGPASESEEMLEKLMNAGMNVARLNFSHGSHEEHKARIDTIRKVAKRLNKTIGLLLDTKGPEIRTHNMKDGLIVLEKGKEVIVSMNEVEGTPEKFSVTYENLINDVNIGSYILLDDGLVELQVKEINKDKGEVKCDILNTGELKNKKGVNLPGVKVNLPGITDKDADDIRFGIKENVDFIAASFVRRPSDVLDIRQILEEEKAEITIFPKIENQEGIDNIEEILEVSDGLMVARGDMGVEIPPESVPMVQKDLIRKCNKLGKPVITATQMLDSMQRNPRATRAEASDVANAIYDGTDAVMLSGETAAGQYPEEAVKTMRNIAVSAEAAQDYKKLLSDRTKLVETSLVNAIGVSVAHTALNLNVKAIVAATESGSTARTISKYRPHSDIIAVTPSEKTARQCAIVWGVNPVVKEGRKTTDALLNNAVATAVETGRVSNGDLIIITAGVPTGEKGTTNMMKIHLVGDEIAKGQGVGRGSVVGHAIVADSASDLEGKDLSDKVIITNSVDETLVPYVEKAIGLITEENGITSPSAIIGLEKGIPTVVGVEQATKEIKNDMLVTLDASQGKVFEGYANVL

SEQ ID NO: 2125 - DNA, 603 bp, Artificial Sequence
  Description of Artificial Sequence: synthetic nucleic acid sequence
atgcttccaaagctgtttacgttggtaaagatttatataaaaggtaagtcataccttcctttcgtaaatcgatctgctgtagcaggtattttaacaactggtgtcatgcgcaccttattgtttttagctgtactaggtgttgttgtaactggcgttacgcttagttcagaaaatccaccagcatcagttttccaacatgcattaggtcctataggtaaaaatatttttggcgtagtaatatttgcagcagcaatgtcctcagtaattggttctgcatatacaagcgcaacatttttaaaaacactacacaaatcgttactcaataaaaataatcttatcgttattacatttattgtaatttcaacttttgttttcttatttattggtaaaccggtgagtttacttataatagctggtgcgattaatggttggattctaccaatcacattaggtgcaattctcattgcaagtaggaaaaaatctatcgttggtaattaccaacacccaacatggatgcttgtttttggtattatagccgtaattgtcacaataatgactggtatcttttcattacaagatttagcaagtctttggaaaggttaa

SEQ ID NO: 2126 - protein, 200 aa, Artificial Sequence
  Description of Artificial Sequence: synthetic amino acid sequence
MLPKLFTLVKIYIKGKSYLPFVNRSAVAGILTTGVMRTLLFLAVLGVVVTGVTLSSENPPASVFQHALGPIGKNIFGVVIFAAAMSSVIGSAYTSATFLKTLHKSLLNKNNLIVITFIVISTFVFLFIGKPVSLLIIAGAINGWILPITLGAILIASRKKSIVGNYQHPTWMLVFGIIAVIVTIMTGIFSLQDLASLWKG

SEQ ID NO: 2127 - DNA, 504 bp, Artificial Sequence; identical to SEQ ID NO: 807
  Description of Artificial Sequence: synthetic nucleic acid sequence

SEQ ID NO: 2128 - protein, 167 aa, Artificial Sequence; identical to SEQ ID NO: 808
  Description of Artificial Sequence: synthetic amino acid sequence

SEQ ID NO: 2129 - DNA, 495 bp, Artificial Sequence; identical to SEQ ID NO: 809
  Description of Artificial Sequence: synthetic nucleic acid sequence

SEQ ID NO: 2130 - protein, 164 aa, Artificial Sequence; identical to SEQ ID NO: 810
  Description of Artificial Sequence: synthetic amino acid sequence

SEQ ID NO: 2131 - DNA, 1113 bp, Artificial Sequence; identical to SEQ ID NO: 1115
  Description of Artificial Sequence: synthetic nucleic acid sequence

SEQ ID NO: 2132 - protein, 370 aa, Artificial Sequence; identical to SEQ ID NO: 1116
  Description of Artificial Sequence: synthetic amino acid sequence

SEQ ID NO: 2133 - DNA, 519 bp, Artificial Sequence
  Description of Artificial Sequence: synthetic nucleic acid sequence
gtgatccgttcgatacataaagatgcaactcataattgttcagcctatactgtcggaccagagatgaatattcaaaaggcaaacgacgatggcgaaccaagtggaacagctggcatcccaatgcttgaaatactgaaaaaacaagagatacacaatgtttgtgtcgtcgtgacacgctacttcggtggtatcaagttaggtgcaggcggtcttattagagcatatagcggcgccgtgcgtgatgtgatatatgatataggtagagtcgaactaagagaagctattccagtaaccgttacgttagattatgatcagacaggtaaatttgaatatgaacttgcctctactacattcttattaagagaacaattttataccgataaagtaagttatcaaattgacgtagtaaaaaatgaatatgatgcttttatagactttttaaatcgaattacttctggaaattatgatttgaaacaagaagaccttaaactattaccttttgatattgaaaccaattaa

SEQ ID NO: 2134 - protein, 172 aa, Artificial Sequence
  Description of Artificial Sequence: synthetic amino acid sequence
VIRSIHKDATHNCSAYTVGPEMNIQKANDDGEPSGTAGIPMLEILKKQEIHNVCVVVTRYFGGIKLGAGGLIRAYSGAVRDVIYDIGRVELREAIPVTVTLDYDQTGKFEYELASTTFLLREQFYTDKVSYQIDVVKNEYDAFIDFLNRITSGNYDLKQEDLKLLPFDIETN

SEQ ID NO: 2135 - DNA, 1077 bp, Artificial Sequence
  Description of Artificial Sequence: synthetic nucleic acid sequence
atggaaatgtttgaagctatcatatataacatatctgtcatggtggcaggtatatatttatttcataggttacaatattctgaaaataaaagaatgattttttctaaagaatatgtaacagtactaatgacattcgtttctttacttttagcggcataccctatcccatttcaaaacgaatacctcgtccatttaacatttgtacctcttttgtttttaggacgttataccaacatgatatatacactcacggctgcttttatcgtatctttagtcgatgtatttatctttggaaactcaattatttatggtattacattaatcgttattgcaggtattgtcagtgcagtgggaccattcttaaagcaaaacgatatcatttctttacttattttaaatttgattagcattatcattttgttatttttagcattattaagccctatttatgaactcgtagagattttagtgcttatccctatttcatttattattacaattgcttcagcaataacattcgttgatatatggcactttttctctttagtcaatcgttatgaaaatgaagataaatacgattatcttacaggtctaggtaatgtgaaagaatttgatagacacttaaatgaggtctcaagtaaagctgaagaaaagaaacaaagtttagccttacttctcattgatattgatggctttaaagatgtaaacgatcattattcacaccaatcaggagatgctgttctcaaacaaatgtctcaactattaaaaaactatgtcccaaaccagttcaaaatatttagaaacggtggcgaagaattttctgttgtaataagagattacacactagatcaaagcgtgaaattagcagaaaatattcgaagtggtgttgaaaaatcttctttccacctaccaaacaaagaagtaatcaagctatcagtttcaattggtgtaggatacttaactcaagaagatcgtaaatctcaacgtaaagtatttaaagatgctgatgacatggtacatgtggctaaaagtgaaggaagaaataaagtcatgtttaatcctattgtcaaattataa

SEQ ID NO: 2136 - protein, 358 aa, Artificial Sequence
  Description of Artificial Sequence: synthetic amino acid sequence
MEMFEAIIYNISVMVAGIYLFHRLQYSENKRMIFSKEYVTVLMTFVSLLLAAYPIPFQNEYLVHLTFVPLLFLGRYTNMIYTLTAAFIVSLVDVFIFGNSIIYGITLIVIAGIVSAVGPFLKQNDIISLLILNLISIIILLFLALLSPIYELVEILVLIPISFIITIASAITFVDIWHFFSLVNRYENEDKYDYLTGLGNVKEFDRHLNEVSSKAEEKKQSLALLLIDIDGFKDVNDHYSHQSGDAVLKQMSQLLKNYVPNQFKIFRNGGEEFSVVIRDYTLDQSVKLAENIRSGVEKSSFHLPNKEVIKLSVSIGVGYLTQEDRKSQRKVFKDADDMVHVAKSEGRNKVMFNPIVKL

SEQ ID NO: 2137 - DNA, 390 bp, Artificial Sequence
  Description of Artificial Sequence: synthetic nucleic acid sequence
atgaatcgtattgcccatagttatggtttacatgatacatacagttttgtgacatcaactgcaattattttctcattaaatgatcgtactagtacgaggttgattcgtattcgcgaacgtacaaccgatcttgagaaaattgctttaaccaatagcctatctcgtaaaatttcgagtaagcaacttacaattgacgaagcaaaaagtgagttactgcaacttaaacgtgcgtctcttcagtattctttcttaacaaatctcattgctgcctttgtagcttgtggttttttcttattcatgtttggtggcgtagcttccgacgcttggattgcatgcctagcgggtggcatagcttttttaacgtttagtttcgtgcacttttctatctaa

SEQ ID NO: 2138 - protein, 129 aa, Artificial Sequence
  Description of Artificial Sequence: synthetic amino acid sequence
MNRIAHSYGLHDTYSFVTSTAIIFSLNDRTSTRLIRIRERTTDLEKIALTNSLSRKISSKQLTIDEAKSELLQLKRASLQYSFLTNLIAAFVACGFFLFMFGGVASDAWIACLAGGIAFLTFSFVHFSI

SEQ ID NO: 2139 - DNA, 321 bp, Artificial Sequence; identical to SEQ ID NO: 793
  Description of Artificial Sequence: synthetic nucleic acid sequence

SEQ ID NO: 2140 - protein, 106 aa, Artificial Sequence; identical to SEQ ID NO: 794
  Description of Artificial Sequence: synthetic amino acid sequence

SEQ ID NO: 2141 - DNA, 432 bp, Artificial Sequence
  Description of Artificial Sequence: synthetic nucleic acid sequence
atgagaattgcacctaatgtgattggtagaatccaaccattaatcgcaccagctattataagtaaactcaccggtttaccaataaataagaaaacaaaagttgaaattacaataaatgtaataacgataagattatttttattgagtaacgatttgtgtagtgtttttaaaaatgttgcgcttgtatatgcagaaccaattactgaggacattgctgctgcaaatattactacgccaaaaatatttttacctataggacctaatgcatgttggaaaactgatgctggtggattttctgaactaagcgtaacgccagttacaacaacacctagtacagctaaaaacaataaggtgcgcatgacaccagttgttaaaatacctgctacagcagatcgatttacgaaaggaaggtatgacttaccttttatataa

SEQ ID NO: 2142 - protein, 143 aa, Artificial Sequence
  Description of Artificial Sequence: synthetic amino acid sequence
MRIAPNVIGRIQPLIAPAIISKLTGLPINKKTKVEITINVITIRLFLLSNDLCSVFKNVALVYAEPITEDIAAANITTPKIFLPIGPNACWKTDAGGFSELSVTPVTTTPSTAKNNKVRMTPVVKIPATADRFTKGRYDLPFI

SEQ ID NO: 2143 - DNA, 471 bp, Artificial Sequence; identical to SEQ ID NO: 287
  Description of Artificial Sequence: synthetic nucleic acid sequence

SEQ ID NO: 2144 - protein, 156 aa, Artificial Sequence; identical to SEQ ID NO: 288
  Description of Artificial Sequence: synthetic amino acid sequence

SEQ ID NO: 2145 - DNA, 384 bp, Artificial Sequence
  Description of Artificial Sequence: synthetic nucleic acid sequence
gtgcaaaaagctgaagctatcgtacttccaggtgttggacattttcaggatgcgatgcattctatagaagaaaaaagcattaaagatatgcttaaaaatatacatgataaaccgataattggaatatgtttaggtatgcaattactttttcaacatagcgcagaaggtgacgttagtggattggaacttgtcccgggaaatatagtgccaatccaatcatctcatcctattcctcatttgggttggaatgaattaaagagtacacatcccttactgcaaagtgatgtgtattttgttcattcatatcaagcagaaatgtcagaatatgtagtagcttatgctgactatggtacaaagattccgggagtcattcaataccgatga

SEQ ID NO: 2146 - protein, 127 aa, Artificial Sequence
  Description of Artificial Sequence: synthetic amino acid sequence
VQKAEAIVLPGVGHFQDAMHSIEEKSIKDMLKNIHDKPIIGICLGMQLLFQHSAEGDVSGLELVPGNIVPIQSSHPIPHLGWNELKSTHPLLQSDVYFVHSYQAEMSEYVVAYADYGTKIPGVIQYR

SEQ ID NO: 2147 - DNA, 549 bp, Artificial Sequence
  Description of Artificial Sequence: synthetic nucleic acid sequence
gtgattcaaggaccttataaggctgctaaaagaaatattgcaaattatgaattaaatcaacaggttgatgtacgtctaggcgatggtctaagcgttataaacacagaagaccaaattgataatataactgtttgtggtatgggagggccattaattgcaaaaatattaaacgatggaaaagataaattagttaaccatccaagactcatactacaaagcaacatacaaactcaagcattaagacaaactcttaataaactttcatatgaaatcgttgatgaaagaatcattgaggaaaagggtcacatatatgaaatcgtggtagctgagtttaataataacttagttaaattaaatatattacaagaaaaattcggaccatttttacttagagaatgtaataacatttttcaaaaaaaatggcaaagagagttagaagcactgcgtgatataaaatcccaattgaattcaacatcacatcatgagagactaaaagaaatagaagatgaaattaacttaatacaagaggtgttaattaatgaaaattag

SEQ ID NO: 2148 - protein, 182 aa, Artificial Sequence
  Description of Artificial Sequence: synthetic amino acid sequence
VIQGPYKAAKRNIANYELNQQVDVRLGDGLSVINTEDQIDNITVCGMGGPLIAKILNDGKDKLVNHPRLILQSNIQTQALRQTLNKLSYEIVDERIIEEKGHIYEIVVAEFNNNLVKLNILQEKFGPFLLRECNNIFQKKWQRELEALRDIKSQLNSTSHHERLKEIEDEINLIQEVLINEN

SEQ ID NO: 2149 - DNA, 1083 bp, Artificial Sequence
  Description of Artificial Sequence: synthetic nucleic acid sequence
atggaagttttaaataatcacgttccatttcatcaagctgaatcatgggataatgtaggattattaattggtaatgataagttagatattacaggtattctgacaacactcgactgcaccgatgatgttgttaaccaagcaattgaacttaataccaataccatcattgctcatcatccacttattttcaaaggagtaaaacgtatcgttgaagatggatatggtagtataattcgtaaacttatccaaaataatatcaatcttatagcattacacactaatcttgatgtaaatcctaaaggtgtcaatcgaatgttagcggatcaaataggtttagagaacatatcaatgattaatacaaatagctcatattattacaaagttcaaacttttatacctaaaaattatattgaagatttcaaagacagtttaaacgaacttggattagctaaagaaggtaattacgaatattgtttctttgaaagtgaaggtaaagggcaatttaaaccagtaggtgatgcaagtccttatatagggaagttagatagtatcgaatatgttgatgaaataaaacttgagtttatgataaaagacaatgaattagaaataactaaacgtgctattttagataatcacccatacgaaacaccagtttttgattttattaaaatgaacaaagaaagtgagtatggattagggattattggacaattaaaccaaactatgactttagatgaattttctgaatatgccaaaaaacagctcaatataccgagcgtacgatatacaggtcaacatgatagtccaattaagaaagtagctatcataggtggttcaggtataggatttgagtataaagctagccaacttggagcagatgtttttgttactggtgatattaaacaccatgatgctttagatgctaaaatccaaaatgtaaatttattagacatcaatcattatagtgagtatgttatgaaagaaggattaaaagaattattagaaaaatggttatttaaatatgaaaatcaatttccaatatatgcttctgaaatcaacacagatccatttaaatataaataa

SEQ ID NO: 2150 - protein, 360 aa, Artificial Sequence
  Description of Artificial Sequence: synthetic amino acid sequence
MEVLNNHVPFHQAESWDNVGLLIGNDKLDITGILTTLDCTDDVVNQAIELNTNTIIAHHPLIFKGVKRIVEDGYGSIIRKLIQNNINLIALHTNLDVNPKGVNRMLADQIGLENISMINTNSSYYYKVQTFIPKNYIEDFKDSLNELGLAKEGNYEYCFFESEGKGQFKPVGDASPYIGKLDSIEYVDEIKLEFMIKDNELEITKRAILDNHPYETPVFDFIKMNKESEYGLGIIGQLNQTMTLDEFSEYAKKQLNIPSVRYTGQHDSPIKKVAIIGGSGIGFEYKASQLGADVFVTGDIKHHDALDAKIQNVNLLDINHYSEYVMKEGLKELLEKWLFKYENQFPIYASEINTDPFKYK

SEQ ID NO: 2151 - DNA, 333 bp, Artificial Sequence
  Description of Artificial Sequence: synthetic nucleic acid sequence
atgtcaaaacatccatttgaacactttaatttagatgagaatttaattgaagctgttaaaaatctcaattttgaaaaaccgactgaaatccaaaatagaatcataccgagaattcttaaaggaacaaatttaataggacaatctcaaactggaactggaaagtcacacgcttttcttttaatattgatggagatcgttctttttctgaagcagtacaattggacatacaagtacctggtgcttttcctaaatttggaactacagatggaacgattacgaaaaatgttgtcattgaaaaatgttattttggctgttcagatcatcctaaaatga

SEQ ID NO: 2152 - protein, 110 aa, Artificial Sequence
  Description of Artificial Sequence: synthetic amino acid sequence
MSKHPFEHFNLDENLIEAVKNLNFEKPTEIQNRIIPRILKGTNLIGQSQTGTGKSHAFLLILMEIVLFLKQYNWTYKYLVLFLNLELQMERLRKMLSLKNVILAVQIILK

SEQ ID NO: 2153 - DNA, 1014 bp, Artificial Sequence
  Description of Artificial Sequence: synthetic nucleic acid sequence
atggaacgattttgttgtgtaaatcaaattaactatattcaaatgaatccgttagaagccaaatttaaaacgagcgctctaagatcatggaaaactgatcaggcagatgctcataagcttgcttgtttaggaccgacgcttaaacaaacagacaacttacctatacatgagttaatattctttgaattaagagaacgcgtccgttttcatctagaaatcgagaatgaacaaaatcgacttaaatttcagatccttgaattactccatcaaacattccctggtttagaaagattatttagtagtcgatattcaatcattgcactcaacatcgcagaaatctttactcatccagacatggttcttgatatcgacaaggaggtactgattacacatatattcaattctacagataagggaatgtcaatggataaagctacaaaatatgcacttcaattaagggtgattgctcaagaaagctatcctaatgtcgatagacattcctttctagtcgaaaaattacgcttacttattcaacaattaaaacaatctattcatcatatcaaacaattagatgatgccatgattcaattagcacaacaactcgattattttgaaaatattcattcgatacctggtattggtaagctaagcacagctatgattattgggaagattggtgatattaagcgatttaaatcaaataaacaactcaatgcttttgttggcattgatatcaaacgatatcaatcaggtcatacacactgtagagataccatcaacaagcgtggtaataaaaaagcgagaaaacttttattttgggtgattatgaatataataagagggcagcatcattatgacaatcatgtcgtcgattattactacaaactaagaaagcagcctaatgagaaacctcataagactgccatcattgcttgtataaatcgattattaaaaacaattcattatcttgtaatgaattataaattgtacgattatcaaatgtcaccacattag

SEQ ID NO: 2154 - protein, 337 aa, Artificial Sequence
  Description of Artificial Sequence: synthetic amino acid sequence
MERFCCVNQINYIQMNPLEAKFKTSALRSWKTDQADAHKLACLGPTLKQTDNLPIHELIFFELRERVRFHLEIENEQNRLKFQILELLHQTFPGLERLFSSRYSIIALNIAEIFTHPDMVLDIDKEVLITHIFNSTDKGMSMDKATKYALQLRVIAQESYPNVDRHSFLVEKLRLLIQQLKQSIHHIKQLDDAMIQLAQQLDYFENIHSIPGIGKLSTAMIIGKIGDIKRFKSNKQLNAFVGIDIKRYQSGHTHCRDTINKRGNKKARKLLFWVIMNIIRGQHHYDNHVVDYYYKLRKQPNEKPHKTAIIACINRLLKTIHYLVMNYKLYDYQMSPH

SEQ ID NO: 2155 - DNA, 614 bp, Artificial Sequence
  Description of Artificial Sequence: synthetic nucleic acid sequence
atgggtccttctggatcaggtaaaacgactttactcaatgtgttaagttcaatagatactatttcagaaggaactgtggaagttgaaggcaaagaaattaataaactgagccacaaagaagtggcaaattttcgaaaacaacatctcggttttatttttcaagattatagcgttttacccacattaacagtaaaagaaaatattatgctaccactctcagtacaaaaattccataaatatgaaatggaacaaaattataaagaagtggctgaggcattaggtatttataacctgggaaataaatatccaagtgaaatttctggcggtcagcaacaacgtacggcggcagcccgggcattcgtccataaaccaacgattattttcgcagatgaacctactggcgcattagattctaaaagtgctcaagatttgttacaccgtctagaagatatgaataaacaatttaattcaaccattatgatggtgacacatgatccttcagccgctagttacgctgagagagtcattatgttgaaagacggtgatatacactcagaaatctaccagggtaacgattcaaaacaaacattttaccaagaaattatgaaacttcc

SEQ ID NO: 2156 - protein, 205 aa, Artificial Sequence
  Description of Artificial Sequence: synthetic amino acid sequence
MGPSGSGKTTLLNVLSSIDTISEGTVEVEGKEINKLSHKEVANFRKQHLGFIFQDYSVLPTLTVKENIMLPLSVQKFHKYEMEQNYKEVAEALGIYNLGNKYPSEISGGQQQRTAAARAFVHKPTIIFADEPTGALDSKSAQDLLHRLEDMNKQFNSTIMMVTHDPSAASYAERVIMLKDGDIHSEIYQGNDSKQTFYQEIMKLP

SEQ ID NO: 2157 - DNA, 303 bp, Artificial Sequence
  Description of Artificial Sequence: synthetic nucleic acid sequence
atggagaaaaggagtattaatatgaaaaaagtatttatgatcataagtatacttaccataactgttactttaagtgcatgtggaggttctggaaaacaaaaagagccatctaaggaaagtcaaaaatctgataaatatgattatgtttattatgaaatattaaatgatggagattctgaaacgccaaatgttgagattaaatataaagataaaaaaggtaaatcacatatagaaaaagctgatttagatcacgtgtatgaacatatactaggtgatggtaataaaaaaccatatatgatatga

SEQ ID NO: 2158 - protein, 100 aa, Artificial Sequence
  Description of Artificial Sequence: synthetic amino acid sequence
MEKRSINMKKVFMIISILTITVTLSACGGSGKQKEPSKESQKSDKYDYVYYEILNDGDSETPNVEIKYKDKKGKSHIEKADLDHVYEHILGDGNKKPYMI

SEQ ID NO: 2159 - DNA, 1065 bp, Artificial Sequence
  Description of Artificial Sequence: synthetic nucleic acid sequence
atggatatgctttcggcctactcggcagtgaatcaaggtcatcgacacccaagaattattcaagcattgaaagatcaagcagataaagtcactttagtatcacgtgcttttcatagtgataatttgggtcaatggtatgagaaaatatgtaaactcgcaggtaaagacaaagcattgcctatgaatacgggagcagaggcggttgaaacagctttaaaagctgctcgtcgttgggcttatgatgttaagggtattgagccgaacaaagctgaaattatcgcttttaatggtaatttccatggacgtacgatggcaccagtatcattgtcttcagaagctgagtatcaacgaggctatggtccattgttagatggctttcgaaaagttgagtttggtgacgttaatcaattaaaagcagcaattaataaaaatacagcagcaattttagtagaacctatacagggagaagcagggattaacgtaccaccagaaggatatttgaaaacaattagagaattatgtgatgaacatcaaattttatttattgctgatgaaattcaagcaggattaggacgttcaggaaaattatttgcaacggattgggatcatgtaaaaccggatgtttatattttaggaaaagcgttaggtggaggggtatttcctatctcggtagttcttgcagataatgaggtattagatgtatttactcctggctcacatggttctacatttggtggaaatccactagcgagtgcagtttctattgcagctatagatgtcattattgacgaggatttacctggtcgttcattagaattaggagaatattttaagtctgaattgaaaaaaattgagcatccatctattaaagaagttaggggacgaggattatttatcggtattgaattacatgaaagtgccagaccatattgtgaagctttgaaagaacaaggattattatgtaaagaaactcacgacaccgttattagatttgcacctccattagtgataacgaaagaagagttagacatggctttagagaagattaagagtgtatttgcatag

SEQ ID NO: 2160 - protein, 354 aa, Artificial Sequence
  Description of Artificial Sequence: synthetic amino acid sequence
MDMLSAYSAVNQGHRHPRIIQALKDQADKVTLVSRAFHSDNLGQWYEKICKLAGKDKALPMNTGAEAVETALKAARRWAYDVKGIEPNKAEIIAFNGNFHGRTMAPVSLSSEAEYQRGYGPLLDGFRKVEFGDVNQLKAAINKNTAAILVEPIQGEAGINVPPEGYLKTIRELCDEHQILFIADEIQAGLGRSGKLFATDWDHVKPDVYILGKALGGGVFPISVVLADNEVLDVFTPGSHGSTFGGNPLASAVSIAAIDVIIDEDLPGRSLELGEYFKSELKKIEHPSIKEVRGRGLFIGIELHESARPYCEALKEQGLLCKETHDTVIRFAPPLVITKEELDMALEKIKSVFA

SEQ ID NO: 2161 - DNA, 1125 bp, Artificial Sequence
  Description of Artificial Sequence: synthetic nucleic acid sequence
gtgcgcattccagtacgaatggacgatgggacagttaaaacatttactggataccgtgcacaacataatgatgcagttggccctactaaaggtggcgttcgtttccatccagaagttgatgaagaagaagtgaaggcattatcaatgtggatgactttaaaatgtggcattgttaatttaccttatggtgggggtaaaggcggtattgtttgtgatccacgtcaaatgagtatacacgaagttgagcgtctatctcgagggtatgtaagagctatatctcaatttgttgggcctaacaaagatattccagcaccagacgtttttacaaactctcaaattatggcttggatgatggatgagtatagtgcattagataaatttaattcgccaggttttataacaggcaaacctattgtattaggtggatctcaaggacgtgatcgctctacagctttaggtgtagtcattgcaattgaacaagcggcaaaacgtcgtggcatggatattaaagatgccaaaattgtgattcaaggtttcggcaatgcaggtagtttcttagctaaattcttatacgatttaggtgctaaagtagttggtataagtgatgcatatggagccttacatgaccctaatggacttgatatagattatttattagatcgacgtgatagcttcggtacagttacaaatctattcgaagatacaatttctaacaaagaattattcgaattggattgtgacatccttgttcctgctgcaatttccaatcaaatcactgaagataatgcgcacgatattaaagcaagcattgtagttgaagctgctaatggccctacgacgcctgaagcaacacgtattttaacagaaagagatatattactagtgccggatgtacttgcaagtgcaggaggtgtgactgtatcttatttcgagtgggtacaaaataatcaaggttattattggactgaagaagaagtcaatgacaaactacgtgagaagttagtaacagcatttgatacgatttatgaattgtcacaaaatagaaaaattgatatgagattagcagcatatatagtaggtattaaacgtactgctgaagcagcaagatatagaggttgggcataa

SEQ ID NO: 2162 - protein, 374 aa, Artificial Sequence
  Description of Artificial Sequence: synthetic amino acid sequence
VRIPVRMDDGTVKTFTGYRAQHNDAVGPTKGGVRFHPEVDEEEVKALSMWMTLKCGIVNLPYGGGKGGIVCDPRQMSIHEVERLSRGYVRAISQFVGPNKDIPAPDVFTNSQIMAWMMDEYSALDKFNSPGFITGKPIVLGGSQGRDRSTALGVVIAIEQAAKRRGMDIKDAKIVIQGFGNAGSFLAKFLYDLGAKVVGISDAYGALHDPNGLDIDYLLDRRDSFGTVTNLFEDTISNKELFELDCDILVPAAISNQITEDNAHDIKASIVVEAANGPTTPEATRILTERDILLVPDVLASAGGVTVSYFEWVQNNQGYYWTEEEVNDKLREKLVTAFDTIYELSQNRKIDMRLAAYIVGIKRTAEAARYRGWA

SEQ ID NO: 2163 - DNA, 453 bp, Artificial Sequence; identical to SEQ ID NO: 2063
  Description of Artificial Sequence: synthetic nucleic acid sequence

SEQ ID NO: 2164 - protein, 150 aa, Artificial Sequence; identical to SEQ ID NO: 2064
  Description of Artificial Sequence: synthetic amino acid sequence

SEQ ID NO: 2165 - DNA, 741 bp, Artificial Sequence
  Description of Artificial Sequence: synthetic nucleic acid sequence
gtgaatgtaaaaatgaaagttaaatcaccacaatcaatctacttaaaaggacatcgtcaacaagctgtattgttattacattcttttacgggaactgtacgtgatgtaaaacatttagcacaacagttgaatgaagagggatttacttgttacgtgcctagttatccaggccacggtttgccacttaaggaatttacccaacacaatattaatgattggtgggaacaagttacagcagcatatcaatttttaagaaatgcaggatacagtagaattaatgtgacaggcgtatcattaggcggattatttactttaaggttagctgaacattttgatttagaacgtatagctgtgatgtcagccccacataaaaagcgtgaaagcgagattgcgtggcgtcttgaaaggtatgggcatcgaatgaatgaaattttgagtttaagcgaagaagagcgtcgtcaccaaatggaaaccatcttgtcttatgataaagaaattgaagtgtttcaaggtgtaattgatgaaattatggcttatcttgcaaatattacagtaccagtgaatattatgtatggcgaagaagatgacccattatatgctcaaagtgcgcaatacatttatgataatgtaaatagtcaagataaagaactgctcaaatttgaaaaaagcggtcatcttatgacgtatggcgatcatgcatacagagtagaacaatctattattcaatttttcagtaaataa

SEQ ID NO: 2166 - protein, 246 aa, Artificial Sequence
  Description of Artificial Sequence: synthetic amino acid sequence
VNVKMKVKSPQSIYLKGHRQQAVLLLHSFTGTVRDVKHLAQQLNEEGFTCYVPSYPGHGLPLKEFTQHNINDWWEQVTAAYQFLRNAGYSRINVTGVSLGGLFTLRLAEHFDLERIAVMSAPHKKRESEIAWRLERYGHRMNEILSLSEEERRHQMETILSYDKEIEVFQGVIDEIMAYLANITVPVNIMYGEEDDPLYAQSAQYIYDNVNSQDKELLKFEKSGHLMTYGDHAYRVEQSIIQFFSK

SEQ ID NO: 2167 - DNA, 1152 bp, Artificial Sequence
  Description of Artificial Sequence: synthetic nucleic acid sequence
atggaatttacggtaggtaaaatgggtcgtacatatacaacgcaaatatataagaaattaacgggaaagaaatggcttaatattatcggatggaatggtaatttagccgtatttatactatttggtttttatagtgttattggtggttggattattatatatataggttatgtcatagcacaaatcatggtttttaaatcaagtacgctgacaaatattcaatttgaaacaatcattagtaatccatggttgactgttttaggtcaaggcatatttattttgataacaatggtaattgttatgttaggtgttgaaaaaggtttagaaaaagcttctaaaataatgatgcctctattatttatctttttaattatcgttgtagcacaatctttaactttagaaggtgctttagaaggtgtacgttatatactgcaacctcgagttgaagatatgtctattcaaggtgtactatttgcgttaggacaatcgttttttacgctgtccctaggtacaaccggaatgattacttatgcaagctatgcacctaaaaatatgacgataaagtcttcagcactttcaattgtcgtaatgaatattttaatttctgtcttggctggattagctatatttcctgcgcttaaaacatttggttaccaaccccaagaaggccctggcttattatttaaggttttaccactagtatttagcgaaatgacttttggtacattcttttactttatatttttactattattcttatttgcggcattaacgtcttctatatcattattagagttaaatgtatctaattttactaaaaatgataatagtaaaagacaaaaagtggcaatcataggtagtatacttgtatttatcattagtatcccagcaacattatcttttagtagtctaagtcatttgcgttttggcgctggtacgatatttgataatatggattttattgtatctaatattcttatgccattaggggcactaggaacaacattagtggttggccaattactagataaaaaattattaaaagaaagctttgggaaagacaaattcaacctatttttaccgtggtattatttaattaagttcatcatgcctattgttattattttagtatttatagttcaattattttaa

SEQ ID NO: 2168 - protein, 383 aa, Artificial Sequence
  Description of Artificial Sequence: synthetic amino acid sequence
MEFTVGKMGRTYTTQIYKKLTGKKWLNIIGWNGNLAVFILFGFYSVIGGWIIIYIGYVIAQIMVFKSSTLTNIQFETIISNPWLTVLGQGIFILITMVIVMLGVEKGLEKASKIMMPLLFIFLIIVVAQSLTLEGALEGVRYILQPRVEDMSIQGVLFALGQSFFTLSLGTTGMITYASYAPKNMTIKSSALSIVVMNILISVLAGLAIFPALKTFGYQPQEGPGLLFKVLPLVFSEMTFGTFFYFIFLLLFLFAALTSSISLLELNVSNFTKNDNSKRQKVAIIGSILVFIISIPATLSFSSLSHLRFGAGTIFDNMDFIVSNILMPLGALGTTLVVGQLLDKKLLKESFGKDKFNLFLPWYYLIKFIMPIVIILVFIVQLF

SEQ ID NO: 2169 - DNA, 909 bp, Artificial Sequence
  Description of Artificial Sequence: synthetic nucleic acid sequence
atgattgcatacgatttgataggacaaactccattagttttattagaaagctttagtgacgagaatgttaaaatatacgccaaacttgagcaatttaatcctggtggtagcatcaaagaccgtctagggaagtacttaattgaaaaagcaatagatgaaggacgacttaaagaaggggatacaatagtcgaagcgactgctggtaatacaggcattggacttgctattgcttctaatcggcacaaagtaaaatgtatcatctttgctccagaaggatttgcagaagaaaaaatttcaattatgaaagcattgggtgcagatgttagacgtacccccaaagctgagggaatgactggcgcacagcaagaggcgttggcatacgcaacacgatatggatatttatatatgaatcaattcgaaactaaagataatcctggggcatatacacaaacacttgccaaacaactcacagatgaactttcacatattgattattttgtggcaggtgttgggtccggtggtacgtttacaggagttgcacaacacttaaaaacgtatgatgtaaaaaattatattgtagaaccagaaggctctgtcttaaatggtggtgtcagtcatcctcatgcaactgaagggattggttctgaaaagtggccatcatttttagaaaaagaattagtagatggtatttttactgttgccgataaagatgcttttaataatgttaaacttgtcgcgaataaagaaggattgttagttggtagttcttcgggagcggcattacaaggagcgttggaattaaaaaaaagcattcaaaatggtgtgattgttaccatctttccagatggaagcgatcgatacatgtccaaacaaatattcaactataaggagagttttaataatgaataa

SEQ ID NO: 2170 - protein, 302 aa, Artificial Sequence
  Description of Artificial Sequence: synthetic amino acid sequence
MIAYDLIGQTPLVLLESFSDENVKIYAKLEQFNPGGSIKDRLGKYLIEKAIDEGRLKEGDTIVEATAGNTGIGLAIASNRHKVKCIIFAPEGFAEEKISIMKALGADVRRTPKAEGMTGAQQEALAYATRYGYLYMNQFETKDNPGAYTQTLAKQLTDELSHIDYFVAGVGSGGTFTGVAQHLKTYDVKNYIVEPEGSVLNGGVSHPHATEGIGSEKWPSFLEKELVDGIFTVADKDAFNNVKLVANKEGLLVGSSSGAALQGALELKKSIQNGVIVTIFPDGSDRYMSKQIFNYKESFNNE

SEQ ID NO: 2171 - DNA, 1128 bp, Artificial Sequence
  Description of Artificial Sequence: synthetic nucleic acid sequence
atgatacatgggggacatacgacagacaactatactggagcagtgacaacacctatttatcaaacaagtacttatttacaagatgatattggtgatttaagacaagggtacgaatattcacgtactgcaaatcctacacgtgcgtctcttgaaagtgttattgctaatttagaacatggtaagcatggttttgcttttggttcaggaatggcagcaattagtgcagttatcatgttattagataaaggagatcacttagttcttaattctgatgtttatggtggcacatatcgtgcattaactaaagtatttactcgctttggtatagacgtagattttgttgatacaactaaaattgaaaacattgaacaatatattaaacctgaaactaaaatgttatatgtagaaacaccttcaaatccattattgcgtgtgactgatattaaagcatcagcaaaaattgcaaaaaaatatgatttgatatctgtagtcgataatacatttatgacaccttactaccaaaaccctttagactttggtattgatatcgtattgcattcggctacaaaatatattggaggccatagtgatgttgtagctggtcttgttgctactgctgatgatgatttagcagaacgtctaggctttatttcaaattctacaggtggtgtacttggacctcaagatagctatttattaatcagaggtattaaaacgctaggtctaagaatggagcaaataaaccgaaacgttgaaggtattgtgcaaatgttacaaaagcaccctaaagttcaacaagtattccatcctagtattaaggaacatatgaactatactatccatcaaaatcaagcaactgggcatacaggggtagtatcttttgaagttaaagatacagaagcggctaaacaagtgattcacgcaacaaactactttacactggcagagagtttaggggcagttgaaagtctaatttctgtaccggcacttatgacgcatgcgtccatcccatcagatgtaagagccaaggaaggtattacggatggtctcattcgtttatctattggtattgaagacacagaagacttagttaatgatttagaacaagccttaaatactttgagataa

SEQ ID NO: 2172 - protein, 375 aa, Artificial Sequence
  Description of Artificial Sequence: synthetic amino acid sequence
MIHGGHTTDNYTGAVTTPIYQTSTYLQDDIGDLRQGYEYSRTANPTRASLESVIANLEHGKHGFAFGSGMAAISAVIMLLDKGDHLVLNSDVYGGTYRALTKVFTRFGIDVDFVDTTKIENIEQYIKPETKMLYVETPSNPLLRVTDIKASAKIAKKYDLISVVDNTFMTPYYQNPLDFGIDIVLHSATKYIGGHSDVVAGLVATADDDLAERLGFISNSTGGVLGPQDSYLLIRGIKTLGLRMEQINRNVEGIVQMLQKHPKVQQVFHPSIKEHMNYTIHQNQATGHTGVVSFEVKDTEAAKQVIHATNYFTLAESLGAVESLISVPALMTHASIPSDVRAKEGITDGLIRLSIGIEDTEDLVNDLEQALNTLR

SEQ ID NO: 2173 - DNA, 753 bp, Artificial Sequence; identical to SEQ ID NO: 309
  Description of Artificial Sequence: synthetic nucleic acid sequence

SEQ ID NO: 2174 - protein, 250 aa, Artificial Sequence; identical to SEQ ID NO: 310
  Description of Artificial Sequence: synthetic amino acid sequence

SEQ ID NO: 2175 - DNA, 606 bp, Artificial Sequence; identical to SEQ ID NO: 311
  Description of Artificial Sequence: synthetic nucleic acid sequence

SEQ ID NO: 2176 - protein, 201 aa, Artificial Sequence; identical to SEQ ID NO: 312
  Description of Artificial Sequence: synthetic amino acid sequence

SEQ ID NO: 2177 - DNA, 834 bp, Artificial Sequence; identical to SEQ ID NO: 313
  Description of Artificial Sequence: synthetic nucleic acid sequence

SEQ ID NO: 2178 - protein, 277 aa, Artificial Sequence; identical to SEQ ID NO: 314
  Description of Artificial Sequence: synthetic amino acid sequence

SEQ ID NO: 2179 - DNA, 1172 bp, Artificial Sequence
  Description of Artificial Sequence: synthetic nucleic acid sequence
atgtctaacaatgaaacaataaccaattatacaattaaacctcatggaggagaactcatcaatcgtgttgttgaaggaaacgaacgtgaacgtttgattgaggaagcattaaattttaaaccgattactttaaatccttggggaatatcggatctagagctcataggtattggcggatttagtccccttacaggatttatgaacaaggaagactacactaaggttatagaggaaacacatttaagcaatggcttagtttggagtattcctatcactttacctgtaacagaatccgaagcagataaacttgaaataggtgatgatattgctttatatggtgaagatggtcagttatatggaacgcttaaattagaagaaaagtacacatatgataaagaaaaagaagcgcgtttggtgtacggaactactgaagaagctcatcctggagttaaaaaggtttatgaaaaaggtaatatatatttaggtggtcctattaaactattaaatcgtccaaaacatgacgcgttttcaaattatcatctggatccttcagagacgagacaattatttcatgatttaggttggaaaactgtcgtaggttttcaaacgagaaatccagtgcatcgagcacatgaatatattcaaaaatcagcactagaaattgttgatggtctacttttaaatccactagttggtgaaacaaagtcagacgatattccagcggatgtacgtatggaaagttatgaagtgatattaaaaaactattatcctgaagatagagcacgtctagtcatttatcctgctgcaatgcgctatgccggaccacgtgaagcgatacttcatgcaactgtccgtaaaaattatggttgtacacattttattgtgggaagagatcacgctggggtaggcgattattatggtacttatgaagcacaagagctgattactcaatttgaagatgagttaggtattcaaattttaaaatttgaacatgccttttattgcgaagcttgtggtaatatggcaactgctaaaacatgtccgcatgacgcttctcaacatttacatttaagtggtactaaagtaagagaaaaactgcgtaatggcgaatcattgccaactaaattttcaagaccagaagttgccgaagttctaattaaaggtttgcgagt

SEQ ID NO: 2180 - protein, 391 aa, Artificial Sequence
  Description of Artificial Sequence: synthetic amino acid sequence
MSNNETITNYTIKPHGGELINRVVEGNERERLIEEALNFKPITLNPWGISDLELIGIGGFSPLTGFMNKEDYTKVIEETHLSNGLVWSIPITLPVTESEADKLEIGDDIALYGEDGQLYGTLKLEEKYTYDKEKEARLVYGTTEEAHPGVKKVYEKGNIYLGGPIKLLNRPKHDAFSNYHLDPSETRQLFHDLGWKTVVGFQTRNPVHRAHEYIQKSALEIVDGLLLNPLVGETKSDDIPADVRMESYEVILKNYYPEDRARLVIYPAAMRYAGPREAILHATVRKNYGCTHFIVGRDHAGVGDYYGTYEAQELITQFEDELGIQILKFEHAFYCEACGNMATAKTCPHDASQHLHLSGTKVREKLRNGESLPTKFSRPEVAEVLIKGLRV

SEQ ID NO: 2181 - DNA, 498 bp, Artificial Sequence
  Description of Artificial Sequence: synthetic nucleic acid sequence
atggatgctgaaggattatcagttgagaaggaattacaacctattcaacaccttcttgataaaatggagtctaaatatcgcatgcaaagtgaagaattaggtttaacaatgacgtttgattctaataatgacgaacaattatggaactatgatatggatagaatggaccaagtgttaactaatttaattgataacgcaacaagatatacacaagctggtgattctataaagatttctattgatgaagattcagatttcaatattttaacaataactgatacaggcactggtatagcaccggaacatctgaaacaagtatttgaccgtttttataaagtggacgctgctcgaaaaagaggtaagcaaggcaccggattaggacttttcatttgtaaaatgattattgaagaacacgggggacgtattgatgttgagagcgaattaggcaaaggtacttcatttattattagactacctaaatcaaaacaaattagttag

SEQ ID NO: 2182 - protein, 165 aa, Artificial Sequence
  Description of Artificial Sequence: synthetic amino acid sequence
MDAEGLSVEKELQPIQHLLDKMESKYRMQSEELGLTMTFDSNNDEQLWNYDMDRMDQVLTNLIDNATRYTQAGDSIKISIDEDSDFNILTITDTGTGIAPEHLKQVFDRFYKVDAARKRGKQGTGLGLFICKMIIEEHGGRIDVESELGKGTSFIIRLPKSKQIS

SEQ ID NO: 2183 - DNA, 618 bp, Artificial Sequence
  Description of Artificial Sequence: synthetic nucleic acid sequence
atgggagaagatggaggttttttgttgttcaaatttcctccttttctaagtaagatgaatggaaggagaaaattatatatgcaacaaaacaaacgtttgattacaattagtatgttaagtgcggtagcgtttgtgttaactttcatcaagtttccattgccatttataccaccgtatctaactctcgattttagtgatgtaccgacgttattagcaacattcctcttaagtcctattgctgggattatcgttgcactcatcaaaaatattttaaattttctattcaatataggggatcctgttggaccagtagctaactttttagcaggcgtcagctttttgctatcatcatactatgtttatagaaaaagaaaaaataatcgttctttaatttatggattaattacaggtacaatcgttatgactattgttttgagcatcttaaattattttgtgttacttccattatatggaatgatatttaatttaggtgatgtgcttaataacgtaaaaattgttattgtgtctggagtcataccttttaatttaattaaaggcataatcatttccattatatttgtgctgttatttagaagattaagacatatcatcaaataa

SEQ ID NO: 2184 - protein, 205 aa, Artificial Sequence
  Description of Artificial Sequence: synthetic amino acid sequence
MGEDGGFLLFKFPPFLSKMNGRRKLYMQQNKRLITISMLSAVAFVLTFIKFPLPFIPPYLTLDFSDVPTLLATFLLSPIAGIIVALIKNILNFLFNIGDPVGPVANFLAGVSFLLSSYYVYRKRKNNRSLIYGLITGTIVMTIVLSILNYFVLLPLYGMIFNLGDVLNNVKIVIVSGVIPFNLIKGIIISIIFVLLFRRLRHIIK

SEQ ID NO: 2185 - DNA, 939 bp, Artificial Sequence
  Description of Artificial Sequence: synthetic nucleic acid sequence
atgagtcatgcatttaactacaaaaccaataaaagtatctataatattttaacaggcaagaagtcacaccaaacgtttttcgatgcgtcaagccaacaacttttgtcattatatcatagtttacctaacttaaagtattcaacttttgagcaatttatactccaaaaggatgattttaaaaaatcaattcaagtaaaaatacatccacaatacacttatgatagtctcactcaaacctttagttgcatacaattacttatccaaacgttatctcatacacgcaaggagtcaaatacatttattccaatcgttcaaaatacctatatccaacaaagggttaaacaactttatcatcaggtcattgaatcaaatcaagtatcaaatactatagacgaaatatatttattatttgagaatttaaataataaatataaccatacatttcttcattattatttacaaggatatgaggaatccatgtatactagacaacaaataagtttaattgagagtataccacaatcagaattatttgaacgagaaatgaatgaactgattgacatattgaatcaattaaaagattcaacgaaatatccaatactttctcaagctatcattctttcaccattactaacaaatacatacttaagctatcaaaagttaaaatctggtctcaatttaaaagaaattgctcaattacaaaatgtaaaacttaacacaattgaagatcatattctagaaatgtatattaaaggttatttgatagactatacattatttataaataaaaaagatattctcgaatttataaactactatcaaaaacatcgcggtgaacgattaaaattttataaagaacattttactgattggacttactttcaaattaagttagttatagtaggaatagaaagaggtgatttaattgctgaaagataa

SEQ ID NO: 2186 - protein, 312 aa, Artificial Sequence
  Description of Artificial Sequence: synthetic amino acid sequence
MSHAFNYKTNKSIYNILTGKKSHQTFFDASSQQLLSLYHSLPNLKYSTFEQFILQKDDFKKSIQVKIHPQYTYDSLTQTFSCIQLLIQTLSHTRKESNTFIPIVQNTYIQQRVKQLYHQVIESNQVSNTIDEIYLLFENLNNKYNHTFLHYYLQGYEESMYTRQQISLIESIPQSELFEREMNELIDILNQLKDSTKYPILSQAIILSPLLTNTYLSYQKLKSGLNLKEIAQLQNVKLNTIEDHILEMYIKGYLIDYTLFINKKDILEFINYYQKHRGERLKFYKEHFTDWTYFQIKLVIVGIERGDLIAER

SEQ ID NO: 2187 - DNA, 597 bp, Artificial Sequence
  Description of Artificial Sequence: synthetic nucleic acid sequence
atgtcaatggataaagctacaaaatatgcacttcaattaagggtgattgctcaagaaagctatcctagtgtcgatagacattcctttctagtcgaaaaattacgcttacttattcaacaattaaaacaatctattcatcatctcaaacaattagatgatgccatgattcaattagcacaacaactcgattattttgaaaatattcattcgatacctggtattggtaagctaagcacagctatgattattggggagattggtgatattaagcgatttaaatcaaataaacaactcaatgcttttgttggcattgatatcaaacgatatcaatcaggtcatacacactgtagagataccatcaacaagcgtggtaataaaaaagcgagaaaacttttattttgggtgattatgaatataataagagggcagcatcattatgacaatcatgtcgtcgattattactacaaactaagaaagcagcctaatgagaaacctcataagactgccatcattgcttgtataaatcgattattaaaaacaattcattatcttgtaatgaatcataaattgtacgattatcaaatgtcaccacattag

SEQ ID NO: 2188 - protein, 198 aa, Artificial Sequence
  Description of Artificial Sequence: synthetic amino acid sequence
MSMDKATKYALQLRVIAQESYPSVDRHSFLVEKLRLLIQQLKQSIHHLKQLDDAMIQLAQQLDYFENIHSIPGIGKLSTAMIIGEIGDIKRFKSNKQLNAFVGIDIKRYQSGHTHCRDTINKRGNKKARKLLFWVIMNIIRGQHHYDNHVVDYYYKLRKQPNEKPHKTAIIACINRLLKTIHYLVMNHKLYDYQMSPH

SEQ ID NO: 2189 - DNA, 915 bp, Artificial Sequence
  Description of Artificial Sequence: synthetic nucleic acid sequence
atggttaaaaataaacagtctcctgatattgcacagggtgtagacaaagctcttgagtatcgaaatgatatttctgaagaagaaattgaagcaacaggtgcaggtgaccaaggattaatgtttggatatgcaactgatgaaactgatacgtatatgcctctacctatattcctgtcacatcaacttgctaaacgattggctgatgtacgaaaagatgaaattttagattatcttcgtccagatggaaaagtacaggtgactgttgaatatggtaaagatgacaaacctagacgtattgataccattgtagtttctacacaacatgctgaagatgtagagttagcacaaattgaaaaggacattaaaacgcatgttatttacccaactgtagataaagctttattagatgatgaaactaaattttacattaacccaactggacgtttcgttattggaggacctcaaggagatgctggtttaactggacgtaaaattatagttgatacgtatggtggttatgcccgtcatggtggaggttgttttagtggtaaagatcctactaaagtagatcgttcagcagcttatgcagcaagatatgtagctaaaaatattgttgcagctggtttagctaaacaatgtgaagtacaacttgcatatgcaattggtgtagcagaacccgtttccatttcaattaatacgtttgatactggaaaggtttcagaagcacgtttagttgaagctgtaagaaagcattttgatttaagaccagcaggtatcattaaaatgttagacttaaaacaaccgatatatagacaaacagcagcgtatggtcattttggacgtacagacgtattgttaccatgggaaaaattagataaagtcaatgttttaaaagatgctgttgaaattcaatga

SEQ ID NO: 2190 - protein, 304 aa, Artificial Sequence
  Description of Artificial Sequence: synthetic amino acid sequence
MVKNKQSPDIAQGVDKALEYRNDISEEEIEATGAGDQGLMFGYATDETDTYMPLPIFLSHQLAKRLADVRKDEILDYLRPDGKVQVTVEYGKDDKPRRIDTIVVSTQHAEDVELAQIEKDIKTHVIYPTVDKALLDDETKFYINPTGRFVIGGPQGDAGLTGRKIIVDTYGGYARHGGGCFSGKDPTKVDRSAAYAARYVAKNIVAAGLAKQCEVQLAYAIGVAEPVSISINTFDTGKVSEARLVEAVRKHFDLRPAGIIKMLDLKQPIYRQTAAYGHFGRTDVLLPWEKLDKVNVLKDAVEIQ

SEQ ID NO: 2191 - DNA, 861 bp, Artificial Sequence
  Description of Artificial Sequence: synthetic nucleic acid sequence
gtggctgttttattctttatactcttcttagtagcgaaccatagtaagaagaaagtgaagaatcaaacagaagcacattataaagaaaaagaacaacatctaaaagaatctcatgaagaagctttagaaaaagagagagttgagaataaaaaagttgttacaaaacaaaaagaagattttgacgtgacagttagtaacaaaaatcgtgaaattgatgcgttgaaactattctcaaaaaatcatagtgaatatgttacagatatgcgattaattggtattcgtgagagactagtaaatgaaaagagaatacgccctgaagatatgcatattatggcaaatattttcttgcctagtaatgagttaactaatattgaacgtgtgagtcatcttgtacttacacgaactggcttatatataattgattctcaattattaaaaggccatgtttataatggtattagtggtgcgcaatttaaagaattacctacgatgtcacaagtttttgacacgctcgacttagattcatcacagccacagacattggtcttagatcaaaatgaagatcaacattcattatcttttgttaattattcagataagattaaacatattgaaaaattagcaggagatttacaaaatgaattgaataccaaatatacgcctacatcaatactgtattttaatcctaaaaaggataatgatgttacaatttctcattatacgcagtcatcaaatgttaaagttttagttggtcctgaacaattagatgaattcttcaacaagtttgttttccatggacgcatacagtacaatgtggatgatttacaagatatcatggataaaatcgagtcattcaattaa

SEQ ID NO: 2192 - protein, 286 aa, Artificial Sequence
  Description of Artificial Sequence: synthetic amino acid sequence
VAVLFFILFLVANHSKKKVKNQTEAHYKEKEQHLKESHEEALEKERVENKKVVTKQKEDFDVTVSNKNREIDALKLFSKNHSEYVTDMRLIGIRERLVNEKRIRPEDMHIMANIFLPSNELTNIERVSHLVLTRTGLYIIDSQLLKGHVYNGISGAQFKELPTMSQVFDTLDLDSSQPQTLVLDQNEDQHSLSFVNYSDKIKHIEKLAGDLQNELNTKYTPTSILYFNPKKDNDVTISHYTQSSNVKVLVGPEQLDEFFNKFVFHGRIQYNVDDLQDIMDKIESFN

SEQ ID NO: 2193 - DNA, 699 bp, Artificial Sequence
  Description of Artificial Sequence: synthetic nucleic acid sequence
atgatttatggtaacgaagaaacggtaggtcaaggtattaaagaaggattagaatcgactggtttaagtcgtgaagatttatttataacttctaaattatggctaactgattttggacgtcaaaatgtggaagatgcctatcgacaatctgttgcaaaattaggactggattatttagatttatatctgatgcattggccaggtacaaatgaagcggtaatgattgatacttggagaggtatggaagacttgtataaacaaaatcaggtgaaaaatattggtgtgagcaattttactccagaacattttgaagcattgcttgcccaagtttctattaaaccggtcattaaccaagtagaatttcatccttatttaacacaaaatgaattacgaaagtatttagaagctcaaaatattatcatggaatcatggtctccattaatgaattcacaaattctccatgatgaagtcataaatgaagtagctaatgaagtaggaaaaactccagcccaagttgtaataagatggaatattcagcacgatgttgttgttatacctaaatccgtaacaccacatcgcatagaagaaaatttagacgtatggaattttgaattaagcgacaaccaaatggaaagaatcgatcaattaaatcaagataaaagaattggacctaaccctcttgaatttaacggtaagtaa

SEQ ID NO: 2194 - protein, 232 aa, Artificial Sequence
  Description of Artificial Sequence: synthetic amino acid sequence
MIYGNEETVGQGIKEGLESTGLSREDLFITSKLWLTDFGRQNVEDAYRQSVAKLGLDYLDLYLMHWPGTNEAVMIDTWRGMEDLYKQNQVKNIGVSNFTPEHFEALLAQVSIKPVINQVEFHPYLTQNELRKYLEAQNIIMESWSPLMNSQILHDEVINEVANEVGKTPAQVVIRWNIQHDVVVIPKSVTPHRIEENLDVWNFELSDNQMERIDQLNQDKRIGPNPLEFNGK

SEQ ID NO: 2195 - DNA, 1014 bp, Artificial Sequence
  Description of Artificial Sequence: synthetic nucleic acid sequence
atggaacgattttgttgtgtaaatcaaattaactatattcaaatgaatccgttagaagccaaatttaaaacgagcgctctaagatcatggaaaactgatcaggcagatgctcataagcttgcttgtttaggaccgacgcttaaacaaacagacagcttacctatacatgagttaatattctttgaattaagagaacgcgtccgttttcatctagaaatcgagaatgaacaaaatcgacttaaatttcagatccttgaattactccatcaaacattccctggtttagaaagattgtttagtagtcgatattcaatcattgcactcaacatcgcagaaatctttactcatccagacatggttcttgatatcgacaaggatgtactgattacacatatattcaattctacagataagggaatgtcaatggataaagctacaaaatatgcacttcaattaagagtgattactcaagaaagctatcctaatgtcgatagacattcctttctagtcgaaaaattacgcttacttattcaacaattaaaacaatctattcatcatctcaaacaattagatgatgccatgattcaattagcacaacaactcgattattttgaaaatattcattcgatacctggtattggtaaactaagcacagctatgattattggggagattggtgatattaagcgatttaaatcaaataaacaactcaatgcttttgttggcattgatatcaaacgatatcaatcaggtcatacacactgtagagataccatcaacaagcgtggtaataaaaaagcgagaaaacttttattttgggtgattatgaatataataagagggcagcatcattatgacaatcatgtcgtcgattattactacaaactaagaaagcagcctaatgagaaacctcataagactgccatcattgcttgtataaatcgattattaaaaacaattcattatcttgtaatgaatcataaattgtacgattatcaaatgtcaccacattag

SEQ ID NO: 2196 - protein, 337 aa, Artificial Sequence
  Description of Artificial Sequence: synthetic amino acid sequence
MERFCCVNQINYIQMNPLEAKFKTSALRSWKTDQADAHKLACLGPTLKQTDSLPIHELIFFELRERVRFHLEIENEQNRLKFQILELLHQTFPGLERLFSSRYSIIALNIAEIFTHPDMVLDIDKDVLITHIFNSTDKGMSMDKATKYALQLRVITQESYPNVDRHSFLVEKLRLLIQQLKQSIHHLKQLDDAMIQLAQQLDYFENIHSIPGIGKLSTAMIIGEIGDIKRFKSNKQLNAFVGIDIKRYQSGHTHCRDTINKRGNKKARKLLFWVIMNIIRGQHHYDNHVVDYYYKLRKQPNEKPHKTAIIACINRLLKTIHYLVMNHKLYDYQMSPH

SEQ ID NO: 2197 - DNA, 306 bp, Artificial Sequence; identical to SEQ ID NO: 1877
  Description of Artificial Sequence: synthetic nucleic acid sequence

SEQ ID NO: 2198 - protein, 101 aa, Artificial Sequence; identical to SEQ ID NO: 1878
  Description of Artificial Sequence: synthetic amino acid sequence

SEQ ID NO: 2199 - DNA, 315 bp, Artificial Sequence; identical to SEQ ID NO: 1879
  Description of Artificial Sequence: synthetic nucleic acid sequence

SEQ ID NO: 2200 - protein, 104 aa, Artificial Sequence; identical to SEQ ID NO: 1880
  Description of Artificial Sequence: synthetic amino acid sequence

SEQ ID NO: 2201 - DNA, 344 bp, Artificial Sequence
  Description of Artificial Sequence: synthetic nucleic acid sequence
gtgttttatgtggggaaatatgaagatatgttaattgaacatgactatattgaagtcattgaatgtgataacttacctaaaaggttatctggtttgtggcttggagatatgattttaattaatcgtaacttgcctattacttccaaacttgaaacacttgcagaggaactcgctcataacgaacttacatatggaaatatagttgatcaaagtagttttaatcatagaaaatttgaaggttatgcacgtaggttagcctatgaaaagttaatccctcttaaagatattgtaaaagcatttttgcaaggcattcatgacttgtatgaacttgctaatttttttga

SEQ ID NO: 2202 - protein, 115 aa, Artificial Sequence
  Description of Artificial Sequence: synthetic amino acid sequence
  MOD_RES (115): variable amino acid
VFYVGKYEDMLIEHDYIEVIECDNLPKRLSGLWLGDMILINRNLPITSKLETLAEELAHNELTYGNIVDQSSFNHRKFEGYARRLAYEKLIPLKDIVKAFLQGIHDLYELANFFX

SEQ ID NO: 2203 - DNA, 1410 bp, Artificial Sequence
  Description of Artificial Sequence: synthetic nucleic acid sequence
atgcaagatttacaagtatttaattttgaagatttaccagtaagaaaaatagaagtagatggagaaccatattttttaggtaaagacgtggcagaaatattaggttacacaagatctgataatgcaattagaaatcatgttgatgatgaagataagctgacgcaccaagttagtgcatcaggtcaaaaacgaaacatggtaatcatcaacgaatctggtttatacagcttaatctttgacgctgctaaacaaagtaaaaacgaaagtattagaaagaaagctaaacgttttaaacgtcccaaaaatgcgaaaataaaggaggtaaaagtaatgacagaaacggtattagaagtaaatgatttgcacgtttcctttgatattgctgcaggagaagtgcaagctgtcagaggcgtggattttcatttaaataaaggggaaacgttagccattgttggagaatctggatctggaaaatctgtaacaactaaggcaattacaaaactttttcaaaaggatacaggaagaataaaaaagggagaaatcttatttttaggtgaggacttagctcagaaaagtgaaaaagaactgatacagctaagaggtcgagatatttcaatgatatttcaggatcctatgacttctttaaatccaacaatgcaaatcggaaagcaagtcatggaacctttgattaaacataagaaattaagtaaagcaaaggccaagcaaagagcattggaaattttgaatttagttgggttacctcgtgctgaaaaacgatttaaagcttatccacatcaattttcaggaggacaacgtcagagaatagttattgcaatagcattggcatgtgagcctaaaatattaattgctgatgagcctacaactgctttagatgtgacaatgcaggctcaaattttagatcttatgaaagaactacaaaataagattgaaacttcaattatctttattacgcatgatttaggcgttgtagcaaatattgcggacaaagtagccgtaatgtatgggggacagatggttgaaacaggggatgtgaatgaaatattttatgatcctaaacatccctatacctggggattgctttcttcaatgcctgatttaacaaccagtaatgacacggacttaattgcaattccaggtacaccaccagatttacttcatccaccaattggtgatgctttcgcacgtagaagtcgatatgctttagatattgattttaaagaagaaccaccttggttcaaaatttcacccacacattttgttaaatcttggttattagatgcaagagctccaaaagttacgccaccttcaatggttcaaaaacgattaagaacaatgccaagtaattatgaacaaccacatagagtagagagggtggcttttaatgagtaa

SEQ ID NO: 2204 - protein, 469 aa, Artificial Sequence
  Description of Artificial Sequence: synthetic amino acid sequence
MQDLQVFNFEDLPVRKIEVDGEPYFLGKDVAEILGYTRSDNAIRNHVDDEDKLTHQVSASGQKRNMVIINESGLYSLIFDAAKQSKNESIRKKAKRFKRPKNAKIKEVKVMTETVLEVNDLHVSFDIAAGEVQAVRGVDFHLNKGETLAIVGESGSGKSVTTKAITKLFQKDTGRIKKGEILFLGEDLAQKSEKELIQLRGRDISMIFQDPMTSLNPTMQIGKQVMEPLIKHKKLSKAKAKQRALEILNLVGLPRAEKRFKAYPHQFSGGQRQRIVIAIALACEPKILIADEPTTALDVTMQAQILDLMKELQNKIETSIIFITHDLGVVANIADKVAVMYGGQMVETGDVNEIFYDPKHPYTWGLLSSMPDLTTSNDTDLIAIPGTPPDLLHPPIGDAFARRSRYALDIDFKEEPPWFKISPTHFVKSWLLDARAPKVTPPSMVQKRLRTMPSNYEQPHRVERVAFNE

SEQ ID NO: 2205 - DNA, 660 bp, Artificial Sequence
  Description of Artificial Sequence: synthetic nucleic acid sequence
atgatatttcaagatccttatgcatctctaaatcctcggttaaaggtaatggatatcgtagctgaaggaatagatattcacaaacttgctagtagtcagcgtgatcgaaagaaacgtgtatacgaccttttagaaacagttggtttaggtaaagaacacgcgaatcgttacccacatgagttttcaggcggacaaagacaacgtattggtatcgcacgtgcattagctgtagagccagaatttattattgcagatgaaccgatatcagcattagatgtatcgattcaagctcaagtcgttaatcttttattaaagctacaacgtgaacgtgatattactttattgtttattgctcatgatttatcaatggtgaaatatatttccgatagaattgcagtgatgcacttcggtaaaattgtagaaattggaccggctgatgatatttataattatccattacatgattatactaagtcattattaagtgccattccacagcctgatcctgatgttgagagaaatcgtcaacgtgttttatatcatgaagatgcaacgcttaatgaagaacgtcaattaaatgaaattagaccacaacattatgtattttctactcaaaacgaagcagttaaattgaaacaaaagtatggtttgtctgtttaa

SEQ ID NO: 2206 - protein, 219 aa, Artificial Sequence
  Description of Artificial Sequence: synthetic amino acid sequence
MIFQDPYASLNPRLKVMDIVAEGIDIHKLASSQRDRKKRVYDLLETVGLGKEHANRYPHEFSGGQRQRIGIARALAVEPEFIIADEPISALDVSIQAQVVNLLLKLQRERDITLLFIAHDLSMVKYISDRIAVMHFGKIVEIGPADDIYNYPLHDYTKSLLSAIPQPDPDVERNRQRVLYHEDATLNEERQLNEIRPQHYVFSTQNEAVKLKQKYGLSV

SEQ ID NO: 2207 - DNA, 837 bp, Artificial Sequence
  Description of Artificial Sequence: synthetic nucleic acid sequence
atgaaaggttttaaagtcttaattattttattaagtgtatgcataattttatctgcttgtagtaataagcagagtttatattcagaccaggggcaagtttttaggaaggtaatcacacaagatatgactacactagatacagctttaattacagatgctgtttctggtgatatagcagctcaagcttttgaaggattatatactttaaataaagaagacaaagctgaaccagctattgctaaatcttttccaaagaaaagtaatggtggcaaaacacttacgattaatttaagaaaaaatgcaaaatggtccaatggagattcggtaactgcatatgacttcgtatatgcgtggagaaaggtagttaatcctaagacggcttctgagtttgcatacataatgagcgatataaaaaatgcagatgaagttaatgcaggtaaaaaatcagtcaaggatttgggtatcaaggctataggtaaatataaattacaagtagatttagaaagacctgtaccttatattaatgaactattagcacttaatacatttaatcctcaaaatgagaaagttgctaaaaagtttggagaacaatatggtacaactgctgaaaaagcagtgtacaatggaccatttgaagtaacaaattggaaagtggaagataaaattcaattagttaaaaatgaacaatattgggataagaagaatgtaaaattagataaagtgaactataaagtattaaaagatcaacaagcaggtgcatcgttatatgatactggctcggtcgatgatactatgttaagtatactgcacaagcatctagtccatcagaaggtttag

SEQ ID NO: 2208 - protein, 278 aa, Artificial Sequence
  Description of Artificial Sequence: synthetic amino acid sequence
MKGFKVLIILLSVCIILSACSNKQSLYSDQGQVFRKVITQDMTTLDTALITDAVSGDIAAQAFEGLYTLNKEDKAEPAIAKSFPKKSNGGKTLTINLRKNAKWSNGDSVTAYDFVYAWRKVVNPKTASEFAYIMSDIKNADEVNAGKKSVKDLGIKAIGKYKLQVDLERPVPYINELLALNTFNPQNEKVAKKFGEQYGTTAEKAVYNGPFEVTNWKVEDKIQLVKNEQYWDKKNVKLDKVNYKVLKDQQAGASLYDTGSVDDTMLSILHKHLVHQKV

SEQ ID NO: 2209 - DNA, 630 bp, Artificial Sequence
  Description of Artificial Sequence: synthetic nucleic acid sequence
atgtcttttcttaggaaacacaccgaaattatatttagttatatcatcggtatcgtttcactttttacaggtctcattatttttattaacttacctttaatcaaacaatttaaaggtgacaaaaaggttgatacgcatgtgcataacgtatgggaattcctaaatgccttttttgccgagattataaaagtgatgagtaaatttattggtggctttccaattacaagtgccatagtaatcatcgtatttggtattctagtgatgctgttaggtcacactttatttagaactattaaatacgattatgacatttcaattttctttttagttattggcattatgtactttatcattacattattgctaatgacacaagtgtatggcttttttgctatcgtctttattattccttttacagttcatattggttacatagtttataaagatgagttgaaccaagacaatcgaaagaaccattatatgtggattattgtaacttatggaatgagttatcttattacccaaatttcgctatatggacgtattgacgcaaatgaaattgaatcaattgatattttaagtgtaaatacattcttcattattatgtggttattaggtcagatggctata

SEQ ID NO: 2210 - protein, 210 aa, Artificial Sequence
  Description of Artificial Sequence: synthetic amino acid sequence
MSFLRKHTEIIFSYIIGIVSLFTGLIIFINLPLIKQFKGDKKVDTHVHNVWEFLNAFFAEIIKVMSKFIGGFPITSAIVIIVFGILVMLLGHTLFRTIKYDYDISIFFLVIGIMYFIITLLLMTQVYGFFAIVFIIPFTVHIGYIVYKDELNQDNRKNHYMWIIVTYGMSYLITQISLYGRIDANEIESIDILSVNTFFIIMWLLGQMAI

SEQ ID NO: 2211 - DNA, 369 bp, Artificial Sequence
  Description of Artificial Sequence: synthetic nucleic acid sequence
atgtttccaccatattttatcacgaacagggagtgtaagagcatgacgcgacagagaatcgccattgatatggatgaagtgcttgctgatacattgggtgctgttgttaaagcggtcaatgaacgagcggatttaaatatcaaaatggaatcattaaacggtaaaaaattaaaacatatgatacccgagcatgaggggttagtcatggatattttaaaagaacctggattctttagaaatttagatgtaatgccgcatgctcaagaagttgtaaaacaactcaatgagcattacgacatatacatagccacagcagcgatggatgttccaacctcttttcatgacaaatatgaatggttattcaaatga

SEQ ID NO: 2212 - protein, 122 aa, Artificial Sequence
  Description of Artificial Sequence: synthetic amino acid sequence
MFPPYFITNRECKSMTRQRIAIDMDEVLADTLGAVVKAVNERADLNIKMESLNGKKLKHMIPEHEGLVMDILKEPGFFRNLDVMPHAQEVVKQLNEHYDIYIATAAMDVPTSFHDKYEWLFK

SEQ ID NO: 2213 - DNA, 363 bp, Artificial Sequence
  Description of Artificial Sequence: synthetic nucleic acid sequence
atgactttctattgttttattcccacatcaaagtatttaaaaacttatttatcattaatagcttttataccaggtaattctttaccttctaagtattctaatgatgctcctccaccagtagagatgtgtgtaaagtcatcttcgaaacctaatgaaattgctgctgcggcagagtcaccaccaccaataatagtagtagcgtcttccaatttagcaatagactcacatacaccgattgtacctttagcaaaattactaaattcgaatacacccataggtccattccatactacagtatgtgcaccttgtaattctttattaaataattctactgttttaggtccaatatccattgcttcttga

SEQ ID NO: 2214 - protein, 120 aa, Artificial Sequence
  Description of Artificial Sequence: synthetic amino acid sequence
MTFYCFIPTSKYLKTYLSLIAFIPGNSLPSKYSNDAPPPVEMCVKSSSKPNEIAAAAESPPPIIVVASSNLAIDSHTPIVPLAKLLNSNTPIGPFHTTVCAPCNSLLNNSTVLGPISIAS

SEQ ID NO: 2215 - DNA, 666 bp, Artificial Sequence
  Description of Artificial Sequence: synthetic nucleic acid sequence
atggaaaaagaaattaaatttattggtggcgtagtgaatgatccacaaaaaccagtagttgctattttaggtggcgctaaagtttcagataaaattaatgttatcaaaaatttagttaatatcgcagataaaatcttaatcggtggcggtatggcttatacatttattaaagcgcaaggtaaggaaataggtctttcattattggaagaagacaaaattgattttgctaaagacttgttagagaataatggcgatcaaatagtattacctgtagattgtaaaatcgctaaagaattttctaatgatgcaaaaatcactgaagtatctatcaatgaaatcccttcagatcaagaagcaatggatattggacctaaaacagtagaattatttaataaagaattacaaggtgcacatactgtagtatggaatggacctatgggtgtattcgaatttagtaattttgctaaaggtacaatcggtgtatgtgagtctattgctaaattggaagacgctactactattattggtggtggtgactctgccgcagcagcaatttcattaggtttcgaagatgactttacacacatctctactggtggaggagcatcattagaatacttagaaggtaaagaattacctggtataaaagctattaatgataaataa

SEQ ID NO: 2216 - protein, 221 aa, Artificial Sequence
  Description of Artificial Sequence: synthetic amino acid sequence
MEKEIKFIGGVVNDPQKPVVAILGGAKVSDKINVIKNLVNIADKILIGGGMAYTFIKAQGKEIGLSLLEEDKIDFAKDLLENNGDQIVLPVDCKIAKEFSNDAKITEVSINEIPSDQEAMDIGPKTVELFNKELQGAHTVVWNGPMGVFEFSNFAKGTIGVCESIAKLEDATTIIGGGDSAAAAISLGFEDDFTHISTGGGASLEYLEGKELPGIKAINDK

SEQ ID NO: 2217 - DNA, 762 bp, Artificial Sequence
  Description of Artificial Sequence: synthetic nucleic acid sequence
atgagaacaccaattatagccggaaactggaaaatgaataaaacagttcaagaagctaaagactttgtaaacgaattaccaacattacctgatcctaaagaagtagaatcagttatttgtgcaccaacaatccaattagacgctttagtaacagctgttaaagatggtaaagcaaaagggttaaaaattggagcacaaaacgcttactttgaagaaagcggtgcttatactggagaaacttcaccagtagcattatctgaattaggtgttaaatatgtagtgattggtcactcagagcgtcgtgactatttccacgaaactgacgaagaagtaaacaaaaaagcgcatgctatcttcaatcacggtatgacacctattatttgtgtaggtgaatctgatgaagaacgtgaagctggtaaagcaaataaaatcgtaggtaatcaagtgaaaaaagctgtcgaaggtttatcagatgatcaacttaaagaagttgttattgcatatgaaccaatttgggctatcggtactggtaagtcatctacatctgaagatgcaaatgaaatgtgtgctcacgtacgtcaaacattagctgacttatctagtcaagaggttgctgacgctacacgtattcaatatggtggtagtgttaaacctaataacattaaagaatatatggctcaatcagatatcgatggcgctcttgtaggtggcgcatcattaaaagttgaagatttcgtacaattgttagaaggtgcaaaataa

SEQ ID NO: 2218 - protein, 253 aa, Artificial Sequence
  Description of Artificial Sequence: synthetic amino acid sequence
MRTPIIAGNWKMNKTVQEAKDFVNELPTLPDPKEVESVICAPTIQLDALVTAVKDGKAKGLKIGAQNAYFEESGAYTGETSPVALSELGVKYVVIGHSERRDYFHETDEEVNKKAHAIFNHGMTPIICVGESDEEREAGKANKIVGNQVKKAVEGLSDDQLKEVVIAYEPIWAIGTGKSSTSEDANEMCAHVRQTLADLSSQEVADATRIQYGGSVKPNNIKEYMAQSDIDGALVGGASLKVEDFVQLLEGAK

SEQ ID NO: 2219 - DNA, 1518 bp, Artificial Sequence
  Description of Artificial Sequence: synthetic nucleic acid sequence
atggcaaaacaaccaactgccttaatcatcttagatggtttcgcaaatcgtgaaagtgaacatggcaatgcagttaagcaagcacataaacctaattttgatcgatattatgaaaaatatcctacaacacaaatagaagctagtggcttagatgtaggtcttcctgaaggtcaaatgggtaactctgaagtaggacatatgaatattggtgcaggacgcatcgtatatcaaagtttaactcgtattaataaatcgattgaagacggagaattctttgataacactgtattaaataacgctgttaaacatgttaaagacaatggctctgcgcttcatgtattcggattgctttctgatggtggtgtacacagtcattataagcatctatttgctattttagaattagctaaaaagcaaggaatagataaagtatatgtccacgcatttttagatggtcgtgatgttgatcaaaaatctgctttgaaatatatagaggaaactgaagataaatttaaagaattaggtgtaggccaattcgcttctgtttcaggacgttattatgctatggaccgtgacaagcgttgggatcgtgaggaacgtgcctataatgctattcgtaactttgaaggtcctacatttacttcagctaaagcaggcgttgaagctaattataaaaatgatgtgactgatgaattcgtcgaaccgtttatagttgaaggccaaaacgatggtgtgaacgatggagacgcagtaatcttttataatttccgtccagatagagcagctcaactttcagaaatctttactaataaagcgtttgatggatttaaagttgaacaagtggacaacttattctacgctacattcacgaaatataatgacaatgtagatgctgaaattgtatttgaaaaagttgacttaaataatacaatcggtgaagttgctcaagataatggcttgaaacaattacgtatcgctgaaactgaaaagtatccacatgtaacatactttatgagtggtggacgaaatgaagagtttgaaggagaacgtcgtagactcatcgattctccaaaagtagcgacttatgatttaaaacctgagatgagtgcatatgaagttaaagatgcattattagaagagttagacaaaggtgacttagatttaattctactgaactttgctaacccagatatggttggacatagtggtatgcttgaaccaacaattaaagcaatcgaagcagtagatgagtgtcttggtgaagtcgttgacaaaattattgatatgggtggtcatgccatcatcactgcagaccacggtaactcagatcaagtattaactgatgacgaccaacctatgacgacacacacaactaatcctgttccagttattgtaactaaagaaggtgttacattaagagaaactggacgtttaggcgatttagcgccgacattattagatttattaaatgttaaacaaccatctgaaatgacaggtgaatcactgattaaacattag

SEQ ID NO: 2220 - protein, 505 aa, Artificial Sequence
  Description of Artificial Sequence: synthetic amino acid sequence
MAKQPTALIILDGFANRESEHGNAVKQAHKPNFDRYYEKYPTTQIEASGLDVGLPEGQMGNSEVGHMNIGAGRIVYQSLTRINKSIEDGEFFDNTVLNNAVKHVKDNGSALHVFGLLSDGGVHSHYKHLFAILELAKKQGIDKVYVHAFLDGRDVDQKSALKYIEETEDKFKELGVGQFASVSGRYYAMDRDKRWDREERAYNAIRNFEGPTFTSAKAGVEANYKNDVTDEFVEPFIVEGQNDGVNDGDAVIFYNFRPDRAAQLSEIFTNKAFDGFKVEQVDNLFYATFTKYNDNVDAEIVFEKVDLNNTIGEVAQDNGLKQLRIAETEKYPHVTYFMSGGRNEEFEGERRRLIDSPKVATYDLKPEMSAYEVKDALLEELDKGDLDLILLNFANPDMVGHSGMLEPTIKAIEAVDECLGEVVDKIIDMGGHAIITADHGNSDQVLTDDDQPMTTHTTNPVPVIVTKEGVTLRETGRLGDLAPTLLDLLNVKQPSEMTGESLIKH

SEQ ID NO: 2221 - DNA, 1305 bp, Artificial Sequence
  Description of Artificial Sequence: synthetic nucleic acid sequence
atgccaattattacagatgtttacgctcgcgaagtcttagactcacgtggtaacccaacagttgaagttgaagtattaactgaaagtggtgctttcggacgtgcattagtaccttctggtgcttctactggtgaacatgaagcagttgaattacgtgatggagataaatcacgttatttaggtaaaggtgtgactaaagcggtagaaaatgttaacgaaatgatcgcaccagaaatcgttgaaggtgaattttcagttttagatcaagtatctattgataaaatgatgattcaattagacggtacacacaacaaaggtaaattaggtgcaaatgccattttaggtgtttctattgccgtagctcgtgcagctgctgacttattaggtcaaccattatataaatatttaggtggatttaatggtaaacaattgccagtacctatgatgaatattgttaatggtggttctcactcagatgcaccaattgctttccaagagttcatgattttacctgtaggtgctgagtcattcaaagaatcattacgttggggtgcagaaatcttccataaccttaaatcaatcttaagtgaacgcggtttagaaactgcagtaggtgatgaaggtggtttcgcacctagatttgaaggcactgaagacgctgtagaaactattattaaagctatcgaaaaagcaggatacaaaccaggtgaagatgtattcttaggatttgactgtgcttcttctgaattctatgaaaatggtgtttatgattacactaaattcgaaggtgaacacggtgctaaacgtagtgcagcagagcaagttgactacttagaagaattaattggtaaatatccaatcatcactattgaagatggtatggatgaaaacgattgggaaggttggaaacaattaactgatcgtatcggtgataaagttcaattagttggtgatgatttattcgtaactaacactgaaattttatctaaaggtatcgaacaaggtattggtaactcaatcttaatcaaagtaaaccaaatcggtacattaactgaaacattcgatgctattgaaatggctcaaaaagctggatatactgcggttgtatctcaccgttctggtgaaactgaagatactacaattgctgatatcgcagttgctacaaatgcaggccaaattaaaacaggttcattatctagaactgaccgtattgctaaatacaatcaattattacgtattgaagatgaattatacgaaacagctaaatttgaaggaattaaatctttctacaatttagataaataa

SEQ ID NO: 2222 - protein, 434 aa, Artificial Sequence
  Description of Artificial Sequence: synthetic amino acid sequence
MPIITDVYAREVLDSRGNPTVEVEVLTESGAFGRALVPSGASTGEHEAVELRDGDKSRYLGKGVTKAVENVNEMIAPEIVEGEFSVLDQVSIDKMMIQLDGTHNKGKLGANAILGVSIAVARAAADLLGQPLYKYLGGFNGKQLPVPMMNIVNGGSHSDAPIAFQEFMILPVGAESFKESLRWGAEIFHNLKSILSERGLETAVGDEGGFAPRFEGTEDAVETIIKAIEKAGYKPGEDVFLGFDCASSEFYENGVYDYTKFEGEHGAKRSAAEQVDYLEELIGKYPIITIEDGMDENDWEGWKQLTDRIGDKVQLVGDDLFVTNTEILSKGIEQGIGNSILIKVNQIGTLTETFDAIEMAQKAGYTAVVSHRSGETEDTTIADIAVATNAGQIKTGSLSRTDRIAKYNQLLRIEDELYETAKFEGIKSFYNLDK

SEQ ID NO: 2223 - DNA, 459 bp, Artificial Sequence; identical to SEQ ID NO: 1487
  Description of Artificial Sequence: synthetic nucleic acid sequence

SEQ ID NO: 2224 - protein, 152 aa, Artificial Sequence; identical to SEQ ID NO: 1488
  Description of Artificial Sequence: synthetic amino acid sequence

SEQ ID NO: 2225 - DNA, 564 bp, Artificial Sequence
  Description of Artificial Sequence: synthetic nucleic acid sequence
atgcatacattaatcatcgttttattaattatagattgtattgcattagtgactgttgtattactccaagaaggtaaaagtaatggactttcaggtgctattagtggtggcgctgaacaattgtttggtaaacaaaaacaacgtggcgtcgatttattcttgcatagattaacaatacgtacgttattacttacattcttctatcgtttcatgagacctttaattgaagcgggctacgtttatattgctcagccgcctttatataaactaacacaaggaaaacaaaaatattatgtatttaacgatagagaactagacaagttgaaacaagaattaaacccgtcaccaaaatggtcaattgcacgttacaaaggtcttggtgaaatgaacgcagaccaattatgggaaacgactatgaatcctgaacatcgctctatgttgcaagtgagacttgaagatgcaattgatgcagaccaaacatttgaaatgttaatgggcgatgtagtagaaaatcgcagacaatttatcgaagacaatgcagtttatgccaacctagatttctag

SEQ ID NO: 2226 - protein, 187 aa, Artificial Sequence
  Description of Artificial Sequence: synthetic amino acid sequence
MHTLIIVLLIIDCIALVTVVLLQEGKSNGLSGAISGGAEQLFGKQKQRGVDLFLHRLTIRTLLLTFFYRFMRPLIEAGYVYIAQPPLYKLTQGKQKYYVFNDRELDKLKQELNPSPKWSIARYKGLGEMNADQLWETTMNPEHRSMLQVRLEDAIDADQTFEMLMGDVVENRRQFIEDNAVYANLDF

SEQ ID NO: 2227 - DNA, 1110 bp, Artificial Sequence
  Description of Artificial Sequence: synthetic nucleic acid sequence
atggctgaattacctcaatcaagaattaatgaacgaaatataaccagtgaaatgcgtgaatcattcttagactatgctatgagtgttatcgtttctcgtgcattacctgatgttagagacggattaaagccagtacatcgtcgtattctttatggtttaaatgaacaaggtatgacgcccgataaaccttataagaaatctgcacgtatagtcggggatgtcatgggtaaatatcaccctcatggtgattcttcaatttatgaagcaatggtaagaatggcccaagactttagttatcgttatccacttgtagatggtcaaggtaactttggctctatggatggtgacggtgcagctgcaatgcgttataccgaagcacgtatgactaaaataacattagaacttttacgtgatattaacaaagacacaattgattttattgacaactatgatggtaatgaaagagagccgtcagtcttacctgcacgtttccctaacttactagtaaatggtgcggcaggaattgccgtaggtatggctacaaatattcctccccacaatttaactgaagttattgatggtgtgctcagtttaagtaagaatccagacatcacaattaatgagctgatggaagacatacaaggtcctgattttcctacagctggtttagtactagggaaaagtggtattcgtcgagcttatgaaacaggtcgtgggtcaattcaaatgcgttctcgtgctgaaatagaagaacgtggtggtggccgtcaacgtattgtcgtaacggaaatacctttccaagtcaataaagcgcgtatgattgaaaaaatcgcagagttagttagagataagaaaatcgacggtattacagatttacgtgatgaaacaagtttgcgtacaggtgtaagagtagttattgatgtacgtaaagatgcaaatgcgagtgttattttaaataatttatataaacaaacgccattacaaacatcatttggtgtgaatatgattgctttagtgaatggtagacctaaactaatcaatttaaaagaagcacttatccattacttagaacaccaaaaaacagtggttagacgacgtactgaatataat

SEQ ID NO: 2228 - protein, 370 aa, Artificial Sequence
  Description of Artificial Sequence: synthetic amino acid sequence
MAELPQSRINERNITSEMRESFLDYAMSVIVSRALPDVRDGLKPVHRRILYGLNEQGMTPDKPYKKSARIVGDVMGKYHPHGDSSIYEAMVRMAQDFSYRYPLVDGQGNFGSMDGDGAAAMRYTEARMTKITLELLRDINKDTIDFIDNYDGNEREPSVLPARFPNLLVNGAAGIAVGMATNIPPHNLTEVIDGVLSLSKNPDITINELMEDIQGPDFPTAGLVLGKSGIRRAYETGRGSIQMRSRAEIEERGGGRQRIVVTEIPFQVNKARMIEKIAELVRDKKIDGITDLRDETSLRTGVRVVIDVRKDANASVILNNLYKQTPLQTSFGVNMIALVNGRPKLINLKEALIHYLEHQKTVVRRRTEYN

SEQ ID NO: 2229 - DNA, 570 bp, Artificial Sequence
  Description of Artificial Sequence: synthetic nucleic acid sequence
atgcttaattctacaatcaaatatgacactaagaagaaaaaactacctaaatttagtaaaggtactaaaaagaaagacggtatattagatgttattagctctggtgtaaaaaatgatgttaataaagtaaaagacattggtggtaaagcaagagacataggtggtactacgtttgacaaagcaaaagacataggtacaaaagcacttgataaagctaaagatgtgtctagcactgttatcaagggtattggagatgtttttgattatgtaggtcatcctatgaaattggtaaataaagtctttgagaaagttggttttaacctagactttatgaaaaatgcaccattaccatttgatttaatgacagctatgattaagaaacttaaaaatggtattaaagacttctttaatgaaggtttagactctgcaggcggtggagatggttcttcgttcactaaattcccaattactacggggtattatcctaatggtggtgctcctggttatagttttaatggtggtgctcactttggtattgactatggcgctccatatggtacaactatcaat

SEQ ID NO: 2230 - protein, 190 aa, Artificial Sequence
  Description of Artificial Sequence: synthetic amino acid sequence
MLNSTIKYDTKKKKLPKFSKGTKKKDGILDVISSGVKNDVNKVKDIGGKARDIGGTTFDKAKDIGTKALDKAKDVSSTVIKGIGDVFDYVGHPMKLVNKVFEKVGFNLDFMKNAPLPFDLMTAMIKKLKNGIKDFFNEGLDSAGGGDGSSFTKFPITTGYYPNGGAPGYSFNGGAHFGIDYGAPYGTTIN

SEQ ID NO: 2231 - DNA, 315 bp, Artificial Sequence
  Description of Artificial Sequence: synthetic nucleic acid sequence
gtgctagacacatctttagctttatcaagtgcttttgtacctatgtcttttgctttgtcaaacgtagtaccacctatgtctcttgctttaccaccaatgtcttttactttattaacatcattttttacaccagagctaataacatctaatataccgtctttctttttagtacctttactaaatttaggtagttttttcttcttagtgtcatatttgattgtagaattaagcattatcaaggtcgcattcaatcaggtgagaagattaaatatactaaataatatattaggtgattcgttatgcaaatattattag

SEQ ID NO: 2232 - protein, 104 aa, Artificial Sequence
  Description of Artificial Sequence: synthetic amino acid sequence
VLDTSLALSSAFVPMSFALSNVVPPMSLALPPMSFTLLTSFFTPELITSNIPSFFLVPLLNLGSFFFLVSYLIVELSIIKVAFNQVRRLNILNNILGDSLCKYY

SEQ ID NO: 2233 - DNA, 426 bp, Artificial Sequence; identical to SEQ ID NO: 685
  Description of Artificial Sequence: synthetic nucleic acid sequence

SEQ ID NO: 2234 - protein, 141 aa, Artificial Sequence; identical to SEQ ID NO: 686
  Description of Artificial Sequence: synthetic amino acid sequence

SEQ ID NO: 2235 - DNA, 630 bp, Artificial Sequence; identical to SEQ ID NO: 687
  Description of Artificial Sequence: synthetic nucleic acid sequence

SEQ ID NO: 2236 - protein, 209 aa, Artificial Sequence; identical to SEQ ID NO: 688
  Description of Artificial Sequence: synthetic amino acid sequence

SEQ ID NO: 2237 - DNA, 444 bp, Artificial Sequence
  Description of Artificial Sequence: synthetic nucleic acid sequence
atgcttccactatcagttcaaaagttagataaacaaataatgcatgaacgttatcaacgtatagtagaagctttgaacattagtgatattagtgataaatatccatcagagttgtcaggtggacagcgtcaacgtacctcagcagcaagggcatttattaatttaccttcaattatatttgctgatgagcctacaggtgctttagattctaaaagtacactagatttacttaagcgtcttaaatatatgaatgaggaatttaacacaaccatacttatggtgacacatgatccagtagcggctagtttttcaaaccgtgttgtgatgttaaaggatggacaaatctttactgagttgtatcaaggtgatgatgataaacaaacgttttataaagaaattataagaacgcaaagtgtacttggtggcatcaattatgagctttaa

SEQ ID NO: 2238 - protein, 147 aa, Artificial Sequence
  Description of Artificial Sequence: synthetic amino acid sequence
MLPLSVQKLDKQIMHERYQRIVEALNISDISDKYPSELSGGQRQRTSAARAFINLPSIIFADEPTGALDSKSTLDLLKRLKYMNEEFNTTILMVTHDPVAASFSNRVVMLKDGQIFTELYQGDDDKQTFYKEIIRTQSVLGGINYEL

SEQ ID NO: 2239 - DNA, 420 bp, Artificial Sequence
  Description of Artificial Sequence: synthetic nucleic acid sequence
gtggtctttttgctttatgctaattttttatttttgaaaagacgaggtcgtgaactatcgttattacaaattattggtctaacaaagaaagatatcatgaaaatgattatgttggagcaattgatgacatttatgatgacaactattgtaggtatcatattgggaatctttggttcgaaaattttactcatgattgtattgcgattattaggaatcaacgtgagtgtttctattatatttaattatcatgccattttagaaacgttattattaatagctgtgtcatatgtacttatagtctttcaaagctatgtatatttacttaaacgttctattaaagagttagcgtctgatgtaaataaaaaagagttcagtcatacacgcacaacacttggtgaagttgtattaggtttcttataa

SEQ ID NO: 2240 - protein, 139 aa, Artificial Sequence
  Description of Artificial Sequence: synthetic amino acid sequence
VVFLLYANFLFLKRRGRELSLLQIIGLTKKDIMKMIMLEQLMTFMMTTIVGIILGIFGSKILLMIVLRLLGINVSVSIIFNYHAILETLLLIAVSYVLIVFQSYVYLLKRSIKELASDVNKKEFSHTRTTLGEVVLGFL

SEQ ID NO: 2241 - DNA, 1407 bp, Artificial Sequence
  Description of Artificial Sequence: synthetic nucleic acid sequence
atggatattgtatacaaaaaggtgaatgctcaaattacgccagaagctttagcaaaattaaaacaaaaaaagatcatttttgaaagtacaaatcaacagaaacttaaaggtaggtactcgatagtagtattcgatcattatggcaaaattacattagataattctcaacttttaattaagttagacaatcattgtgaaatagttaagaatcaaccgtatcaacgacttaaggaatttgtagataaatattattttgaaatcaaagataaatatttaaaagatttaccttttatttcgggctttatagggacatgtagctttgatttagtacgacatgaatttaaaaaattacaagatattaaattagaagatcatcaaactcatgatgtccaattttatctagtggaagatgtatttgtttttgatcattataaagatgaattatatattatcgcaagtaacttattttcttatagaacaaaagagagattaaaggaatctattgaacgtaaaattgaagatttaaaaaacatacatttttcggttgaggatataaattataaatccatccctcgacatataaccaccaatatatcagagcaacaatttgttcaaactattagaattttaaaaaagaaaattactgaaggagatatgtttcaagtagttccttcaagaatttatagttataaacaccattttcaacacaatttacatcaattaacttttcagttatatcaaaatttaaagcgacaaaatcctagtccatatatgtattatattaataaagatgtaccgattgtaataggaagttctcctgaaagttttgtaaaggtaaaagatggaaaagtttatacgaatcctatagctggaacaattaaaagaggtcaaaataaaaaagaagatgaaaataatgaaaagacattaatgaaagatgaaaaggaattgagtgaacatcgtatgctcgtagatttaggaagaaatgatattcatcgaataagtaaaacaggcacttcacaaattaccaaactaatgacaatagaacgttatgaacatgtcatgcatatcgttagtgaagttattggagaattaaaaccccatctatctcctatgagcgtcatcgcaagtttgctaccaacgggtactgtctcaggtgcacctaaacttagagctatacagagaatatacgaatcttatccttataaaagaggtatctatagcggtggtgttgggtatatcaactgtaatcatcatttagattttgcattggctatacgtaccatgattatcgatgaggaaaaagtcagtgtcgaggcaggatgtggagtagtatatgattctattccagagaaagaacttgaagaaacaaaacttaaagctaaaagtttattggaggtaactccatga

SEQ ID NO: 2242 - protein, 468 aa, Artificial Sequence
  Description of Artificial Sequence: synthetic amino acid sequence
MDIVYKKVNAQITPEALAKLKQKKIIFESTNQQKLKGRYSIVVFDHYGKITLDNSQLLIKLDNHCEIVKNQPYQRLKEFVDKYYFEIKDKYLKDLPFISGFIGTCSFDLVRHEFKKLQDIKLEDHQTHDVQFYLVEDVFVFDHYKDELYIIASNLFSYRTKERLKESIERKIEDLKNIHFSVEDINYKSIPRHITTNISEQQFVQTIRILKKKITEGDMFQVVPSRIYSYKHHFQHNLHQLTFQLYQNLKRQNPSPYMYYINKDVPIVIGSSPESFVKVKDGKVYTNPIAGTIKRGQNKKEDENNEKTLMKDEKELSEHRMLVDLGRNDIHRISKTGTSQITKLMTIERYEHVMHIVSEVIGELKPHLSPMSVIASLLPTGTVSGAPKLRAIQRIYESYPYKRGIYSGGVGYINCNHHLDFALAIRTMIIDEEKVSVEAGCGVVYDSIPEKELEETKLKAKSLLEVTP

SEQ ID NO: 2243 - DNA, 996 bp, Artificial Sequence; identical to SEQ ID NO: 873
  Description of Artificial Sequence: synthetic nucleic acid sequence

SEQ ID NO: 2244 - protein, 331 aa, Artificial Sequence; identical to SEQ ID NO: 874
  Description of Artificial Sequence: synthetic amino acid sequence

SEQ ID NO: 2245 - DNA, 378 bp, Artificial Sequence
  Description of Artificial Sequence: synthetic nucleic acid sequence
atgactattttaaatgaaattattgagtataaaaaaactttgcttgagcgtaaatactatgataaaaaacttgaaattttacaagataacggaaatgttaagaggagaaagctgattgattcacttaactatgatagaacattatcagttattgctgaaataaaatcgaaaagcccatctgtacctcaattaccgcaacgtgatcttgttcaacaagttaaagattatcaaaaatatggtgctaatgctatttcaatattaactgatgaaaaatactttggcggtagttttgaacgattaaatcagttatcaaagataactgaacgtttaaccttttgtacctcatcagcttgctcttcgacgcccatattcttatga

SEQ ID NO: 2246 - protein, 125 aa, Artificial Sequence
  Description of Artificial Sequence: synthetic amino acid sequence
MTILNEIIEYKKTLLERKYYDKKLEILQDNGNVKRRKLIDSLNYDRTLSVIAEIKSKSPSVPQLPQRDLVQQVKDYQKYGANAISILTDEKYFGGSFERLNQLSKITERLTFCTSSACSSTPIFL

SEQ ID NO: 2247 - DNA, 300 bp, Artificial Sequence
  Description of Artificial Sequence: synthetic nucleic acid sequence
atggaccatattccacaagtagttatttttaataaaaaagacttatgtaacgaacagatggatgtacctgtatctaaatctgcgcatgtttttgtatctagtcgtgatgaaaatgataaacaaaaggtgaaaaatttagtaattcaagaaataaaaaatagtctcagcccatacgaagaaattgtagatagtgctgatgcagatagattatattttcttaaacaacacacgcttgttactgaattaatatttgacgaaacacaagcatcttatcgtatcaaaggatttaaaaaattataa

SEQ ID NO: 2248 - protein, 99 aa, Artificial Sequence
  Description of Artificial Sequence: synthetic amino acid sequence
MDHIPQVVIFNKKDLCNEQMDVPVSKSAHVFVSSRDENDKQKVKNLVIQEIKNSLSPYEEIVDSADADRLYFLKQHTLVTELIFDETQASYRIKGFKKL

SEQ ID NO: 2249 - DNA, 1341 bp, Artificial Sequence
  Description of Artificial Sequence: synthetic nucleic acid sequence
atgccaaaacgtagttttacaaaagatgatattcgtaaatttgctgaagaagaaaacgtaagatatttaagattacaattcactgatattttagggactattaaaaatgttgaagttccagtaagtcaattagaaaaagtattagataatgaaatgatgtttgatggttcatctattgaaggtttcgttcgtatcgaagaatcagatatgtatttacatcctgatttagatacttgggttatcttcccttggactgctggacaaggaaaagttgcacgactaatctgtgatgtatttaaaacagatggtacaccatttgaaggtgatccacgagctaacttgaagcgtgtattaagaagaatggaagatatgggctttactgattttaatctagggcctgaaccagaatttttcttatttaaattagacgaaaaaggcgaacctacattagaattaaacgatgatggtggttatttcgatttagctcctacagatttaggtgaaaattgtcgccgtgacatcgttttagaattagaagatatgggctttgacattgaagcaagccaccatgaagtagcgccaggtcaacatgaaattgactttaaatatgcagatgccgttacagcatgtgataatatccaaacatttaaactagttgttaaaacaattgcacgtaagcataatttacatgcaacatttatgccaaaaccattatttggtgtaaacggtagtggtatgcacttcaacgtatcactatttaaaggaaaagagaatgcgttctttgatcctgaaggtgatttacaattgactgatactgcatatcaatttacagctggtgtccttaaaaacgctagaggattcactgcagtatgtaatccaattgtcaactcatataaacgtcttgtaccaggttacgaagcaccatgttatattgcatggagtggtaaaaaccgttcacctttagtacgtgttccaacatctagaggtctatcaactcgtattgaagtacgctcagttgaccctgcagctaacccgtacatggcattagcagcaatcttagaagcagggttagatggaattgagaataaacttgaggttccagaacctgtaaaccaaaatatctacgaaatgaatcgtgaagaacgagaagcggttggtatccaagacttaccttcaactttatacactgcgttaaaagcaatgcgtgaaaataaatcaattaaaaacgcattaggtaatcatatttacaatcaatttattaactcaaaatcgattgaatgggattactatagaactcaagtatccgaatgggaaagagaacagtatattaagcaatactaa

SEQ ID NO: 2250 - protein, 446 aa, Artificial Sequence
  Description of Artificial Sequence: synthetic amino acid sequence
MPKRSFTKDDIRKFAEEENVRYLRLQFTDILGTIKNVEVPVSQLEKVLDNEMMFDGSSIEGFVRIEESDMYLHPDLDTWVIFPWTAGQGKVARLICDVFKTDGTPFEGDPRANLKRVLRRMEDMGFTDFNLGPEPEFFLFKLDEKGEPTLELNDDGGYFDLAPTDLGENCRRDIVLELEDMGFDIEASHHEVAPGQHEIDFKYADAVTACDNIQTFKLVVKTIARKHNLHATFMPKPLFGVNGSGMHFNVSLFKGKENAFFDPEGDLQLTDTAYQFTAGVLKNARGFTAVCNPIVNSYKRLVPGYEAPCYIAWSGKNRSPLVRVPTSRGLSTRIEVRSVDPAANPYMALAAILEAGLDGIENKLEVPEPVNQNIYEMNREEREAVGIQDLPSTLYTALKAMRENKSIKNALGNHIYNQFINSKSIEWDYYRTQVSEWEREQYIKQY

SEQ ID NO: 2251 - DNA, 345 bp, Artificial Sequence
  Description of Artificial Sequence: synthetic nucleic acid sequence
atgaataaagaccaaaagaatcaatatgagttggaaaagctgttaaaagaaaatgaagaactaaaagcagaaaaagctttatctcaaatgaagaatgagactcgttcaatgcttaatgagtcaggtttagaaaacttcgatgatcaaattgttaatatattagtaaatactgatgctgaaaaaacaaggaaaaatgttgaatcatttactaacttacttaatcaaatggtaaaatcaaatgttgaaaaagcattaagacaagactcaccagtaagcactcaatcaaataaaatgacaaaagatgaagaatcagattatcttgtttcagggagaaaatgtctataa

SEQ ID NO: 2252 - protein, 114 aa, Artificial Sequence
  Description of Artificial Sequence: synthetic amino acid sequence
MNKDQKNQYELEKLLKENEELKAEKALSQMKNETRSMLNESGLENFDDQIVNILVNTDAEKTRKNVESFTNLLNQMVKSNVEKALRQDSPVSTQSNKMTKDEESDYLVSGRKCL

SEQ ID NO: 2253 - DNA, 345 bp, Artificial Sequence
  Description of Artificial Sequence: synthetic nucleic acid sequence
atgctaattattttaattttactagcattaagttttggtttaattcctatttctattaacttgcctatattaggtttaattccctttattttatggggagctatgggatgggctacacaagctcctcaacaacatatattattgaaaaaacatcctgaatatggaggctctgctgtcgctttaaatagttctattaattatttaggcagtgctatgggatcagcaatcggaggaattattttatttaatgctaatagtacaaatgtactaatatatagtgctttaggaattactattattggtattttattacaattactaaatttatccctagaaaaaaattaa

SEQ ID NO: 2254 - protein, 114 aa, Artificial Sequence
  Description of Artificial Sequence: synthetic amino acid sequence
MLIILILLALSFGLIPISINLPILGLIPFILWGAMGWATQAPQQHILLKKHPEYGGSAVALNSSINYLGSAMGSAIGGIILFNANSTNVLIYSALGITIIGILLQLLNLSLEKN

SEQ ID NO: 2255 - DNA, 405 bp, Artificial Sequence
  Description of Artificial Sequence: synthetic nucleic acid sequence
atggaaaaatcaacgcagacagacaaacaaaactctgtgaacttaaagcaaaacacaaaagatcaaaataataacgcaaatgatgaagcagcttctccaactagcgaacaaaatgcagctatagcacaagcaaagtcatatgcaaatacattacctatctctaagaaaagtttatacaaacaattaacttcggaatacggagagaaatatccggcagacatagcacagtatgctgttgaccatatcagtgtagattataaaatgaatgcactgagattagcaaaaagttacgtaaaaaatataaacatttctaatcaagcgttatatgatcaactcgtttcagaaaatggagaaggatttactcctgaagaagcacaatatgcaatgaatcatttagataggtaa

SEQ ID NO: 2256 - protein, 134 aa, Artificial Sequence
  Description of Artificial Sequence: synthetic amino acid sequence
MEKSTQTDKQNSVNLKQNTKDQNNNANDEAASPTSEQNAAIAQAKSYANTLPISKKSLYKQLTSEYGEKYPADIAQYAVDHISVDYKMNALRLAKSYVKNINISNQALYDQLVSENGEGFTPEEAQYAMNHLDR

SEQ ID NO: 2257 - DNA, 648 bp, Artificial Sequence; identical to SEQ ID NO: 595
  Description of Artificial Sequence: synthetic nucleic acid sequence

SEQ ID NO: 2258 - protein, 215 aa, Artificial Sequence; identical to SEQ ID NO: 596
  Description of Artificial Sequence: synthetic amino acid sequence

SEQ ID NO: 2259 - DNA, 1131 bp, Artificial Sequence; identical to SEQ ID NO: 489
  Description of Artificial Sequence: synthetic nucleic acid sequence

SEQ ID NO: 2260 - protein, 376 aa, Artificial Sequence; identical to SEQ ID NO: 490
  Description of Artificial Sequence: synthetic amino acid sequence

SEQ ID NO: 2261 - DNA, 651 bp, Artificial Sequence; identical to SEQ ID NO: 1125
  Description of Artificial Sequence: synthetic nucleic acid sequence

SEQ ID NO: 2262 - protein, 216 aa, Artificial Sequence; identical to SEQ ID NO: 1126
  Description of Artificial Sequence: synthetic amino acid sequence

SEQ ID NO: 2263 - DNA, 492 bp, Artificial Sequence
  Description of Artificial Sequence: synthetic nucleic acid sequence
atgccactttttgtgacagattatttaaatgaaaaggaaagatatgtaggctatttagcaagtttatgtgcaggtttagaagtgccgtttatggttatattaggtatattatcagctaaattgccaactcgaactttattgataattggttctgtatttggtggcgcattttactttagtattggtgtatttaaaaattttcatatgatgcttgttggacaaatatgtttagccatctttctagcaatattactaggtcttgggattagttattttcaagatattcttcctgattttccaggttatgcatcaacactttttgccaatgccatggtaataggacaacttggtggtaatttgctaggtggtgtgatgagtcattgggttggtttggaaaatgtattctttgtctcagcaagttctatcttcgtagggatgatactcatcttgtttacgaaagatcaaaaaattacaatagaagatgtggagtag

SEQ ID NO: 2264 - protein, 163 aa, Artificial Sequence
  Description of Artificial Sequence: synthetic amino acid sequence
MPLFVTDYLNEKERYVGYLASLCAGLEVPFMVILGILSAKLPTRTLLIIGSVFGGAFYFSIGVFKNFHMMLVGQICLAIFLAILLGLGISYFQDILPDFPGYASTLFANAMVIGQLGGNLLGGVMSHWVGLENVFFVSASSIFVGMILILFTKDQKITIEDVE

SEQ ID NO: 2265 - DNA, 489 bp, Artificial Sequence
  Description of Artificial Sequence: synthetic nucleic acid sequence
atgacagcgatattatggattttaattattatagcctttgcgttagcatttattggtttaattaaaccggtgataccatcacttttaatgttatggattggttttttaatttatcaatttggttttcatgagggaagattatcgtggattttttatgttgcaatgattatctttaccattatgatattagtagccgattttgtgatgaataaatatttcgtcaatcgctttggaggaagtaaaataggtgaatacacagcgctcataggtgtgattgtaggttgtttcgtttttcctccctttggtattatcattattccttttgttgctgtgttcattgttgaattggttcaagggtttaactttcaacaagctataaaggtgagttttggctcagtgattgcatttttagcgagtacaattgctcaaggtctaataatgattgtaatggttatttggttctttttagatgtctttctaataaattaa

SEQ ID NO: 2266 - protein, 162 aa, Artificial Sequence
  Description of Artificial Sequence: synthetic amino acid sequence
MTAILWILIIIAFALAFIGLIKPVIPSLLMLWIGFLIYQFGFHEGRLSWIFYVAMIIFTIMILVADFVMNKYFVNRFGGSKIGEYTALIGVIVGCFVFPPFGIIIIPFVAVFIVELVQGFNFQQAIKVSFGSVIAFLASTIAQGLIMIVMVIWFFLDVFLIN

SEQ ID NO: 2267 - DNA, 423 bp, Artificial Sequence
  Description of Artificial Sequence: synthetic nucleic acid sequence
atgagaaaatggttaaccttactattaattacaacattggtgttaactgcatgtggtaaaagtaacgaaaaagcttctttagaaaaaagcattgatcagttgaaaaaagaaaataaggatttaaaaaaacagaagaaaaagttacaagagcaaaaggataagcttaaacacaaacaggatagtctccaagaagatgtaaatgacttgcctgctaaaagcacatcccgagataagaaaaataaagataatcatgatgcaaaagaaaagtcttcagataatcaatcgacatctgctaatcatgatgatcaaactaacaaaataaaaagcaatcaagatgaacatgacagtcaatcctctaaaccacatacacagcagaagccctcacagaatgatagaaaaaataatcatcgacaagaacgatag

SEQ ID NO: 2268 - protein, 140 aa, Artificial Sequence
  Description of Artificial Sequence: synthetic amino acid sequence
MRKWLTLLLITTLVLTACGKSNEKASLEKSIDQLKKENKDLKKQKKKLQEQKDKLKHKQDSLQEDVNDLPAKSTSRDKKNKDNHDAKEKSSDNQSTSANHDDQTNKIKSNQDEHDSQSSKPHTQQKPSQNDRKNNHRQER

SEQ ID NO: 2269 - DNA, 522 bp, Artificial Sequence; identical to SEQ ID NO: 1015
  Description of Artificial Sequence: synthetic nucleic acid sequence

SEQ ID NO: 2270 - protein, 173 aa, Artificial Sequence; identical to SEQ ID NO: 1016
  Description of Artificial Sequence: synthetic amino acid sequence

SEQ ID NO: 2271 - DNA, 381 bp, Artificial Sequence
  Description of Artificial Sequence: synthetic nucleic acid sequence
atgcaccagcttgtccatactgacgataatgcaataaatgtagatgtattaccaccacaacaagctgacggtaaagcgactaatccagaacaattatttgctgcaggttacgcttcatgctttaatggtgcatttgatttaattttaaaacaaaataaagtgcgcgatgctgaacctgaagtaacgttaacggtacgcttggaagacgatccagatgccgaaagcccaaaacttagcgttgatattcatgcaaaagttaaaaatgttttatcacaagaagatgctgaaaaatatttacaagatgcgcacgacttttgtccgtattcaaaagctacacgtggcaatatcgatgtaaacttaaatgttgaagtagtagaataa

SEQ ID NO: 2272 - protein, 126 aa, Artificial Sequence
  Description of Artificial Sequence: synthetic amino acid sequence
MHQLVHTDDNAINVDVLPPQQADGKATNPEQLFAAGYASCFNGAFDLILKQNKVRDAEPEVTLTVRLEDDPDAESPKLSVDIHAKVKNVLSQEDAEKYLQDAHDFCPYSKATRGNIDVNLNVEVVE

SEQ ID NO: 2273 - DNA, 813 bp, Artificial Sequence
  Description of Artificial Sequence: synthetic nucleic acid sequence
atggatgataaatatccgttttatcttgacccaatgcctaatctatatttcacacgtgatcctcaagcttcaattggtagaggtatgacagtaaatcgtatgttttggagagcgagacgcagagaatcgattttcatttcatatattttaaaacatcatcctagatttaaagatgagaatattcctttatgggtggatcgtgactgtccgttcaacatcgaaggtggagacgaactggtgttatctaaagatgtacttgcaatagggatatctgaacgtacttctgcacaagcaattgaacgtttagcacgacgtatttttaaagatccgttatctacttttaaaaaggtggtggcgattgagattccaactagtcgaacatttatgcacttagatactgtttgtacaatgattgattacgacaaattcactacacattcagcaattcttaaatcagaaggaaacatgaatatctttattatcgaatatgatgataaagctgaagatatcaaaatccaacattctagtcatcttaaacaaacattagaagaagtgctcgatgttgatgaaatcacattaataccaactggaaatggtgatatcatcgacggtgctcgtgaacaatggaatgatggttcgaatactttatgcatacgtcccggtgtggttgtaacttatgatcgtaattatgtttctaatcaattgttacgtgagcatggtatcaaagttattgaaattcctggaagtgaacttgtacgtggtcgaggaggccctcgatgtatgagtcaacctttaataagagaagatctatag

SEQ ID NO: 2274 - protein, 270 aa, Artificial Sequence
  Description of Artificial Sequence: synthetic amino acid sequence
MDDKYPFYLDPMPNLYFTRDPQASIGRGMTVNRMFWRARRRESIFISYILKHHPRFKDENIPLWVDRDCPFNIEGGDELVLSKDVLAIGISERTSAQAIERLARRIFKDPLSTFKKVVAIEIPTSRTFMHLDTVCTMIDYDKFTTHSAILKSEGNMNIFIIEYDDKAEDIKIQHSSHLKQTLEEVLDVDEITLIPTGNGDIIDGAREQWNDGSNTLCIRPGVVVTYDRNYVSNQLLREHGIKVIEIPGSELVRGRGGPRCMSQPLIREDL

SEQ ID NO: 2275 - DNA, 606 bp, Artificial Sequence
  Description of Artificial Sequence: synthetic nucleic acid sequence
atgaaaggggcgcatcccatgaaaaacatcaagaaaccctttgatttaaaaggtaagtcattgctaaaagagtatgatcttacaggtgaagaatttgaaggtctaatcgattttgctatgacattaaaaaaatataaacaacaaggcacaccacatcgatatttagagggtaagaatattgctttactcttcgaaaagacatctactcggacgcgtgccgcatttacagttgcatctattgatctaggtgcacaccctgaatttttagggaaaaatgatattcaattaggaaaaaaagaatctgttgaggatactgctaaagttttaggcagaatgtttgatggaattgaatttagaggtttttcccaaaaaactgttgaacaattggccgaattctctggagtaccagtatggaatgggttaactgatgattggcatcctacacaaatgttagctgattatatgacaattaaagaaaattttggatatttaaaaggcatcaacctaacttatgtaggaaacggacgtaataatgttgcacattcgcttatggtggcggtgctttcaatattcaatctgatatgggaggccacgctggaggattag

SEQ ID NO: 2276 - protein, 201 aa, Artificial Sequence
  Description of Artificial Sequence: synthetic amino acid sequence
MKGAHPMKNIKKPFDLKGKSLLKEYDLTGEEFEGLIDFAMTLKKYKQQGTPHRYLEGKNIALLFEKTSTRTRAAFTVASIDLGAHPEFLGKNDIQLGKKESVEDTAKVLGRMFDGIEFRGFSQKTVEQLAEFSGVPVWNGLTDDWHPTQMLADYMTIKENFGYLKGINLTYVGNGRNNVAHSLMVAVLSIFNLIWEATLED

SEQ ID NO: 2277 - DNA, 1011 bp, Artificial Sequence
  Description of Artificial Sequence: synthetic nucleic acid sequence
gtggcatcaatattattgtggagtgtgcactttttaatattaaaaggagttgagacggctgctttaatcaatagtattgtcactattacaaaattaattcctatcttattagtgattatatgtatgattgtagcctttaattttaatacattcaagataggtttctttggaatggatggatatggatcattatcatttcatttcgctaatacgatgtcacaagttaaaagtacgatgttagtgacagtttgggtatttattggtattgaaggtgctgttgtattctccggaagagctaaaaataaaaaagatgttggaactgccactgttatcggacttatttcagtattgctcatttacttcttgctgactgtattagcacaaggtattgtaattcaaaatcatatttctaaacttgaggcaccatcaatggcacaaattttagcttatattgttggtgattggggagcaacatttgtcaatattggtcttattatttcagtattaggtgcatggctaggttggacattacttgccggagagttgccttttattgtagctaaagatggtttgtttcctaagtggtttgcaaaagaaaataaaaatggggcacctatgaacgccttattcattactaatgtgttagttcaaatattccttattagtatgctgtttaccaaaagtgcttatcattttgcattttctctcgcggcaagtgctatactttatccatacatgttcagtgcgttttatcaggtgaaatatacaatagaacacaagttaactgcaacgcctaaacaatggattataggaattctagcatctatttatgcaatttggctggtatacgcgtcaggtatagattacttgttacttaccatgttgctctatattccggggattatcgtctatgttgttgttcagaaaaataatcaaaagcgacttacacaatttgactatattttcttcagtcttatcgttattttagcattgatagggttattacgatga

SEQ ID NO: 2278 - protein, 336 aa, Artificial Sequence
  Description of Artificial Sequence: synthetic amino acid sequence
VASILLWSVHFLILKGVETAALINSIVTITKLIPILLVIICMIVAFNFNTFKIGFFGMDGYGSLSFHFANTMSQVKSTMLVTVWVFIGIEGAVVFSGRAKNKKDVGTATVIGLISVLLIYFLLTVLAQGIVIQNHISKLEAPSMAQILAYIVGDWGATFVNIGLIISVLGAWLGWTLLAGELPFIVAKDGLFPKWFAKENKNGAPMNALFITNVLVQIFLISMLFTKSAYHFAFSLAASAILYPYMFSAFYQVKYTIEHKLTATPKQWIIGILASIYAIWLVYASGIDYLLLTMLLYIPGIIVYVVVQKNNQKRLTQFDYIFFSLIVILALIGLLR

SEQ ID NO: 2279 - DNA, 480 bp, Artificial Sequence; identical to SEQ ID NO: 877
  Description of Artificial Sequence: synthetic nucleic acid sequence

SEQ ID NO: 2280 - protein, 159 aa, Artificial Sequence; identical to SEQ ID NO: 878
  Description of Artificial Sequence: synthetic amino acid sequence

SEQ ID NO: 2281 - DNA, 1209 bp, Artificial Sequence
  Description of Artificial Sequence: synthetic nucleic acid sequence
atgaaaattcaaacagaagtagatgaattgggctttttcggtgaatatggtggccaatatgtacctgaaacattgatgccagctattattgaacttaaaaaagcatatgaggacgcgaaatcagatactcacttcaagaaagaatttaattattatttaagtgaatatgttggtagagaaacgcctttaacatttgctgaatcatacacaaaattgttaggtggtgccaaaatatatcttaaaagagaagacttaaatcacactggtgctcataaaattaataacgcgataggacaggcactattagctaaaaggatggggaaaactaaattagtagccgaaacaggtgctggtcaacatggtgtagcaagtgccaccatcgctgctttattcgatatggatcttattgttttcatgggaagtgaagatatcaaacgtcaacaacttaacgtatttagaatggaattgctaggagctaaagtagtgtctgtgtcagatgggcaaggaacactatcagatgctgtaaataaagctttgcaatattgggtgaatcatgtcgaggatacacattatttattaggctcagcgttgggacctgatccgtttccaactatggtcagagattttcagagtgtgattggtaatgaaattaaaagccaaattttaagtaaagaaggacgacttccagatgcgttagtcgcgtgtgttggtggaggatccaattcaataggtacgttctatccatttatacaagatgatgttaaattatatggggtagaagctgcgggaaaaggaagtcatacgcataatcatgctttagctatagggaaaggtaaaccaggtgtattacatggttccaaaatgtaccttattcaaaatgatgatggacaaattgaattggcacactctatatcagcgggactagattatccaggtattggacctgaacattcgtattataatgatattggtcgtgtatcatatgtaagtgctacagataatgaagctatggaagcacttataacattctcaaaagttgaaggtatcattccagcaattgaaagtgcacatgcattgagttatgttgaaaaattagcgccaaatatggatgaaaaagaaattattgttgtgactatttcaggtcgtggagataaagatatggaaacaattaaacaatacaaagaaaacggtggtgaacaaaatgagtaa

SEQ ID NO: 2282 - protein, 402 aa, Artificial Sequence
  Description of Artificial Sequence: synthetic amino acid sequence
MKIQTEVDELGFFGEYGGQYVPETLMPAIIELKKAYEDAKSDTHFKKEFNYYLSEYVGRETPLTFAESYTKLLGGAKIYLKREDLNHTGAHKINNAIGQALLAKRMGKTKLVAETGAGQHGVASATIAALFDMDLIVFMGSEDIKRQQLNVFRMELLGAKVVSVSDGQGTLSDAVNKALQYWVNHVEDTHYLLGSALGPDPFPTMVRDFQSVIGNEIKSQILSKEGRLPDALVACVGGGSNSIGTFYPFIQDDVKLYGVEAAGKGSHTHNHALAIGKGKPGVLHGSKMYLIQNDDGQIELAHSISAGLDYPGIGPEHSYYNDIGRVSYVSATDNEAMEALITFSKVEGIIPAIESAHALSYVEKLAPNMDEKEIIVVTISGRGDKDMETIKQYKENGGEQNE

SEQ ID NO: 2283 - DNA, 404 bp, Artificial Sequence
  Description of Artificial Sequence: synthetic nucleic acid sequence
atgggtgatttaaattttattcatcatttaaaaacattaactgagaatggagcagacattgttgaaattggtgtgccattttctgatcctgttgcagatggacctataatcatgaaagcagggcgcaacgctattgacgagggttcaaacattaaattcatttttgatgaattaataaaaaataaaaatactatttcatctaagtatgtattaatgacttattataatattctaagtgcttatggagaagaattatttttggataagtgtgatgaagctggtgtttatggtttaattattccagatttaccttacgaacttacaaaaaagtttaaaaaagatttttatcatcattctgttaaaataatatcgttaattgccatgaccgcaagtgatgctaggat

SEQ ID NO: 2284 - protein, 135 aa, Artificial Sequence
  Description of Artificial Sequence: synthetic amino acid sequence
  MOD_RES (135): variable amino acid
MGDLNFIHHLKTLTENGADIVEIGVPFSDPVADGPIIMKAGRNAIDEGSNIKFIFDELIKNKNTISSKYVLMTYYNILSAYGEELFLDKCDEAGVYGLIIPDLPYELTKKFKKDFYHHSVKIISLIAMTASDARX

SEQ ID NO: 2285 - DNA, 1227 bp, Artificial Sequence
  Description of Artificial Sequence: synthetic nucleic acid sequence
atgagtttagtatatgacaaacttactcaagatcaaccgtatcattcgtggtttaatattgttgagcatttcttaccttctgatagtcatgatttgttagatattggttgcggtactggcaacttaacacaattactaacgtcactaggtgaagtcactggtatggatattagtgtagatatgttatcaatagctagacaaaaaacaaatcaagtgaagtggatcgaaggtaatatgactcactttaatttgaacaaaaaatttaatatgattacaatattttgtgattcactgaattatttagaaacattaaatgacgtaaaaatgacattcgaaagagtgtatcaacatttaaataaaaatggtgtttttatttttgatgtacatactgttcataaaatgaaaacattatttaataataaaagttatattgatgaatctgataatgtttttgtaggttgggatgcaatatgtggggatgaaccattagtaagatttatgtctatcaaatcacataaattactaccaaaagccagacgtctgggaataagttggatggcagtcggtctattaggagcgattggtgtaggattaacaggaatttcatttatatctgaaagacatattaaatcagaagatcctgaaacactatttattgtgatgagtcaaatattatttcatccgcttgtaggtggatttttattagcagccatccttgctgcaataatgagtactatctcttcacaattactagtaacatcaagttctttaactgaagatttctataaactaatcagaggttcagataaagcatcatcacaccaaaaagagtttgttttgattggacgcttatcagttctacttgttgcgatagttgctattacgattgcttggcatccaaacgatacaatactaaatttagttggtaatgcttgggctggttttggagctgcatttagtcctttagtactctactctttatattggaaagatttaacacgtgcaggagctattagcggaatggtagctggtgctgtggttgttattgtttggatttcttggataaaacccttggctacaatcaatgcattctttggtatgtatgaaatcattccaggtttcataattagcgtattgattacctacatcgtaagtaaattaacaaaaaaacctgatgattatgttattgaaaatcttaataaagttaaacacatcgttaaagaataa

SEQ ID NO: 2286 - protein, 408 aa, Artificial Sequence
  Description of Artificial Sequence: synthetic amino acid sequence
MSLVYDKLTQDQPYHSWFNIVEHFLPSDSHDLLDIGCGTGNLTQLLTSLGEVTGMDISVDMLSIARQKTNQVKWIEGNMTHFNLNKKFNMITIFCDSLNYLETLNDVKMTFERVYQHLNKNGVFIFDVHTVHKMKTLFNNKSYIDESDNVFVGWDAICGDEPLVRFMSIKSHKLLPKARRLGISWMAVGLLGAIGVGLTGISFISERHIKSEDPETLFIVMSQILFHPLVGGFLLAAILAAIMSTISSQLLVTSSSLTEDFYKLIRGSDKASSHQKEFVLIGRLSVLLVAIVAITIAWHPNDTILNLVGNAWAGFGAAFSPLVLYSLYWKDLTRAGAISGMVAGAVVVIVWISWIKPLATINAFFGMYEIIPGFIISVLITYIVSKLTKKPDDYVIENLNKVKHIVKE

SEQ ID NO: 2287 - DNA, 1122 bp, Artificial Sequence
  Description of Artificial Sequence: synthetic nucleic acid sequence
atgggttatacgcaaaaatctccaagatgggcgattgcttataaatttccagctgaagaagttattacaaaattattggatattgagctaagtattgggcgtacgggtgttgtgacaccaactgcaattctagaacctgtaaaagtagctggtactacagtttcaagagcctcacttcataatgaagatttaatacatgaaagagatatacgtatcggagatagtgttgttattaaaaaagccggggacatcatccctgaagttgtaaaaagtattttagatagacgacctaacgaatcggaaatttatcatatgccaacacattgtcctagttgtggacatgaattagttcgtattgaaggagaagttgctttacgttgtattaatccaaaatgtcaggcacagcttattgaaggacttatacatttcgtttcaagacaagcgatgaatatagatggtttaggtactaaaattattcatcagctatacgaaaatcagttaatcaaagatgtcgcagatattttctatttgaaagaagaagatttattaccattagagcgaatgggaaagaagaaagttgataatcttttattagcgatagaaaaatctaaagaacagtcattagagcatttattatttggacttggtattagacatttaggtgtaaaagctagtcaagtacttgctgagcgatatgaaacgatggatcaactttttaaagtaactgaaagtgaattaattgaaattcaagatattggagataaacttgcacaatctgttgtaacatatctcgaaaatagtgatattcgttcattaattgaaaaattaagtaataaaaatgttaatatgtcttataaaggaattaaaacaactgaaatcgaaggtcatcctgattttagtgggaaaacaattgtattaacagggaaactcgagcaaatgacgagaaatgaagcatctgaatggttgaaaatgcaaggtgctaaagttacaagcagcgtgactaaaagtactgatattgtcatagctggagcagatgcagggtctaaattagccaaagctgagaagtatggtactgaaatttggactgaagcagcatttattgaaaaacaaaatggaatctaa

SEQ ID NO: 2288 - protein, 373 aa, Artificial Sequence
  Description of Artificial Sequence: synthetic amino acid sequence
MGYTQKSPRWAIAYKFPAEEVITKLLDIELSIGRTGVVTPTAILEPVKVAGTTVSRASLHNEDLIHERDIRIGDSVVIKKAGDIIPEVVKSILDRRPNESEIYHMPTHCPSCGHELVRIEGEVALRCINPKCQAQLIEGLIHFVSRQAMNIDGLGTKIIHQLYENQLIKDVADIFYLKEEDLLPLERMGKKKVDNLLLAIEKSKEQSLEHLLFGLGIRHLGVKASQVLAERYETMDQLFKVTESELIEIQDIGDKLAQSVVTYLENSDIRSLIEKLSNKNVNMSYKGIKTTEIEGHPDFSGKTIVLTGKLEQMTRNEASEWLKMQGAKVTSSVTKSTDIVIAGADAGSKLAKAEKYGTEIWTEAAFIEKQNGI

SEQ ID NO: 2289 - DNA, 819 bp, Artificial Sequence
  Description of Artificial Sequence: synthetic nucleic acid sequence
atgagcgaaaaagaaaagaaaagcaaaaatgctaatgagaatcttggactcaatccatctcacaatggtgaaacagatgaagagaaaatagctaaaaattctccagcctatctttcaaatatactcgagcaggatttttatggaaatagtgattctaaaggtaaaaatataaaagggatgacaattggtttagctatgaatagtgtttattattacaaaaaagagaaagatggcgaaacatttagtaaagatttatctgataaagagattgaaaagcaaggtaaacagatggctagtgaaatgctttctcgtttacgtgagaatagtgatttgaaagatattcctattcattttgctatctataaacaatcaagtcaagattccattacaccaggtgaatttatagttggtactacggttgaagagggtaaaactaaaattaactcatgggataatattaatgaaaaagcagccttaattccttcgtcaactgcagctgattatgatgaaacgttgaataataactttaaacagtttaatgataatttgcaatcgtatttttcaaacttcacacaagcagttggtaaggttaaattcgtaaataaaaaagctaaacaacttacagttgatttgcctatagattattacggacaggcagaaacgataggtattacacaatatgttacagagcaagccgaaaaatattttgataaactagatgagtatgaaattagaatcaaagatggaaatactccacgtgctctcattagtaaaactaaagacgataaagaaccacaagttcatatctatcataattag

SEQ ID NO: 2290 - protein, 272 aa, Artificial Sequence
  Description of Artificial Sequence: synthetic amino acid sequence
MSEKEKKSKNANENLGLNPSHNGETDEEKIAKNSPAYLSNILEQDFYGNSDSKGKNIKGMTIGLAMNSVYYYKKEKDGETFSKDLSDKEIEKQGKQMASEMLSRLRENSDLKDIPIHFAIYKQSSQDSITPGEFIVGTTVEEGKTKINSWDNINEKAALIPSSTAADYDETLNNNFKQFNDNLQSYFSNFTQAVGKVKFVNKKAKQLTVDLPIDYYGQAETIGITQYVTEQAEKYFDKLDEYEIRIKDGNTPRALISKTKDDKEPQVHIYHN

SEQ ID NO: 2291 - DNA, 321 bp, Artificial Sequence
  Description of Artificial Sequence: synthetic nucleic acid sequence
atgtttatgtgccacttctttaacagatctagcaatggattgaacttgacgttcattgttcccgtgacagactacaaaataaaggggataaaacctcttgggaatgatataagaatattaggtgcatcaagtgatcatttgatgattgatttaaataaccaagatcattatcaaatcggtgataaacttcaatttagcttgaattatgaagcactgtctcagagcatgtatatgaaaaatttaactaagttatatagtagtgattcaaaaatagaatcccttgttcagaacttcgatatgcctatatattcccagtgctaa

SEQ ID NO: 2292 - protein, 106 aa, Artificial Sequence
  Description of Artificial Sequence: synthetic amino acid sequence
MFMCHFFNRSSNGLNLTFIVPVTDYKIKGIKPLGNDIRILGASSDHLMIDLNNQDHYQIGDKLQFSLNYEALSQSMYMKNLTKLYSSDSKIESLVQNFDMPIYSQC

SEQ ID NO: 2293 - DNA, 745 bp, Artificial Sequence
  Description of Artificial Sequence: synthetic nucleic acid sequence
gtgacaatcttagcgattgatattggagtgaatgtgggaatagcatcagcaattgtaacaattgtgattatacttatttctgaagtgattcctaaatcaattgctgcaacatttcctgataaaatttcaaaacttgtgtatcctatcattcatatatgtgttattgtactcaagcccattacaatcttattaaacaagatgacagatggtattaatcatttactatctcgaggccaacctgttgaaaaaagattttctaaagaagaaattcgtacattattaaatattgcgggtagagaaggtgcatttaatgagatagaaaatactcgacttcaaaacgttatggactttgaacaattgaaggttaaggatgttgataccacgcctcgtattaatgttgtagctttttcaaaggaagtaacatatgacgaagcttatgatacagtgatgaataacccatatacaagatatccagtatatgatgaaaatatagatgatatcatcggcgtattccactcaaaatatttattagcttggagtaaaaataaagaggacgcaattactaattatgcatcaagccctttatttgtaaatgaacataatagggcagaatgggtattgcgtaaaatgaccgtttcacgaaaacatttagcgattgttttagatgaatttggaggtacggatgctatcgtatcgcacgaagatttaatagaagagctacttggtatggatattgaggatgaaa

SEQ ID NO: 2294 - protein, 249 aa, Artificial Sequence
  Description of Artificial Sequence: synthetic amino acid sequence
  MOD_RES (249): variable amino acid
VTILAIDIGVNVGIASAIVTIVIILISEVIPKSIAATFPDKISKLVYPIIHICVIVLKPITILLNKMTDGINHLLSRGQPVEKRFSKEEIRTLLNIAGREGAFNEIENTRLQNVMDFEQLKVKDVDTTPRINVVAFSKEVTYDEAYDTVMNNPYTRYPVYDENIDDIIGVFHSKYLLAWSKNKEDAITNYASSPLFVNEHNRAEWVLRKMTVSRKHLAIVLDEFGGTDAIVSHEDLIEELLGMDIEDEX

SEQ ID NO: 2295 - DNA, 1275 bp, Artificial Sequence
  Description of Artificial Sequence: synthetic nucleic acid sequence
atgtcaaagatatattgcattaaagtaataaaaacgttactatatcaaagatacatagaagtgacaggttataaagatgaaagcgagaaggataaaatggataagcaagaacgatacaatagaagagaaaatattagaaatttctccattattgctcatatagaccatggtaaatcgacattagctgatcgaattttagagaatacaaaatcagttgaaactcgagaaatgcaagatcaattacttgactctatggatttggaaagagaacgaggcatcactattaaactaaatgctgttcgattaaaatacgaagctaaagatggagaaacttacacatttcatttgatagatacaccaggacatgtcgactttacatatgaggtttctcgctcattagctgcatgtgaaggtgcaattcttgtagttgatgctgcccaaggtatagaagcacaaaccttagcaaacgtttatttagcattagataacgatttggaacttttgccagttgttaataaaatagacttgcctgcagctgagcccgatagagttaagcaagaattagaagatgttataggtatagatcaagaagatgtagtacttgcaagtgctaagtcaaatataggtattgaagaaattttagagaaaatagttgatgttgtaccagcaccggacggtgatccagaagccccacttaaagcacttatctttgattcagaatatgatccatacagaggagtaatatcttcaattcgaattattgatggtgttgttaaagctggagataggattaaaatgatggctaccggtaaagaatttgaagttacagaagtcggaatcaatacccctaagcaactaccggtagaagaattaacagttggtgatgtgggttatattatcgcaagtatcaaaaatgttgatgattctagagtaggtgacacaattactttagctgaaagacctgctgacaaaccgttacaaggatataaaaagatgaatccaatggtattttgtggtctattccctattgacaataaagactataatgacctaagagaagctttagaaaaattacaacttaatgacgcatccttagagtttgaaccagagtcttcacaagcacttggttttggatacagaactggatttttaggaatgttacatatggagattattcaagaaagaattgaaagagaatttggtattgaactcattgcaacagcgccttcatcccgcagaagtatcaatgcatgtgtgaacaccattcgcttttaa

SEQ ID NO: 2296 - protein, 424 aa, Artificial Sequence
  Description of Artificial Sequence: synthetic amino acid sequence
MSKIYCIKVIKTLLYQRYIEVTGYKDESEKDKMDKQERYNRRENIRNFSIIAHIDHGKSTLADRILENTKSVETREMQDQLLDSMDLERERGITIKLNAVRLKYEAKDGETYTFHLIDTPGHVDFTYEVSRSLAACEGAILVVDAAQGIEAQTLANVYLALDNDLELLPVVNKIDLPAAEPDRVKQELEDVIGIDQEDVVLASAKSNIGIEEILEKIVDVVPAPDGDPEAPLKALIFDSEYDPYRGVISSIRIIDGVVKAGDRIKMMATGKEFEVTEVGINTPKQLPVEELTVGDVGYIIASIKNVDDSRVGDTITLAERPADKPLQGYKKMNPMVFCGLFPIDNKDYNDLREALEKLQLNDASLEFEPESSQALGFGYRTGFLGMLHMEIIQERIEREFGIELIATAPSSRRSINACVNTIRF

SEQ ID NO: 2297 - DNA, 345 bp, Artificial Sequence
  Description of Artificial Sequence: synthetic nucleic acid sequence
atgcgtagtgtaattaagttggaaaatacatttatattcataatcacaatcgccgtttatgttaaattagaattttctatatggctgtttttacttttactattagttccagatatatttatgttaggatatgtgattaatagaaaaacagggagttatgtttacaatattggacacacgtatatcacacctataattatcgcgctattatatttatacattgatgaaaggttactattacagattgctttaatatggttagctcatattagtatggatagaactttaggtttcggactcaaatattcatcagatactgataaaacgataatacaaaagatgtaa

SEQ ID NO: 2298 - protein, 114 aa, Artificial Sequence
  Description of Artificial Sequence: synthetic amino acid sequence
MRSVIKLENTFIFIITIAVYVKLEFSIWLFLLLLLVPDIFMLGYVINRKTGSYVYNIGHTYITPIIIALLYLYIDERLLLQIALIWLAHISMDRTLGFGLKYSSDTDKTIIQKM

SEQ ID NO: 2299 - DNA, 1161 bp, Artificial Sequence
  Description of Artificial Sequence: synthetic nucleic acid sequence
gtgttttacgacacagacagtactgaagcgatgaaaagtcatatgagtgatttagtattaggcaagcaagaacaaattgcttatatcaatcagttagaacgtggacttgaagaaaataaaattgaaagaaactctaattctaatgagattaatcaagttgagaatgagcttgttcctgacgaaacctttgaaaagaaaaaggaatatacacaacaagttttagaattacatgaaaaagagaacttgtatgaaaagttaaaagaaacttttgaagaagaacaaacacaaaaaaataaaagacaaaagtttttgagaataggatttattgttttgactattctatcagcagcactttctattttttcttttttcactgcaaatcttatttttggtataatatttgctctattaactgtgatttttgtagtaggtatcattttttctagatctaaagcagtagattatagcacagcaataagtcaggaaattaatgatttagaaaaccaactcacgcaacttgaaaaagaatataatcttgacttcgatttagaatatcaacaacaagttcgtgaacaatggcgtcatgctaaaaaaaataaaaaaatacttgaagaaaaacatcaatatatcaatcaatcattaacgactgcaaatgagcgattagatagtttaaaacatagcatttttaaactactaatagctggcataatagcaggacttttatctggtgtagtcaaactaggttgggaggtaatgttcccaccccgaacacctagtagagatgccactaacccacctcaacaactcttacaattactaggaataccgtcaaatattacccatctcacatacaatttttctgagcatgcattaccttggataagttttatcgtacactatagtttttctatcgctattgcaataatctatatttatatcgcaaagaaatatacaaaaatcacactaggttatggtgctttatttggtatagttatttggattgtttttcatttaatcttaatgccaattatgcatgtcgtaccgaatgcttttgatcaaccattttcagaacacctatcagaattttttggacacattgtttggatgatggttatagaaatggtcagaaggtatttctataatattcaattaaataaataa

SEQ ID NO: 2300 - protein, 386 aa, Artificial Sequence
  Description of Artificial Sequence: synthetic amino acid sequence
VFYDTDSTEAMKSHMSDLVLGKQEQIAYINQLERGLEENKIERNSNSNEINQVENELVPDETFEKKKEYTQQVLELHEKENLYEKLKETFEEEQTQKNKRQKFLRIGFIVLTILSAALSIFSFFTANLIFGIIFALLTVIFVVGIIFSRSKAVDYSTAISQEINDLENQLTQLEKEYNLDFDLEYQQQVREQWRHAKKNKKILEEKHQYINQSLTTANERLDSLKHSIFKLLIAGIIAGLLSGVVKLGWEVMFPPRTPSRDATNPPQQLLQLLGIPSNITHLTYNFSEHALPWISFIVHYSFSIAIAIIYIYIAKKYTKITLGYGALFGIVIWIVFHLILMPIMHVVPNAFDQPFSEHLSEFFGHIVWMMVIEMVRRYFYNIQLNK

SEQ ID NO: 2301 - DNA, 417 bp, Artificial Sequence
  Description of Artificial Sequence: synthetic nucleic acid sequence
atggaattatatagtatgcctatgtttaataaatttttagttaacgacatagataaatcatcggaatggtatcaagagaatttaggttttaaaagtatttttaaatttaaaaatgaacaaaatcaaattttaatggagcatttacgattagcaaaatatcaagatttgatgttaatttctggcaaacagtttgaagtcggtaatgcagtttatacaaatatacttgtaccaaatattcgaattttaaaacaacgaataccttctcaatatatcgtggaagatcttgaagaaaaaccatggaattctattgaaatgacaattaaagatttagataatcatttaattacgcttacacaaagtaacataaaaaatgaagaatttaatgctttgatgcaacatacttcaaaaacattttaa

SEQ ID NO: 2302 - protein, 138 aa, Artificial Sequence
  Description of Artificial Sequence: synthetic amino acid sequence
MELYSMPMFNKFLVNDIDKSSEWYQENLGFKSIFKFKNEQNQILMEHLRLAKYQDLMLISGKQFEVGNAVYTNILVPNIRILKQRIPSQYIVEDLEEKPWNSIEMTIKDLDNHLITLTQSNIKNEEFNALMQHTSKTF

SEQ ID NO: 2303 - DNA, 579 bp, Artificial Sequence; identical to SEQ ID NO: 1999
  Description of Artificial Sequence: synthetic nucleic acid sequence

SEQ ID NO: 2304 - protein, 192 aa, Artificial Sequence; identical to SEQ ID NO: 2000
  Description of Artificial Sequence: synthetic amino acid sequence

SEQ ID NO: 2305 - DNA, 1230 bp, Artificial Sequence; identical to SEQ ID NO: 2001
  Description of Artificial Sequence: synthetic nucleic acid sequence

SEQ ID NO: 2306 - protein, 409 aa, Artificial Sequence; identical to SEQ ID NO: 2002
  Description of Artificial Sequence: synthetic amino acid sequence

SEQ ID NO: 2307 - DNA, 1467 bp, Artificial Sequence
  Description of Artificial Sequence: synthetic nucleic acid sequence
atgtgggaaaataaatttgctaaagaatctttaacattcgacgacgtgttactcattccagctgcatcagatgttttaccaagcgatgttgacttaagtgtcaaattatcagataagatcaagttaaacattcctgttatctcagcaggtatggatacagtaactgaatcaaaaatggcaattgctatggctcgacaaggcggtttaggtgttattcataagaatatgggcgtcgaagagcaagctgatgaggtacaaaaggttaaacgttcagaaaatggtgttatttctaacccgttcttcttaacaccggaagaaagtgtgtatgaggctgaagcattaatgggtaaataccgtatctctggtgtacccattgtcgataatcaagaggatcgcaagttgattgggattttaacaaatcgtgatttacgttttattgaagatttttcaattaaaatatcagatgtaatgacgaaagataatttaataacagctccagttggtacgactttagatgaagccgaggctattcttcaaaaacataagattgagaaacttccattagtagaaaatggtcgtttagaaggattaatcactattaaagatattgaaaaagtacttgaattcccatatgcagctaaagatgaacatggcagattgttagctgcggcagcaatcggtacgtctaaagatactgaaattcgtgcacaaaaactagttgaagctggcgtagatgcattaattattgatacagctcatggtcattctaaaggcgttattaatcaagttaaacacatcaaggaaacatatcctgaaattactgttgtcgctggtaacgtagcgactgcagaggcaacacgtgctttatttgaagcgggtgccgatgttgttaaagtaggtattggtccaggctcaatttgcacaacacgtgttgttgcaggtgtaggtgtgcctcaaattacagcagtttatgattgtgctacagaagcccgtaagcatggtaaggctattattgctgatggtggtattaagttctcaggtgatattatcaaagcattagctgctggtggtcatgcggttatgttaggtagtttgttagctggtacagaagaaagtcctggtgcaactgaagtattccaaggtagacaatataaagtttatcgcggcatgggatctttaggtgctatggaaaaaggttcaaatgatcgttacttccaagaagataaaacaccaagaaaatttgttcctgaaggtattgaaggtcgtacagcttataaaggaccattacaagatacaatttatcaacttatgggtggcgttagagctggcatgggttatactggttcagaaaacctaaaaaaattacgtgaagaagcacaatttacacgtatgggaccagctggcttagctgaaagtcatcctcataatgttcaaattacgaaagaatcaccaaactattctttctag

SEQ ID NO: 2308 - protein, 488 aa, Artificial Sequence
  Description of Artificial Sequence: synthetic amino acid sequence
MWENKFAKESLTFDDVLLIPAASDVLPSDVDLSVKLSDKIKLNIPVISAGMDTVTESKMAIAMARQGGLGVIHKNMGVEEQADEVQKVKRSENGVISNPFFLTPEESVYEAEALMGKYRISGVPIVDNQEDRKLIGILTNRDLRFIEDFSIKISDVMTKDNLITAPVGTTLDEAEAILQKHKIEKLPLVENGRLEGLITIKDIEKVLEFPYAAKDEHGRLLAAAAIGTSKDTEIRAQKLVEAGVDALIIDTAHGHSKGVINQVKHIKETYPEITVVAGNVATAEATRALFEAGADVVKVGIGPGSICTTRVVAGVGVPQITAVYDCATEARKHGKAIIADGGIKFSGDIIKALAAGGHAVMLGSLLAGTEESPGATEVFQGRQYKVYRGMGSLGAMEKGSNDRYFQEDKTPRKFVPEGIEGRTAYKGPLQDTIYQLMGGVRAGMGYTGSENLKKLREEAQFTRMGPAGLAESHPHNVQITKESPNYSF

SEQ ID NO: 2309 - DNA, 749 bp, Artificial Sequence
  Description of Artificial Sequence: synthetic nucleic acid sequence
atgactatggaaatggcgaaagagcaagagctgattcttgttttagactttggtagccaatataaccagttaattacgcgtcgtatccgtgagatgggcgtttatagtgaattacatgatcacgaaatttctattgaagaaattaaacgaatgaatcctaaaggtatcattctttcaggtggtccaaattcagtgtatgaagaggggtcatttaccatcgaccctgaaatttacaatttaggtattccagttttaggtatatgttatggtatgcaattaacgactaagcttttaggtggtaaagttgagcgtgccaatgagcgtgaatatggcaaagctacaattaacgctaaatcagatgaacttttctttggcttaccttctgaacaaacagtatggatgagtcattctgataaagtaattgaaattcctgaaggatttgaagtgattgcagatagtccaagtactaattatgcagctattgaagataaaaaacgtcgcatttacggtgtacaattccatccagaagtacgtcacactgaatatgggaacgacttactaagaaacttcgtccgccgtgtttgtaattgtacaggtgaatggacgatggagaatttcattgaaattgaaattgagaaaatccgtcaacaagtaggtaatcgtaaagtattatgtgcaatgagtggtggagtagattcatccgtagttgctgtacttttacataaggcaatcggcgaccaattaacatg

SEQ ID NO: 2310 - protein, 250 aa, Artificial Sequence
  Description of Artificial Sequence: synthetic amino acid sequence
  MOD_RES (250): variable amino acid
MTMEMAKEQELILVLDFGSQYNQLITRRIREMGVYSELHDHEISIEEIKRMNPKGIILSGGPNSVYEEGSFTIDPEIYNLGIPVLGICYGMQLTTKLLGGKVERANEREYGKATINAKSDELFFGLPSEQTVWMSHSDKVIEIPEGFEVIADSPSTNYAAIEDKKRRIYGVQFHPEVRHTEYGNDLLRNFVRRVCNCTGEWTMENFIEIEIEKIRQQVGNRKVLCAMSGGVDSSVVAVLLHKAIGDQLTX

SEQ ID NO: 2311 - DNA, 408 bp, Artificial Sequence
  Description of Artificial Sequence: synthetic nucleic acid sequence
atggcaaaaattactgtagtgaataaccaagatgaattatataaagtcatcaatcaaaaaaaatctgaaggttatttagagacagaattagctgttatcagtaaaagtaagttgcacttagatgatttacacaactctcaaatctcgttaatggctacaagtggctcatttagtgaccgtatgtctcgtttacttacaggtgaagatggagaagaaacagtattatctcgttatgatttaactgacaatgaactagaaggatataaacaagatattttaaacgataaaatgctcgttgttgctaacagtgaccgttcttctcatgatgaagttgaagataataatgctgcatataaagaagtggatattactcattatgccgcagagtctgaagggcctaaagcataa

SEQ ID NO: 2312 - protein, 135 aa, Artificial Sequence
  Description of Artificial Sequence: synthetic amino acid sequence
MAKITVVNNQDELYKVINQKKSEGYLETELAVISKSKLHLDDLHNSQISLMATSGSFSDRMSRLLTGEDGEETVLSRYDLTDNELEGYKQDILNDKMLVVANSDRSSHDEVEDNNAAYKEVDITHYAAESEGPKA

SEQ ID NO: 2313 - DNA, 552 bp, Artificial Sequence
  Description of Artificial Sequence: synthetic nucleic acid sequence
atggaatttaaagtgatagaatcagctaaagatccattatttaacgaggcactcaaattatatgatgataaattggatattggtttagatgaagatagtaaaatttttaaacgctcacttgaaaataataaaacagaaaatgattacgcctttatcgttggaattgaaaaccagactgtagttagcttagcaactgcacattacgaagcaacaaccaattctgcatttttaatttacttaatcgcaaaagaaagccccaatcatgatgaaagaatgtccttaactttagaggcaatagaaaaacaattaaaccttttatcacaagaagttcataatagagatattaatttcatcatgttagaagttccaaaagaaccctcgactgctaacatcgatgacaagctcagaaatgcactagaacatcgtcgtcaattcctctttgaaaatcaatttgaaaagcaggacgacattgactatattcatccaaaccaaaaccaaaaggaaacgccacaaaaagtagatttatttattaaagctaacattgaattatag

SEQ ID NO: 2314 - protein, 183 aa, Artificial Sequence
  Description of Artificial Sequence: synthetic amino acid sequence
MEFKVIESAKDPLFNEALKLYDDKLDIGLDEDSKIFKRSLENNKTENDYAFIVGIENQTVVSLATAHYEATTNSAFLIYLIAKESPNHDERMSLTLEAIEKQLNLLSQEVHNRDINFIMLEVPKEPSTANIDDKLRNALEHRRQFLFENQFEKQDDIDYIHPNQNQKETPQKVDLFIKANIEL

SEQ ID NO: 2315 - DNA, 759 bp, Artificial Sequence
  Description of Artificial Sequence: synthetic nucleic acid sequence
atggatgacttgaaacaaaatcaatcttctaacgaaaaacctaaaggtaataaaataattaatattttgatattcatcggaatgattttattaattcaaatacctattggcgtgtcactaatagctttacctttttcagtgaaattcagtaagttaacatccatcgcattaagtatgctaataactggtacagcactattaatcatatggttagttaggaattattatttgagtcatacatatgaaagacaatatcaatcaatgaggggaaaagatatctttattaatattggttttctggtattatcaatggtttttagtattctaagtagtgtattaatggtcatatttactggcaacgatactacagcgaatgagaaagaaatcaatgaaagtttagatttacttttacaaaaagaccatttaccacatatttcaattgttgcaactgttgttttaatgatatgtattataggtccgtatttagaggaattactcttccgaggaatttttaaagaaacattatttatgaaatatcgattttggctaccattcattatatcttctattatttttagttcacaacatttatcaacaaatatattttcatatgcaatttattttctaatgggttgtgtattataccttgcctataacagaagacgtaatatcaaagatagtatgatggttcacatgttgaataattctgtttcaacattaccggtatttgttggttatttatggctatattttagatag

SEQ ID NO: 2316 - protein, 252 aa, Artificial Sequence
  Description of Artificial Sequence: synthetic amino acid sequence
MDDLKQNQSSNEKPKGNKIINILIFIGMILLIQIPIGVSLIALPFSVKFSKLTSIALSMLITGTALLIIWLVRNYYLSHTYERQYQSMRGKDIFINIGFLVLSMVFSILSSVLMVIFTGNDTTANEKEINESLDLLLQKDHLPHISIVATVVLMICIIGPYLEELLFRGIFKETLFMKYRFWLPFIISSIIFSSQHLSTNIFSYAIYFLMGCVLYLAYNRRRNIKDSMMVHMLNNSVSTLPVFVGYLWLYFR

SEQ ID NO: 2317 - DNA, 336 bp, Artificial Sequence
  Description of Artificial Sequence: synthetic nucleic acid sequence
gtgtatatcatgtatgagaatatacaaaatattgaagatttttaccgatttataaatgcacacgctttagctgttgttcatattatgagagataattgtacagtatgtcatgcagtattaccccaaattcaagatttactaaaggactatccgaaagcacaattaggtgtgattaatcaatctaatgttgaagctattgccggagaactttctatttttacagtacctgttgatttaatttttttgaaagggaaagaaatgcatagacaagcacgttttatcgatatgcaatcgtttgaaaaacaattgtatataatgcaaaatgccatcgattaa

SEQ ID NO: 2318 - protein, 111 aa, Artificial Sequence
  Description of Artificial Sequence: synthetic amino acid sequence
VYIMYENIQNIEDFYRFINAHALAVVHIMRDNCTVCHAVLPQIQDLLKDYPKAQLGVINQSNVEAIAGELSIFTVPVDLIFLKGKEMHRQARFIDMQSFEKQLYIMQNAID

SEQ ID NO: 2319 - DNA, 864 bp, Artificial Sequence
  Description of Artificial Sequence: synthetic nucleic acid sequence
atgaaggaggccaaaatgaagaagcaacagaataaagtccatatgattaatatatctttatgccttatagggacattacttattgcaatcgcagtaaatagttttgttataccgggcaatttaggtgagggtggttctataggcctttcattaattctgaattatactctaggtatttcacccgcactcagttccttcatcattaacgcaatattaattattgtaggttggaaatttctcagtagaacgacagcgatttacactgctataacaatcaccgcaagttcaatttttcttgatttaactcacacattcggattaggtattcatgataattttattaattcaatttttgcaggtttaatgttgggaatcggttctgggttagtaattactgctcatagtacattgggtggtacatctgtcattgcacgtatcatttcaaaatatagtgagatgaagacgtcacaagcactacttatattagatgcaatcatcgtgttatcatttatcgttgttttacctataacgaatgtattatatactattgtgatgctatttattgttgaaaaatcaatgtcttttgttgttgaaggatttaatcctaaaaaagctgtgacagttatttcaaaatataataaagaaatcagtgctgatatatatgaaatgactggaagaggggcaaccttattaagtggtaaaggtgcttaccaaaaaagtgatacagaagttctatatgccgtggtatcccaaaatcaagttggagcaataaaaaagattgttaatcaatatgatgaaaatgcctttttagtgattcatgatgtgcgtgatgtcttaggtaatggatttattaatattaaataa

SEQ ID NO: 2320 - protein, 287 aa, Artificial Sequence
  Description of Artificial Sequence: synthetic amino acid sequence
MKEAKMKKQQNKVHMINISLCLIGTLLIAIAVNSFVIPGNLGEGGSIGLSLILNYTLGISPALSSFIINAILIIVGWKFLSRTTAIYTAITITASSIFLDLTHTFGLGIHDNFINSIFAGLMLGIGSGLVITAHSTLGGTSVIARIISKYSEMKTSQALLILDAIIVLSFIVVLPITNVLYTIVMLFIVEKSMSFVVEGFNPKKAVTVISKYNKEISADIYEMTGRGATLLSGKGAYQKSDTEVLYAVVSQNQVGAIKKIVNQYDENAFLVIHDVRDVLGNGFINIK

SEQ ID NO: 2321 - DNA, 861 bp, Artificial Sequence
  Description of Artificial Sequence: synthetic nucleic acid sequence
gtggttaaacaaaaagcaaatgccctagttaatgagtgtatggctgtaaatccagattatcaaattacctttcaaaatgatttagtaaaagcaaatatcggtgtaattgttaatgtgatggaagaccatatggatgtcttaggaccgacacttaaagatgtagcgcaagcttttactgcaacaattccatataacgggaaattagttgtaatgaaagataactatactagtttctttgcaaaggaagctaaaaagcgtaattcagaactcattgttgtagataaagacgtcataccagaatcatatttacggaagttcgattatttagtatttcctgataatgtagctattgtgttaggaatagcgcaagcagttggtgtagatgaagaaactgcattacaaggtatgttaaatgcaccagccgatccaggtgctgttagaattaaatatttccatgcaaatcgcacaaaaaatgtatttgttaatgcattcgctgctaatgaaccgcagtctacaaaagcgattttaaataaagtggaatcatataattatccatacgataagaaaataatcattctcaattgtcgttcagatagggttgatagaacacaactctttgttgataactttttaggtgaagtcgattacgatgttctcatttgtacaggaaaaagtacacaaatggtgacacagtttatggaaactatgccagaaaaaacatatatcaattatgaaggacgagactttgtagagattgaaaaaggtattctacatgaagctgagaatgcacttgtattttgtgtaggaaacatccacggcccgggtggtagaatagcggaattcatagaagggatagaataa

SEQ ID NO: 2322 - protein, 286 aa, Artificial Sequence
  Description of Artificial Sequence: synthetic amino acid sequence
VVKQKANALVNECMAVNPDYQITFQNDLVKANIGVIVNVMEDHMDVLGPTLKDVAQAFTATIPYNGKLVVMKDNYTSFFAKEAKKRNSELIVVDKDVIPESYLRKFDYLVFPDNVAIVLGIAQAVGVDEETALQGMLNAPADPGAVRIKYFHANRTKNVFVNAFAANEPQSTKAILNKVESYNYPYDKKIIILNCRSDRVDRTQLFVDNFLGEVDYDVLICTGKSTQMVTQFMETMPEKTYINYEGRDFVEIEKGILHEAENALVFCVGNIHGPGGRIAEFIEGIE

SEQ ID NO: 2323 - DNA, 453 bp, Artificial Sequence
  Description of Artificial Sequence: synthetic nucleic acid sequence
atgataggttcagaattatatttctccttattcgtaggtgtcgtactcagtttgatatttgctgagaaatttgggattaatccagcagggttagtcgttccaggttatttagctttgatttttgatcaaccgatcatgttgttatcagtattaatcattagttgcttaacttattttatcgtaagcaacggtattagtaagtgggttattttatatggtagaagaaaattcgctgccatgatactgacgggaatggtgattaaatttatatttgatctcttgtacccattgaccccatttgaaatggttgaagtttcaggtataggtgttgtcattcctggtattattgcgaatacaattcaaaaacaaggtgtagtcattacactttctacaacaatgttattaacatgtattacatatatcatcttatttttatatagttttattaattaa

SEQ ID NO: 2324 - protein, 150 aa, Artificial Sequence
  Description of Artificial Sequence: synthetic amino acid sequence
MIGSELYFSLFVGVVLSLIFAEKFGINPAGLVVPGYLALIFDQPIMLLSVLIISCLTYFIVSNGISKWVILYGRRKFAAMILTGMVIKFIFDLLYPLTPFEMVEVSGIGVVIPGIIANTIQKQGVVITLSTTMLLTCITYIILFLYSFIN

SEQ ID NO: 2325 - DNA, 603 bp, Artificial Sequence
  Description of Artificial Sequence: synthetic nucleic acid sequence
atgacaaagaaaaaacgtttatcgcctagtgagtggttgcttaaacaatctaaaagacataaaaggaaaaatacactttacacggcaattgtacttttagtagcgttagttctactcatatttgctgttaaatcaatacaagtagaacctgtaaaaagtgatacgagagacaaagatagcattcgtatcacctatttaggtaacgtcactttaaataaacatattcgacaaactaacttgaatgatgtttttaaaggtattcaagatactttagatcatagtgatttttcaacaggttcattaatagtaaatgatttttcaagaaatcaaaaagataacataaataaaaatattgaaaatatcatgtttctacgcaagcataatgttaaaagtgttaacttaatcaacgaatctatggataatattcaagcgacagcaatgatgagaaaaatagattcccaagcaggttataattttttaacaggtaatggttcaaatccaattaatagtaaaactgtacaacaagacattaaaggtaaaaaaatagctaaaacataccatattgttgcagactatctaattgatgtaaatccggattgttaa

SEQ ID NO: 2326 - protein, 200 aa, Artificial Sequence
  Description of Artificial Sequence: synthetic amino acid sequence
MTKKKRLSPSEWLLKQSKRHKRKNTLYTAIVLLVALVLLIFAVKSIQVEPVKSDTRDKDSIRITYLGNVTLNKHIRQTNLNDVFKGIQDTLDHSDFSTGSLIVNDFSRNQKDNINKNIENIMFLRKHNVKSVNLINESMDNIQATAMMRKIDSQAGYNFLTGNGSNPINSKTVQQDIKGKKIAKTYHIVADYLIDVNPDC

SEQ ID NO: 2327 - DNA, 438 bp, Artificial Sequence
  Description of Artificial Sequence: synthetic nucleic acid sequence
atgagcattgaatttagacatcaatcatggtttgacaatcagtataaagaacaaactttatccttcttaacacaacatcaaatcattcatgcagtggtagatgaacctcaagttaaagaggggagcgttcctttagtaaataggattactagtgaaattgcttttgtacgttatcatggacgtaatcattatggttggactaaaaaagatatgactgatcaagaatggcgagatgtaagatatttatatgattatagcgatgatgagttagctgacttggctcgtaaagtcgaaatacttaatcaaaaggctaagaaagtatatgtaatttttaataataactctggcggtcatgcagctaataatgctaaaaagtatcaaaatattttagacattgattatgaaggtttagcaccgcaacaattaaaactattttaa

SEQ ID NO: 2328 - protein, 145 aa, Artificial Sequence
  Description of Artificial Sequence: synthetic amino acid sequence
MSIEFRHQSWFDNQYKEQTLSFLTQHQIIHAVVDEPQVKEGSVPLVNRITSEIAFVRYHGRNHYGWTKKDMTDQEWRDVRYLYDYSDDELADLARKVEILNQKAKKVYVIFNNNSGGHAANNAKKYQNILDIDYEGLAPQQLKLF

SEQ ID NO: 2329 - DNA, 487 bp, Artificial Sequence
  Description of Artificial Sequence: synthetic nucleic acid sequence
gtgtttatgatatttgtgtcgatattactgatgattcgtcacaaaatcaaaccttttaaaatttttgacaaacctaaatatgcgcgtacatatgttgatgctgaagggaaaacataccgttatagtgtaccacccctgtttgcttttataacaacgttatttattgggctattaacaggactgtttggcataggtggaggtgcattgatgacccctcttatgctcatcgtctttagatttccaccacatgttgcagtaggcacaagtatgatgatgattttcttttcaagtgtgatgagttcaatagggcacatctttcaaggacatgtggcttggggctattctatcattctcattatttcaagtgttataggtgcacaaattgaggacttcatttctcccacatcaggattgaaatatgagcgccatcaatataacttatacggccaacttcatagaaaagaatattattatgatgactcttctt

SEQ ID NO: 2330 - protein, 163 aa, Artificial Sequence
  Description of Artificial Sequence: synthetic amino acid sequence
  MOD_RES (163): variable amino acid
VFMIFVSILLMIRHKIKPFKIFDKPKYARTYVDAEGKTYRYSVPPLFAFITTLFIGLLTGLFGIGGGALMTPLMLIVFRFPPHVAVGTSMMMIFFSSVMSSIGHIFQGHVAWGYSIILIISSVIGAQIEDFISPTSGLKYERHQYNLYGQLHRKEYYYDDSSX

SEQ ID NO: 2331 - DNA, 531 bp, Artificial Sequence
  Description of Artificial Sequence: synthetic nucleic acid sequence
gtggtaagagattacttaatgcgtgaattaccgtttggttctgatggcgtatttacaccggaagcctttgttgaaagaacaaattacgatcttgcgaatgatttaggtaatctagtgaatcgtactatctctatgataaacaaatatttccacggcgaattacctgcataccaaggtccaaaacatgaattggatgaaaaaatggaagcgatggcgcttgaaactgttaaatcattcaatgataatatggaaagtttacaattttctgttgctttatcaacagtatggaaatttattagtcgtacaaacaaatatattgatgaaactcaaccttgggttcttgcaaaagatgaaaatcaacgtgagatgcttggtaatgtaatggcacatcttgtcgagaacattcgtttcgctacaatcttattacaaccattcttgacgcatgcacctagagagatatttaagcaacttaatattaacaatccggatttacatcaattagatagtctgcaacaatatggtatgttttag

SEQ ID NO: 2332 - protein, 176 aa, Artificial Sequence
  Description of Artificial Sequence: synthetic amino acid sequence
VVRDYLMRELPFGSDGVFTPEAFVERTNYDLANDLGNLVNRTISMINKYFHGELPAYQGPKHELDEKMEAMALETVKSFNDNMESLQFSVALSTVWKFISRTNKYIDETQPWVLAKDENQREMLGNVMAHLVENIRFATILLQPFLTHAPREIFKQLNINNPDLHQLDSLQQYGMF

SEQ ID NO: 2333 - DNA, 318 bp, Artificial Sequence
  Description of Artificial Sequence: synthetic nucleic acid sequence
atggagaagtcagttaaacttgctgttggcatctatctagcaattattttaattatttgtagtatttacctcgcatttatacttattggaagcttaaatggtaaagacatgagtaattctgttttagatactgatcactctcgtatcaacaatacttcaagaaacagtaacgaagatgttacgtcatcaaataatgagtcaaacaatacaaaagcgcactcatttgcaaactctgaatataaagctattaacataaacgaagcatttaaaaataataagcaaattaaaaaagcgaattcgagttatcaatactattga

SEQ ID NO: 2334 - protein, 105 aa, Artificial Sequence
  Description of Artificial Sequence: synthetic amino acid sequence
MEKSVKLAVGIYLAIILIICSIYLAFILIGSLNGKDMSNSVLDTDHSRINNTSRNSNEDVTSSNNESNNTKAHSFANSEYKAININEAFKNNKQIKKANSSYQYY

SEQ ID NO: 2335 - DNA, 303 bp, Artificial Sequence
  Description of Artificial Sequence: synthetic nucleic acid sequence
atgaatggtagccaaaatcgatatttcataaataatgtttctttaaaaattcctcggaagagtaattcctctaaatacggacctataatacatatcattaaaacaacagttgcaacaattgaaatatgtggtaaatggtctttttgtaaaagtaaatctaaactttcattgatttctttctcattcgctgtagtatcgttgccagtaaatatgaccattaatacactacttagaatactaaaaaccattgataataccagaaaaccaatattaataaagatatcttttcccctcattgattga

SEQ ID NO: 2336 - protein, 100 aa, Artificial Sequence
  Description of Artificial Sequence: synthetic amino acid sequence
MNGSQNRYFINNVSLKIPRKSNSSKYGPIIHIIKTTVATIEICGKWSFCKSKSKLSLISFSFAVVSLPVNMTINTLLRILKTIDNTRKPILIKISFPLID

SEQ ID NO: 2337 - DNA, 342 bp, Artificial Sequence
  Description of Artificial Sequence: synthetic nucleic acid sequence
atgttcacaatcaaacctgtagaaatagctacaactaaaatggcgataacaaatgagactacaaattttttcttgaatagtttcgataataatacaacttctggaatacttgcaccagcaccaccaatgatcaaagcaacaactgtcccaagcgacattccttttgaagctaatgcttcagctataggtaacattgtttcaggtctaatatacattggaatgcctataacagatgcaatgaatacagatataacgccatcaccacttgcgtattttgtaataaatgtttcgggtacaaagccatatatgaacgctccaataaacacaccaataaataggtaa

SEQ ID NO: 2338 - protein, 113 aa, Artificial Sequence
  Description of Artificial Sequence: synthetic amino acid sequence
MFTIKPVEIATTKMAITNETTNFFLNSFDNNTTSGILAPAPPMIKATTVPSDIPFEANASAIGNIVSGLIYIGMPITDAMNTDITPSPLAYFVINVSGTKPYMNAPINTPINR

SEQ ID NO: 2339 - DNA, 390 bp, Artificial Sequence
  Description of Artificial Sequence: synthetic nucleic acid sequence
atgttaatctataatagcaaattaattaatgaggtgagtataatgttaaatattgaaatatacgaagaagctatgtgctgttctactggagtatgtggtccagaaccggatgaaacactaataaaagcgaaccaaatcaatgaatatttaaagcaaaatcaaatagaagttcaacgttataatatgaataataatccgaatgaattcattaaaaatcaagaagttattcgtttaattcaagaaaaaggtgatgaagttttaccaatcacttttatagaaggcggtatagctaaaacgggcgcttatattacccaagaagaagccgatgaaattattacagttaatcaaatgagaaatggaggatgctgtggtggagatggatgctgttaa

SEQ ID NO: 2340 - protein, 129 aa, Artificial Sequence
  Description of Artificial Sequence: synthetic amino acid sequence
MLIYNSKLINEVSIMLNIEIYEEAMCCSTGVCGPEPDETLIKANQINEYLKQNQIEVQRYNMNNNPNEFIKNQEVIRLIQEKGDEVLPITFIEGGIAKTGAYITQEEADEIITVNQMRNGGCCGGDGCC

SEQ ID NO: 2341 - DNA, 429 bp, Artificial Sequence
  Description of Artificial Sequence: synthetic nucleic acid sequence
atgcttgaattaccttctgcatggacagattatttaaatacaacgagtaatgacgcttcttgcttaggtcaattatcaggtttaaatgaaaatagagttaaatataattcagcacttgaaaaactacgtaaccaagatgatacgaccatgatgttagttgcgagacctactcactcttctatatatgaaattcaaagagcgcaacaagaattcatcatccactggtggtgtgactacttcgcctgtatcaggatttttaactcctggtttacctggaacgtcctcttggctacctttcggtgcatttggatcaaattcatccttatggcctggcttgatttcttcgccaccataatgaacgatttcatctactggttgttttgttactttttctgttggttcaccttcgccaactttttcccctgttaa

SEQ ID NO: 2342 - protein, 142 aa, Artificial Sequence
  Description of Artificial Sequence: synthetic amino acid sequence
MLELPSAWTDYLNTTSNDASCLGQLSGLNENRVKYNSALEKLRNQDDTTMMLVARPTHSSIYEIQRAQQEFIIHWWCDYFACIRIFNSWFTWNVLLATFRCIWIKFILMAWLDFFATIMNDFIYWLFCYFFCWFTFANFFPC

SEQ ID NO: 2343 - DNA, 837 bp, Artificial Sequence
  Description of Artificial Sequence: synthetic nucleic acid sequence
gtggatgatgtgacaaaatatggtccagttgatggagatccgattacgtcaacggaagaaattccgtttgataaaaaacgcgaatttgatccaaacttagcgccaggtacagagaaagtcgttcaaaaaggtgaaccaggaacaaaaacaattacaacaccaacaactaagaacccattaacaggggaaaaagttggcgaaggtgaaccaacagaaaaagtaacaaaacaaccagtggatgaaatcgttcattatggtggcgaagaaatcaagccaggccataaggatgaatttgatccaaatgcaccgaaaggtagccaagaggacgttccaggtaaaccaggagttaaaaaccctgatacaggcgaagtagtcacaccaccagtggatgatgtgacaaaatatggtccagttgatggagatccgatcacgtcaacggaagaaattccgtttgataaaaaacgcgaatttgatccaaacttagcgccaggtacagagaaagtcgttcaaaaaggtgaaccaggaacaaaaacaattacaacaccaacaactaagaacccattaacaggggaaaaagttggcgaaggtgaaccaacagaaaaagtaacaaaacaaccagtagatgaaatcgttcattatggtggcgaagaaatcaagccaggccataaggatgaatttgatccaaatgcaccgaaaggtagccaagaggacgttccaggtaaaccaggagttaaaaatcctgatacaggcgaagtagtcacaccaccagtggatgatgaattcttgttgcgctctttgaatttcatatatagaagagtgagtaggtctcgcaactaa

SEQ ID NO: 2344 - protein, 278 aa, Artificial Sequence
  Description of Artificial Sequence: synthetic amino acid sequence
VDDVTKYGPVDGDPITSTEEIPFDKKREFDPNLAPGTEKVVQKGEPGTKTITTPTTKNPLTGEKVGEGEPTEKVTKQPVDEIVHYGGEEIKPGHKDEFDPNAPKGSQEDVPGKPGVKNPDTGEVVTPPVDDVTKYGPVDGDPITSTEEIPFDKKREFDPNLAPGTEKVVQKGEPGTKTITTPTTKNPLTGEKVGEGEPTEKVTKQPVDEIVHYGGEEIKPGHKDEFDPNAPKGSQEDVPGKPGVKNPDTGEVVTPPVDDEFLLRSLNFIYRRVSRSRN

SEQ ID NO: 2345 - DNA, 885 bp, Artificial Sequence
  Description of Artificial Sequence: synthetic nucleic acid sequence
atgttagattcaattatggaatttataaaaacatttgtgatgttgttttttgaattattaatactattcatcatcgtgagctttattgtaagtataatccagcagatagtttcagaagaaaaaataaaacactttttaagtaaacctaatcaagctattaattatattttgggaatggcttttggtgcgatgacaccattttgttcttgttctacaattcctatacttgcaggtttattaaattctaaagttccatttggccctgcaatgagttttttaattgcgtcacctttaatgaatccattaatgatatttatgttatgggccttattaggttggaaagttgctgttgtttactttattttactagcactctttagtgtcttaacaggtctagtattttcaaaaatgaatttagctgaaacttataaaggagtaaatgttaaaggcgatggattttttgctaataaaatgggatctcgttttaaacaagcattaaatgatgcgtgggcatttttatatccaatgcttccttacctatttattggtgtgtttattggagcgttcatatatggctttgtacccgaaacatttattacaaaatacgcaagtggtgatggcgttatatctgtattcattgcatctgttataggcattccaatgtatattagacctgaaacaatgttacctatagctgaagcattagcttcaaaaggaatgtcgcttgggacagttgttgctttgatcattggtggtgctggtgcaagtattccagaagttgtattattatcgaaactattcaagaaaaaatttgtagtctcatttgttatcgccattttagttgtagctatttctacaggtttgattgtgaacatcgttatttaa

SEQ ID NO: 2346 - protein, 294 aa, Artificial Sequence
  Description of Artificial Sequence: synthetic amino acid sequence
MLDSIMEFIKTFVMLFFELLILFIIVSFIVSIIQQIVSEEKIKHFLSKPNQAINYILGMAFGAMTPFCSCSTIPILAGLLNSKVPFGPAMSFLIASPLMNPLMIFMLWALLGWKVAVVYFILLALFSVLTGLVFSKMNLAETYKGVNVKGDGFFANKMGSRFKQALNDAWAFLYPMLPYLFIGVFIGAFIYGFVPETFITKYASGDGVISVFIASVIGIPMYIRPETMLPIAEALASKGMSLGTVVALIIGGAGASIPEVVLLSKLFKKKFVVSFVIAILVVAISTGLIVNIVI

SEQ ID NO: 2347 - DNA, 1176 bp, Artificial Sequence
  Description of Artificial Sequence: synthetic nucleic acid sequence
atgaggaggcatagcatggaaatgtcagaaaggctagcttcaattcctgatagctactttggcaaaacaatgggccgtatagttgaacatggtcctttaccacttataaatatggcagttggaattccagatggagaaacgccaaagggtattatcaatcatttttcagaggcgctatgtattccagaaaatcaaaagtatggtccatttcacggcaaagatgcctttaaacaagctattgttaacttctaccaaagacattacgatgttgaattagacaaagaagatgaagtttgtattttatatgggactaaaaatggtcttgttgcattacctacttgtgttgttaatcctggtgaaattgtacttttacctgatccgggatatacagattatttagcgggggtcatgttagctgatgctaagccactccctttaaaattgtcgccaccaaattatttgccgaattggaatactataagtgctaaagttcttgagaagactaagctaatttatttaacatatcccaataatcctaccggttcgacagcgacacaagatgattttgatgaagcgattcatcgttttaaaggtactcaaacaaagatagttcatgactttgcatatagtgcttttggatttgacgccaaaaatccaagcatattagcttctaaaaatgcaaaagatgttgctatcgagatattctctttatctaaaggttataatatgtcaggctttcgtgttgggtttgctgttggtaataaaaaaatgattcaagcgttaaagaagtatcaaactcatacaaatgcaggtatgtttggagcacttcaagatgctgctacgtatgcactcaatcattatgatgagtttttagaaaagcaaaatgaaatatttagacgtagacgtgataattttgaatcacaactaaaacatgcacatttaccgtttgttcactctaagggaggtatttacatttggttacatacacccccgggttatgatagtgaagcattcgaacagttgttattaaaagaaaagtcaattttagttgcacctggtaaaccatttggtgaaaatggtaatcaatatgtgagggtttcattggcgctcgatgataaacaattagaagaagcggcgaatcgcttaacacaattacggtatttgtatgaaagataa

SEQ ID NO: 2348 - protein, 391 aa, Artificial Sequence
  Description of Artificial Sequence: synthetic amino acid sequence
MRRHSMEMSERLASIPDSYFGKTMGRIVEHGPLPLINMAVGIPDGETPKGIINHFSEALCIPENQKYGPFHGKDAFKQAIVNFYQRHYDVELDKEDEVCILYGTKNGLVALPTCVVNPGEIVLLPDPGYTDYLAGVMLADAKPLPLKLSPPNYLPNWNTISAKVLEKTKLIYLTYPNNPTGSTATQDDFDEAIHRFKGTQTKIVHDFAYSAFGFDAKNPSILASKNAKDVAIEIFSLSKGYNMSGFRVGFAVGNKKMIQALKKYQTHTNAGMFGALQDAATYALNHYDEFLEKQNEIFRRRRDNFESQLKHAHLPFVHSKGGIYIWLHTPPGYDSEAFEQLLLKEKSILVAPGKPFGENGNQYVRVSLALDDKQLEEAANRLTQLRYLYER

SEQ ID NO: 2349 - DNA, 999 bp, Artificial Sequence
  Description of Artificial Sequence: synthetic nucleic acid sequence
atgactaaaattaaattaatgggtgtcagagaagaagatgaacattatattgaaatgtggtcacaacaacatgaagtggaagtggatatgtcgaaagaacagttaactgaagacaatgtccaatctattgaaggatttgatggactatcattgtctcaaacattaccattatcagaaacaatttataataaattaaatcaacttggaattcggcagatcgctcaacgaagtgctggatttgatggttataatttagagttagcatctaaatatggtcttattatatctaatgtgccttcctattcacctcgaagcattgctgagtttaccgtgactcaagccatcaatattgtacgtcactttaatcatattcaaagaaaaatgagattgcacgattttaggtgggaagcatcaattttatctcaatcaatcaaagatttaaaggtagcggttattggcacgggacatattggtggcattgttgcacaaatattctcagaaggatatctatgtgacgttgtagcgtatgatccttttccaagtgaacatgtgaaaccttacgttacctataaacaaagtataaatgaggcaattaaagaggcagatattgtcacaatacatatgccgtcaacacaatataacaattacctgtttaatgaaaacatgtttcaaatgtttaaaaagggtgctgtgtttgtaaattgtgctagaggatccttagtagataccaaggctttgttatctgcaatagagcaaggtcaaattaaaggtgcagcacttgatacttatgaatatgaaattggagtatatacgacagatagaagtgaagaaggtttgaatgacccacttttagaggaattaattactagagaagatattattgttacaccgcatatagcattttatactgaagaggcaatcaaacatcttatttttgatgctttagatgcaacaatggaagtattaaatactggcacgacggagttaagagtaaattaa

SEQ ID NO: 2350 - protein, 332 aa, Artificial Sequence
  Description of Artificial Sequence: synthetic amino acid sequence
MTKIKLMGVREEDEHYIEMWSQQHEVEVDMSKEQLTEDNVQSIEGFDGLSLSQTLPLSETIYNKLNQLGIRQIAQRSAGFDGYNLELASKYGLIISNVPSYSPRSIAEFTVTQAINIVRHFNHIQRKMRLHDFRWEASILSQSIKDLKVAVIGTGHIGGIVAQIFSEGYLCDVVAYDPFPSEHVKPYVTYKQSINEAIKEADIVTIHMPSTQYNNYLFNENMFQMFKKGAVFVNCARGSLVDTKALLSAIEQGQIKGAALDTYEYEIGVYTTDRSEEGLNDPLLEELITREDIIVTPHIAFYTEEAIKHLIFDALDATMEVLNTGTTELRVN

SEQ ID NO: 2351 - DNA, 2349 bp, Artificial Sequence
  Description of Artificial Sequence: synthetic nucleic acid sequence
atgacatgtgctgcgtgctcaaatcgtattgaaaagaaattgaatcgtatgaatcatgttcaagctaaagtgaatctgactactgaaaaagcaactatcgactatgagtctgacgattatcatctcgaagattttgtagagcaaattcaaagtctcggctatgatgttgcagttgagcaagtagaattaaatataaatggtatgacatgtgctgcatgttctaatcgtatagaaaaggttctaaatcaaacgcaaggtgtacaacaggcaacagtaaacttaactaccgaacaagcactcatcaaatattaccctagtgctacgaacacggaagcattaattaagcgtattcaaaatattggatacgatgctgaaactaaaacttcatcaaaagcgcaatcaaatcgtaaaaaacaagagttaaaacataaacgcaataaattaatcatttcagctattttatcgttgccactattattagtaatggtggtgcatatctcacctatttccattccatccattttggtcaatccttgggtacaattaattctttcaacacctgtccaatttattattgggtggcaattttacgttggcgcgtataaaaatttgcgaaatggttcagctaacatggatgtattggttgctgttggtaccagtgccgcatatttttatagcatttatgaaatgatgatgtggctcacacatcaaacacatcacccgcatttatattttgaaacaagtgctattttaattacgttaattcttcttggtaaatatttagaagcacgtgccaaatcacagactaccaatgcattaagcgaattgttaaatttacaagcgaaagaagcacgagtaattaaagaaaataaagaaattatgcttccacttgataaagttaaagtcggagatactttactaataaaacccggcgaaaagatacctgtagatggcaaagtcactaaaggtgatacttctattgacgaatccatgctaactggtgagtctatacctgttgaaaaaagtagtggcgattcagtgattggttctaccatgaataaaaatggttcaatcatgattgaagcaactcaagtaggtggtgatactgcattatcacatataattaaagtggttgaggatgctcaaagttctaaagcaccgattcaacgcttagctgatattatttctggatattttgttccgattgtagttagcattgcggttattacttttatcatatggattatattcgttcaccccgggcaatttgaacctgcacttgtttcagcaatatctgttttagttattgcttgtccctgtgcacttggtttagcaacgcctacatctattatggtaggtacaggacgtgctgcagaaaatggcatattattcaaaggaggccaatttgtagaacgtgcacattatgttgatacaatcgtgctagataaaacaggcacaattactaatggtcaacctgtagtaactgattatgttggtgacaatgatacattacaacttttagcaagtgctgaaaatgcttcagaacatcctcttgctgatgctattgttacttatgctaaagataaaggtcttaatttacttgataatgacacttttaaatcaattccgggacatggtattaaagctacgattcatcaacaacaaatccttgtgggcaatcgaaaattaatgaacgattacaatatatctattagtaataaattaaatgaccaattaaatcactatgaacatttaggtcaaacggcaatgatgattgccgtggataatcaaattaatggaatcattgctgttgctgatacagtaaaaaatgatgctaaacaagcgataaaagaactaagaaatatgaatatcgacgtggttatgctgactggtgataacaatcgaacagctcaaaccatcgccaaacaagttggcattgaacatgtaattgcagaagtgttgcccgaagaaaaggcacatcaaatctctttattacaagacaaaggtaaacaggttgccatggtcggtgatggaattaatgatgcgcctgcacttgtaaaagccgatattggaatggctataggcactggagctgaggtagcgattgaagctgcagatattacgattcttggtggtgacttgctattagttccaaaagctatcaaagcaagtaaagctacgattaaaaatattcgacaaaatttattttgggcatttggatataacgtagctggcatcccaatagctgcttgtggtttattagcaccttggattgccggtgctgctatggcattaagttctgttagcgtagttatgaatgcattaagactgaaaaaaatgaaactatag

SEQ ID NO: 2352 - protein, 782 aa, Artificial Sequence
  Description of Artificial Sequence: synthetic amino acid sequence
MTCAACSNRIEKKLNRMNHVQAKVNLTTEKATIDYESDDYHLEDFVEQIQSLGYDVAVEQVELNINGMTCAACSNRIEKVLNQTQGVQQATVNLTTEQALIKYYPSATNTEALIKRIQNIGYDAETKTSSKAQSNRKKQELKHKRNKLIISAILSLPLLLVMVVHISPISIPSILVNPWVQLILSTPVQFIIGWQFYVGAYKNLRNGSANMDVLVAVGTSAAYFYSIYEMMMWLTHQTHHPHLYFETSAILITLILLGKYLEARAKSQTTNALSELLNLQAKEARVIKENKEIMLPLDKVKVGDTLLIKPGEKIPVDGKVTKGDTSIDESMLTGESIPVEKSSGDSVIGSTMNKNGSIMIEATQVGGDTALSHIIKVVEDAQSSKAPIQRLADIISGYFVPIVVSIAVITFIIWIIFVHPGQFEPALVSAISVLVIACPCALGLATPTSIMVGTGRAAENGILFKGGQFVERAHYVDTIVLDKTGTITNGQPVVTDYVGDNDTLQLLASAENASEHPLADAIVTYAKDKGLNLLDNDTFKSIPGHGIKATIHQQQILVGNRKLMNDYNISISNKLNDQLNHYEHLGQTAMMIAVDNQINGIIAVADTVKNDAKQAIKELRNMNIDVVMLTGDNNRTAQTIAKQVGIEHVIAEVLPEEKAHQISLLQDKGKQVAMVGDGINDAPALVKADIGMAIGTGAEVAIEAADITILGGDLLLVPKAIKASKATIKNIRQNLFWAFGYNVAGIPIAACGLLAPWIAGAAMALSSVSVVMNALRLKKMKL

SEQ ID NO: 2353 - DNA, 402 bp, Artificial Sequence
  Description of Artificial Sequence: synthetic nucleic acid sequence
atgtattcatgctataataatttagtgaaatatgcattaacgatgcaatttgatatagaggtagatgtaatgtatgaagtaaaactcgatgcatttaatggtccattagacttattattgcatctaattcaaaaatatgaaattgatatttatgatatccctatgaaagccttaactgaacagtacatgcaatatgttcatgcgatgaatcagctagaaattaatgttgctagtgaatatttagttatggcatcagaattactaatgattaaaagtaaattcaacgatgaatataaccaaaaatccaacactaaaaacatgctgtgcggcttctgcactatgaactgttgtttcaccattaactgttgtagtaaaattagcatccatcgctccagtaattga

SEQ ID NO: 2354 - protein, 133 aa, Artificial Sequence
  Description of Artificial Sequence: synthetic amino acid sequence
MYSCYNNLVKYALTMQFDIEVDVMYEVKLDAFNGPLDLLLHLIQKYEIDIYDIPMKALTEQYMQYVHAMNQLEINVASEYLVMASELLMIKSKFNDEYNQKSNTKNMLCGFCTMNCCFTINCCSKISIHRSSN

SEQ ID NO: 2355 - DNA, 600 bp, Artificial Sequence
  Description of Artificial Sequence: synthetic nucleic acid sequence
gtgacttttatgtctacgaataatgagattgaatttaaacaaatactagatcaagatacttactcaaaaatctatgaacactatttcaaaaatcaatcaccttttaagcaaactaatttctatatcgacacagagaattttaaattaaaacagcatcatgctgctttgcgtataagggtaaaagattatatgtttgaaatgactttaaaagtccctgctgaagttggattgacagaatataatcactcagtaaatatagaacctgaacttgatatgtcacttcaactttctcaattacccaacgatattagaaatattttagaacaggactttaatattttagaaaatgagcttaaagtactaggaaacttaactacctatcgtttagaaaccgattatcaaaatgaattactagtattagataagagtgaatatctcggcaaaactgattatgaattagagtttgaagttcattcttatgatgaaggatattcaaaatttaaaactttacttcaacattttaatcttcaacatcaaaaacccttgaataaagtgcaacgtttttttcaagaaaaacaaaatgcaagtgataaagagtaa

SEQ ID NO: 2356 - protein, 199 aa, Artificial Sequence
  Description of Artificial Sequence: synthetic amino acid sequence
VTFMSTNNEIEFKQILDQDTYSKIYEHYFKNQSPFKQTNFYIDTENFKLKQHHAALRIRVKDYMFEMTLKVPAEVGLTEYNHSVNIEPELDMSLQLSQLPNDIRNILEQDFNILENELKVLGNLTTYRLETDYQNELLVLDKSEYLGKTDYELEFEVHSYDEGYSKFKTLLQHFNLQHQKPLNKVQRFFQEKQNASDKE

SEQ ID NO: 2357 - DNA, 384 bp, Artificial Sequence
  Description of Artificial Sequence: synthetic nucleic acid sequence
atggaacacggtgatattatgtctaaaacaccatatgagttgattggtcaaaaagccttgtatcaaatgattgatcatttctatcaacttgtcgagaaagattctcgtatcaatcatttattcccaggcgatttcaaggaaaccagtcgaaagcagaagcaatttttgacacagtttcttggaggtcctgacttatatacccaagaacatggtcatcccatgttaaaacgaagacatatggaatttacaattagcgagtatgaacgtgatgcatggcttgagaacatgcatactgctattcaacacgccaaacttcctgcgggtgtaggcgattacttgtttgagcgattaagacttactgcaaatcacatggtaaattcctaa

SEQ ID NO: 2358 - protein, 127 aa, Artificial Sequence
  Description of Artificial Sequence: synthetic amino acid sequence
MEHGDIMSKTPYELIGQKALYQMIDHFYQLVEKDSRINHLFPGDFKETSRKQKQFLTQFLGGPDLYTQEHGHPMLKRRHMEFTISEYERDAWLENMHTAIQHAKLPAGVGDYLFERLRLTANHMVNS

SEQ ID NO: 2359 - DNA, 777 bp, Artificial Sequence
  Description of Artificial Sequence: synthetic nucleic acid sequence
atggagaataagagtcgtgaagatactaatctatcacctgttagcaaaatagaaatctattctttttttgatccttttagcaaagattgttttaaattatctgcaatcttatcaaaattaagaattgaatataataaatatataaaggtaagacatattttaaacccttctttaaaggtattaactaagtgtcaagctcaaagtacttcagattttgacaatattgcacttgcctataaagccgctgaacttcaaggtcgtatcagagcagaaagatttatacatttaatgcaaaatgaaatcattccaaaacgtgatattattaccgaagatatgatttctgattgtattaataatgccggcattgactatcaagtttttaaagaagacttgcaaaaggacaagttgactgacagcttgaaagttgatcttcacattgcaagagaaatggaaatagaacaagctccctcacttgtttttttcagcgaaaatgttcatgaagaaggtttaaaagtcgaaggattatatccttatcatatttatacttacattattaatgagttaatgggacaacctatagagaaaaatcttcctccaaaattagaatactacattcaaaagaaacaactagtaacaatggaagaacttttaacgatctatgaatggcctgaaaaattgctaaataaagaattaaagaaactcacacttcaacaaaaagttgaaaagttgcaatatccagagggagaattttggaaatctaaaatgcctcagtgttaa

SEQ ID NO: 2360 - protein, 258 aa, Artificial Sequence
  Description of Artificial Sequence: synthetic amino acid sequence
MENKSREDTNLSPVSKIEIYSFFDPFSKDCFKLSAILSKLRIEYNKYIKVRHILNPSLKVLTKCQAQSTSDFDNIALAYKAAELQGRIRAERFIHLMQNEIIPKRDIITEDMISDCINNAGIDYQVFKEDLQKDKLTDSLKVDLHIAREMEIEQAPSLVFFSENVHEEGLKVEGLYPYHIYTYIINELMGQPIEKNLPPKLEYYIQKKQLVTMEELLTIYEWPEKLLNKELKKLTLQQKVEKLQYPEGEFWKSKMPQC

SEQ ID NO: 2361 - DNA, 1809 bp, Artificial Sequence
  Description of Artificial Sequence: synthetic nucleic acid sequence
atgagtcaacaattaacaagagaagaacaggaacgtaaatatcctgaatatacatgggatttaacaactatttttaaaagtgatgaagcatttgaagaagcttttaaaagtattgaagctaaaataggtgaagaagaaaaatttaaaggtcatcttggtgaaagtgctgaaacattatatgaagcgctaagtcttgaagacgagttaggtacaaaattagaaaaggtatatgtatacgcacatttaaaacaagatcaagatactgcaaatgataaatataccggtttagaagcgcgtgcacatcaacttgttattaaatatagctctgcatggagttttttagtacctgaaattttacaactagatgaagctactattcaatcttttatcgattctaatgatgatttaaaacgatatgaattcgatttgaaattgattaatgagaaacgtccacatatattagatgcgaatacagaaaagttattaacagaagcacaagacgcactttcaacgccttctaatgtatatggaatgttcagcaatgcagatttagaatttgaagatgctatagataaagatggtcaagcttatcctttaacacaaggtacatttatcaagtatttagagtctgatgatcgtgagttaagagcttctgcttttagaaatgtttataaagcatacggtgcgcataataacacgctaggtgctactttagctggtgaggttaagaaaaatgtatttaatgctagaactcatcattatcgttcagcacgtgaaagagctttaagtaataatcatattccagaagctgtttacgataacttaatcaaaacggtccataaatacttacctttattacacagatacacgaagcttagacaagagttactaggtttagacgatttaaaaatgtatgatctttatacacctcttgttaaagatgtcaaatttgaaatgccatatgaagaggcaaaatcctggatgttaaaagcacttgagccaatgggagaagaatacttaaacgtggttaaggaaggtctagataaccgttgggtcgatgtatatgaaaataaaggtaaacgttcaggcggatattcatccggtggacatttaactaatcctttcattttacttaactggtcagacactgtttctgatttatatactttagtacatgaatttggtcactctgcacatagttactttagtagacagaatcaaccatcaaatttaagcgattatacaatctttgtcgctgaggtagcatcaacttgtaatgaggctttacttagtgactacatggacaaacatttagatgatgaacgacgtctattgttacttaaccaagaattagaacgatttagagcaacactattccgtcaaacaatgtttgctgaatttgaacataaaatacatcaaatagaagaagctggggagccgttaacgccaaatcgtatgaatgaagaatatgctaaactgaacaaactatattttggtgaagcagtagaaactgacgatgatattagtaaagaatggtcacgtattcctcatttctatatgaattattatgtatatcaatacgcaactggttatagtgcagctcaaagtttaagtcatcaaattttaactgagggtcaacctgctgttgaacgatatatcaatgaattcttaaaaaagggtagctcaaactatccgattgaaattttaaaaaatgcaggtgttgacatgacaacacctcaaccaatagaggaagcttgtgaagtattcgaacaaaaattagatgcttttgaaaagttaatgaaagcttag

SEQ ID NO: 2362 - protein, 602 aa, Artificial Sequence
  Description of Artificial Sequence: synthetic amino acid sequence
MSQQLTREEQERKYPEYTWDLTTIFKSDEAFEEAFKSIEAKIGEEEKFKGHLGESAETLYEALSLEDELGTKLEKVYVYAHLKQDQDTANDKYTGLEARAHQLVIKYSSAWSFLVPEILQLDEATIQSFIDSNDDLKRYEFDLKLINEKRPHILDANTEKLLTEAQDALSTPSNVYGMFSNADLEFEDAIDKDGQAYPLTQGTFIKYLESDDRELRASAFRNVYKAYGAHNNTLGATLAGEVKKNVFNARTHHYRSARERALSNNHIPEAVYDNLIKTVHKYLPLLHRYTKLRQELLGLDDLKMYDLYTPLVKDVKFEMPYEEAKSWMLKALEPMGEEYLNVVKEGLDNRWVDVYENKGKRSGGYSSGGHLTNPFILLNWSDTVSDLYTLVHEFGHSAHSYFSRQNQPSNLSDYTIFVAEVASTCNEALLSDYMDKHLDDERRLLLLNQELERFRATLFRQTMFAEFEHKIHQIEEAGEPLTPNRMNEEYAKLNKLYFGEAVETDDDISKEWSRIPHFYMNYYVYQYATGYSAAQSLSHQILTEGQPAVERYINEFLKKGSSNYPIEILKNAGVDMTTPQPIEEACEVFEQKLDAFEKLMKA

SEQ ID NO: 2363 - DNA, 609 bp, Artificial Sequence
  Description of Artificial Sequence: synthetic nucleic acid sequence
atgggtggtattgctatacataaaggtgatattgcagaaatgagaacaggtgaagggaaaacattgactgcaaccatgccgacgtatttgaatgctttagctggtagaggtgtacatgttattacagtcaatgaatatctatcaagttcacaaagtgaagaaatggctgaactatataactatcttggcttaactgtaggtttgaacttaaatagtaagtcaactgaagaaaaacgtgaggcttacgcacaagatatcacttatagtacgaataatgaacttgggtttgattatcttagagataatatggtgaactatgctgaagagagagtaatgcgtcctctacattttgcaattattgatgaggtcgattccatattgatcgacgaagcaagaacacctttaattatttctggtgaagcggaaaaatctacttctttatatggaaaattgattattattagttataaattattcaaaaataaagagcaactattttatgttgcatatgaaataaagggaaagaaagtctactataaacgagatataaatcctaaagattatattaaagaacataaacctgattgtaaggatatacgtagaaaatga

SEQ ID NO: 2364 - protein, 202 aa, Artificial Sequence
  Description of Artificial Sequence: synthetic amino acid sequence
MGGIAIHKGDIAEMRTGEGKTLTATMPTYLNALAGRGVHVITVNEYLSSSQSEEMAELYNYLGLTVGLNLNSKSTEEKREAYAQDITYSTNNELGFDYLRDNMVNYAEERVMRPLHFAIIDEVDSILIDEARTPLIISGEAEKSTSLYGKLIIISYKLFKNKEQLFYVAYEIKGKKVYYKRDINPKDYIKEHKPDCKDIRRK

SEQ ID NO: 2365 - DNA, 300 bp, Artificial Sequence
  Description of Artificial Sequence: synthetic nucleic acid sequence
atggattattattatcaatttcataagcatcaacattacttcctatgtcatgatattttagaagatgcttggaaatcacaaaatactttttcaaaacatgatgcagtagtaagtctcattttgtttgcaacagctaattatcactatcgtcgtgggaatttaaaaggcgcattaaaatcttttgaaaaagctttattaactattaaccacgctaaagatgacactcaattacaccttaatatcaatgaatttaaacaacttattgtgaaaatgattgaagcagtaaaattacaaaaaact

SEQ ID NO: 2366 - protein, 100 aa, Artificial Sequence
  Description of Artificial Sequence: synthetic amino acid sequence
MDYYYQFHKHQHYFLCHDILEDAWKSQNTFSKHDAVVSLILFATANYHYRRGNLKGALKSFEKALLTINHAKDDTQLHLNINEFKQLIVKMIEAVKLQKT

SEQ ID NO: 2367 - DNA, 960 bp, Artificial Sequence
  Description of Artificial Sequence: synthetic nucleic acid sequence
atgcatcatgataaccatgcctcacatcatcatagtggccatgcacatcatcatggaaattttaaagttaagttttttgtttcattaatttttgcaatacctatcattctcttatcgccaatgatgggtgttaacttaccttttcaattcacatttccaggttctgaatgggtagtgttaatattaagtacaattttattcttttatggtggtaaaccgttcttgtctggtggtaaagatgaaattgctacaaaaaaaccaggcatgatgaccttagttgctctaggtatttcagtagcttatatttatagcttgtatgctttttatatgaataactttagtagtgcaactggtcatacaatggactttttttgggaattagcaaccttaattttaattatgctattaggacattggatagaaatgaatgctgtcggaaatgctggagatgctttaaagaaaatggcagaactattacctaatagtgctattaaagttatggataatggccaacgcgaagaagttaaaatatcagacatcatgactgatgatatcgtcgaagtaaaagccggagaaagcattccaacagatggtattatcgttcaaggacaaacatctatagatgaatccctagtcactggagaatctaaaaaagtacaaaaaaatcaaaatgacaacgtcatcgggggttctattaatgggtctggaacaatacaagtcaaggttacagctgttggagaagatggatatctttctcaagttatgggacttgttaatcaagcacaaaatgataaatctagtgctgaattgttatctgataaagtagcgggttatttattctactttgctgtaagtgttggcgtgatttcttttattgtctggatgctcattcaaaatgatgttgattttgcattagaacgtcttgtaactgtgttagtcattgcttgtcccatgctttag

SEQ ID NO: 2368 - protein, 319 aa, Artificial Sequence
  Description of Artificial Sequence: synthetic amino acid sequence
MHHDNHASHHHSGHAHHHGNFKVKFFVSLIFAIPIILLSPMMGVNLPFQFTFPGSEWVVLILSTILFFYGGKPFLSGGKDEIATKKPGMMTLVALGISVAYIYSLYAFYMNNFSSATGHTMDFFWELATLILIMLLGHWIEMNAVGNAGDALKKMAELLPNSAIKVMDNGQREEVKISDIMTDDIVEVKAGESIPTDGIIVQGQTSIDESLVTGESKKVQKNQNDNVIGGSINGSGTIQVKVTAVGEDGYLSQVMGLVNQAQNDKSSAELLSDKVAGYLFYFAVSVGVISFIVWMLIQNDVDFALERLVTVLVIACPML

SEQ ID NO: 2369 - DNA, 930 bp, Artificial Sequence
  Description of Artificial Sequence: synthetic nucleic acid sequence
atggataaaactggtactttaactgagggtaacttttctgtgaatcattatgagagctttaaaaatgatttgagtaatgatacaatattaagccttttcgcctcattagaaagtcaatctaatcacccattagctataagtattgttgattttgcgaaaagtaaaaatgtttcatttactaatccacaagacgttaataatattccaggtgtcggattagaaggtctaattgataataaaacatataaaataacaaatgtctcttatcttgataaacataaacttaattatgacgatgacttgtttactaaattagctcaacaaggtaattcaatcagttatttaattgaggatcaacaagtcattggcatgattgctcaaggagatcaaattaaagaaagctcaaaacaaatgatagctgatttactatcaagaaatattacaccagtcatgcttacaggtgacaataatgaagtggcacacgctgtcgcaaaagaattaggtattagtgatgttcacgcacaactcatgccagaagataaggaaagcattataaaagattatcaaagtgacggtaataaagtcatgatggtcggagacggtatcaacgatgcgccgagtcttataagagccgatattggtatagcaattggtgcaggcacagatgttgcagtggattcaggtgatatcatacttgttaaaagtaatccatcagatatcattcatttcttgactctttcaaataatactatgagaaaaatggtgcaaaacttatggtggggtgcaggttataatattgttgctgtacctttagcagctggcgcattagcttttatcgggttaatattatcaccagctgtaggagcaatattaatgtctttaagtacagttatagtagcgattaatgcttttacattaaaattaaaataa

SEQ ID NO: 2370 - protein, 309 aa, Artificial Sequence
  Description of Artificial Sequence: synthetic amino acid sequence
MDKTGTLTEGNFSVNHYESFKNDLSNDTILSLFASLESQSNHPLAISIVDFAKSKNVSFTNPQDVNNIPGVGLEGLIDNKTYKITNVSYLDKHKLNYDDDLFTKLAQQGNSISYLIEDQQVIGMIAQGDQIKESSKQMIADLLSRNITPVMLTGDNNEVAHAVAKELGISDVHAQLMPEDKESIIKDYQSDGNKVMMVGDGINDAPSLIRADIGIAIGAGTDVAVDSGDIILVKSNPSDIIHFLTLSNNTMRKMVQNLWWGAGYNIVAVPLAAGALAFIGLILSPAVGAILMSLSTVIVAINAFTLKLK

SEQ ID NO: 2371 - DNA, 483 bp, Artificial Sequence
  Description of Artificial Sequence: synthetic nucleic acid sequence
atgatgaaaaaagataaagacactaatgaccaaaaaagtgagagccatatgaagcataatgatgaaagtaaagttcctgaagatatgacatcgactaatgagggtgaatttaaagtaggagataaagtaacgattacagcaggacatatgccaggtatgaaaggtgcagaagctactgtaaaaggtgcgtataaaacatatgcctatgttgtaagttataaacccacaaatggaaatgaaaaagtaaacaatcataaatggatcgtaaacgaagaaatcaaagatgcacctaaagatggatttagtaaaggcgatactgttaaattagaagcaagtcatatgtctggtatgaaaggtgctacagccaatatagataacgtgaaaaagacgactgtttacgtagttgattacaaatccaaagataatggtaaaatcattaaaaatcataaatggatgacaggaaatgagctgaaagcacgataa

SEQ ID NO: 2372 - protein, 160 aa, Artificial Sequence
  Description of Artificial Sequence: synthetic amino acid sequence
MMKKDKDTNDQKSESHMKHNDESKVPEDMTSTNEGEFKVGDKVTITAGHMPGMKGAEATVKGAYKTYAYVVSYKPTNGNEKVNNHKWIVNEEIKDAPKDGFSKGDTVKLEASHMSGMKGATANIDNVKKTTVYVVDYKSKDNGKIIKNHKWMTGNELKAR

SEQ ID NO: 2373 - DNA, 405 bp, Artificial Sequence
  Description of Artificial Sequence: synthetic nucleic acid sequence
gtgtcaataatgacaaagaaaataatttactttatatgtacaggtaattcatgccgtagccaaatggctgaaggctggggcaaaaacatcttaggtgatgaatggcaagtatattctggcggtattgaggcacacggtgtcaatccaaaggcaattgaagcaatgaaagaagttggaattgatatctcaaaccatacttctaatttaattgacaacactatactaaaccaatccgatttagtagtaactctatgtagtgatgctgacaataattgtcctatattaccgccgaatgtaaaaaaagaacattggggatttgatgatccagcaggcaaaccttggtcagaattccaacgtgttagagatgaaatcaaaaccgccattgaatcatttaaaactagataa

SEQ ID NO: 2374 - protein, 134 aa, Artificial Sequence
  Description of Artificial Sequence: synthetic amino acid sequence
VSIMTKKIIYFICTGNSCRSQMAEGWGKNILGDEWQVYSGGIEAHGVNPKAIEAMKEVGIDISNHTSNLIDNTILNQSDLVVTLCSDADNNCPILPPNVKKEHWGFDDPAGKPWSEFQRVRDEIKTAIESFKTR

SEQ ID NO: 2375 - DNA, 363 bp, Artificial Sequence
  Description of Artificial Sequence: synthetic nucleic acid sequence
atgattgtttactttttcatttccatttgtgggtttataacttacaacataggcatatgttttatacgcaccttttacagtagcttctgcacctttcatacctggcatatgtcctgctgtaatcgttactttatctcctactttaaattcaccctcattagtcgatgtcatatcttcaggaactttactttcatcattatgcttcatatggctctcacttttttggtcattagtgtctttatcttttttcatcatattaaaatctccctattgattagtttgttacttttatttgacccatcattccattatcttcatgctcaagtatatgacagtgaaacatgtatgttccagtatttttaa

SEQ ID NO: 2376 - protein, 120 aa, Artificial Sequence
  Description of Artificial Sequence: synthetic amino acid sequence
MIVYFFISICGFITYNIGICFIRTFYSSFCTFHTWHMSCCNRYFISYFKFTLISRCHIFRNFTFIIMLHMALTFLVISVFIFFHHIKISLLISLLLLFDPSFHYLHAQVYDSETCMFQYF

SEQ ID NO: 2377 - DNA, 438 bp, Artificial Sequence
  Description of Artificial Sequence: synthetic nucleic acid sequence
atgttatggaggtttgttatgggaagtttttttaatcggatgactcgaaaagagaatcctactgtagagtctggtgttaaagattttggcgtcatatctgttgaaaatggctaccaaatatttatcggaggtaatggtggtactgatgttactgtaggtaaattgttaacgacagttgaaaccgaagatgaagtgattcaattatgtggtgccctcatgcagtattacagagaaacaggtgtttacgctgaaagaacagcaccatggttagaacgtatgggctttgaaaatgtcaagaatgtcttattaaatcaagaaaagcaaaaagaactgtatttaagaattatggaagccaaaaaagctgttgagaatgaaccatgggaaactattgttgaaaataaagaagcacaaaaaatctttgaagttgagaaggtgtaa

SEQ ID NO: 2378 - protein, 145 aa, Artificial Sequence
  Description of Artificial Sequence: synthetic amino acid sequence
MLWRFVMGSFFNRMTRKENPTVESGVKDFGVISVENGYQIFIGGNGGTDVTVGKLLTTVETEDEVIQLCGALMQYYRETGVYAERTAPWLERMGFENVKNVLLNQEKQKELYLRIMEAKKAVENEPWETIVENKEAQKIFEVEKV

SEQ ID NO: 2379 - DNA, 315 bp, Artificial Sequence; identical to SEQ ID NO: 91
  Description of Artificial Sequence: synthetic nucleic acid sequence

SEQ ID NO: 2380 - protein, 104 aa, Artificial Sequence; identical to SEQ ID NO: 92
  Description of Artificial Sequence: synthetic amino acid sequence

SEQ ID NO: 2381 - DNA, 639 bp, Artificial Sequence; identical to SEQ ID NO: 1409
  Description of Artificial Sequence: synthetic nucleic acid sequence

SEQ ID NO: 2382 - protein, 212 aa, Artificial Sequence; identical to SEQ ID NO: 1410
  Description of Artificial Sequence: synthetic amino acid sequence

SEQ ID NO: 2383 - DNA, 969 bp, Artificial Sequence; identical to SEQ ID NO: 1411
  Description of Artificial Sequence: synthetic nucleic acid sequence

SEQ ID NO: 2384 - protein, 322 aa, Artificial Sequence; identical to SEQ ID NO: 1412
  Description of Artificial Sequence: synthetic amino acid sequence

SEQ ID NO: 2385 - DNA, 351 bp, Artificial Sequence
  Description of Artificial Sequence: synthetic nucleic acid sequence
atggcggaaaaacaatattctgcagcacaaatggtaattgatactttaaaaaataatggagttgagtatgtatttggtattccaggtgcgaaaatcgactacttatttaatgcactagaggatgacgatattgaattagtcgttacgcgtcatgaacaaaacgcagcgatgattgcacaaggtattggtcgtttaacaggaaaaccaggtgtggctattactacaagtggcccaggggtaagtaacttaactactggtttattaactgcaacttctgaaggtgaccctgtattagctatcggtggtcaagttaaaagaaatgacttattacgtttaacatcaatacgctaa

SEQ ID NO: 2386 - protein, 116 aa, Artificial Sequence
  Description of Artificial Sequence: synthetic amino acid sequence
MAEKQYSAAQMVIDTLKNNGVEYVFGIPGAKIDYLFNALEDDDIELVVTRHEQNAAMIAQGIGRLTGKPGVAITTSGPGVSNLTTGLLTATSEGDPVLAIGGQVKRNDLLRLTSIR

SEQ ID NO: 2387 - DNA, 2097 bp, Artificial Sequence
  Description of Artificial Sequence: synthetic nucleic acid sequence
atgaaaggtctaatgggggatacctctgacaatattcctggcgttgctggtgtcggcgaaaagacggctattaaattacttaatcaatttgagtcagtagaaggggtctatgaacatattgaggaggtcactgcaaaaaaattaaaagaaaaactcatcaatagtaaagatgatgccttaatgagtaaagatttagcaacaatcaatgttcacagtccgattgaagtatcattagaagatacaaaattaactctacaagacgacactacagaaaaaattgaactatttaaaaagctagaatttaaacaactattagcagatatagacacatcctctacgaatgaagaagtcatagataaaacttttgaaattgagcaagactttcaaaatgtagatttgaatgatttaaacgaagcggtaatacattttgaactcgaaggcactaattatcttaaagacactattctcaagtttggtttttatacaaatcatcaacatgtagtgataaatgctgaggatgtaaaggattataaacatttagttcaatggcttgaagataaaaatacaactaaaattgtctatgatgcaaaaaaaacttatgtatctgctcatcgattagggattaatatagaaaatattgaatttgatgttatgttagcaagctatattattgacccatcacgttctattgatgacgttaaatctgtggtaagtttatatggacaaaattatgtaaaagataatattacaatatttgggaaaggtaagaaacatcatatacctgaagaaccaattctaaacgaacacattgcctctgtgacagaagctatagcagctgtaactccaaccatgaaatcacagttagaagattataatcaaattgaactgttgaaagatttagaattaccattagcaagaattttaagtgaaatggaagaaattggtatatataccgatatcaatgatttgaaagaaatggaattcgaaattcaaaaaaaattggatgtattaatatccaatattcatgagtcggctggtgaagcgtttaatatcaattctcctaagcaattaggtgttgttttatttgaaacattacaattgcctgtcattaagaagaccaaaacgggctattcaacagctgtagacgtattagaaaaactacaaggtgagcatcctattatagatgatattttagaatatagacaacttgctaagttgcaatctacgtatgtagagggattacaaaaagtaataagcaaagatcatagaattcacacacgttttaatcaaacgcttgctcaaactggtagattatcaagtatagatcctaatttacaaaatatacctatacgattagaagaaggaagaaagattagaaaggcctttaaaccaacttctaaagatagtgtgattttatctgctgattattcacaaattgagttacgtgtacttgctcatattacgcaagatgaaagtttaaaacatgcatttataaacggacatgatattcacactgcaacagcaatgaaagtatttaatgttgaatctgaccaggttgatagtttaatgagacgtcaagcaaaagctgttaactttggtattgtatatggtatcagcgattatggattgagtcagagcttgggtattactagaaaacaagcaaaagcatttattgatgattatttagctagttttccaggtgtaaaacaatatatgtcagacattgttaaagatgcaaaagcacaaggttatgtggaaacactacttcatcgtcgtcgatacattcctgatataacaagtagaaacgttaatttaagaagttttgcagaaagaacagcaatgaatacacccatacaaggtagtgcagctgacataataaaattagcaatggttaaattcagtgaaaagattaaagaaactaaatatcatgctaagttattattacaagttcatgatgaactcatatttgaaataccaaaatcagaagtagaagattttagtaaatttgtagaagaaattatggaacaagcattagtgctcgatgtacctttaaaagtagattcgaattatggtgcaacatggtacgatgctaaataa

SEQ ID NO: 2388 - protein, 698 aa, Artificial Sequence
  Description of Artificial Sequence: synthetic amino acid sequence
MKGLMGDTSDNIPGVAGVGEKTAIKLLNQFESVEGVYEHIEEVTAKKLKEKLINSKDDALMSKDLATINVHSPIEVSLEDTKLTLQDDTTEKIELFKKLEFKQLLADIDTSSTNEEVIDKTFEIEQDFQNVDLNDLNEAVIHFELEGTNYLKDTILKFGFYTNHQHVVINAEDVKDYKHLVQWLEDKNTTKIVYDAKKTYVSAHRLGINIENIEFDVMLASYIIDPSRSIDDVKSVVSLYGQNYVKDNITIFGKGKKHHIPEEPILNEHIASVTEAIAAVTPTMKSQLEDYNQIELLKDLELPLARILSEMEEIGIYTDINDLKEMEFEIQKKLDVLISNIHESAGEAFNINSPKQLGVVLFETLQLPVIKKTKTGYSTAVDVLEKLQGEHPIIDDILEYRQLAKLQSTYVEGLQKVISKDHRIHTRFNQTLAQTGRLSSIDPNLQNIPIRLEEGRKIRKAFKPTSKDSVILSADYSQIELRVLAHITQDESLKHAFINGHDIHTATAMKVFNVESDQVDSLMRRQAKAVNFGIVYGISDYGLSQSLGITRKQAKAFIDDYLASFPGVKQYMSDIVKDAKAQGYVETLLHRRRYIPDITSRNVNLRSFAERTAMNTPIQGSAADIIKLAMVKFSEKIKETKYHAKLLLQVHDELIFEIPKSEVEDFSKFVEEIMEQALVLDVPLKVDSNYGATWYDAK

SEQ ID NO: 2389 - DNA, 603 bp, Artificial Sequence; identical to SEQ ID NO: 1185
  Description of Artificial Sequence: synthetic nucleic acid sequence

SEQ ID NO: 2390 - protein, 200 aa, Artificial Sequence; identical to SEQ ID NO: 1186
  Description of Artificial Sequence: synthetic amino acid sequence

SEQ ID NO: 2391 - DNA, 345 bp, Artificial Sequence; identical to SEQ ID NO: 2111
  Description of Artificial Sequence: synthetic nucleic acid sequence

SEQ ID NO: 2392 - protein, 114 aa, Artificial Sequence; identical to SEQ ID NO: 2112
  Description of Artificial Sequence: synthetic amino acid sequence

SEQ ID NO: 2393 - DNA, 615 bp, Artificial Sequence
  Description of Artificial Sequence: synthetic nucleic acid sequence
atgttacgagttgcattagcaaagggtcgtttattaaagagttttatcgaatatttacaacaagttaatcagatagatattgcaactgtacttttaaatagacagcgacagttattgcttacagtcgacaacattgaaatgattttagttaaaggaagcgatgtgcctacttatgtagaacaaggtattgctgatgtaggaatagtgggaagtgatattctgaatggtcaaaaatataatattaataaattactcgatttgccatttggtaaatgtcattttgcgttggcggcaaagccagaaacatctcgctataaaaaagtagcaacaagctatgtacatacagctactcaattctttaataaagaaggtatggatgtagaagtgattcaccttaacggttcagttgaattgtcatgtgtagtggatatggttgatgctattgtagatattgtacaaactggttctacgcttacagctaacgggctcgttgagaaaaagcatatcagtgaaattaacgctaagttaattacaaataaagaatcatattttaagcaatcatctgaaatagagagactaatcaagcagttaggagtgtctattaactatgcttag

SEQ ID NO: 2394 - protein, 204 aa, Artificial Sequence
  Description of Artificial Sequence: synthetic amino acid sequence
MLRVALAKGRLLKSFIEYLQQVNQIDIATVLLNRQRQLLLTVDNIEMILVKGSDVPTYVEQGIADVGIVGSDILNGQKYNINKLLDLPFGKCHFALAAKPETSRYKKVATSYVHTATQFFNKEGMDVEVIHLNGSVELSCVVDMVDAIVDIVQTGSTLTANGLVEKKHISEINAKLITNKESYFKQSSEIERLIKQLGVSINYA

SEQ ID NO: 2395 - DNA, 684 bp, Artificial Sequence
  Description of Artificial Sequence: synthetic nucleic acid sequence
gtggaaactgagaagcttgaattagagcaaagccaactaaaaaatgcatacgacatgctagataatgaaacacgagatgcattagagcaaagctatcagagaattaaagtgtaccaagaaaatattaaggtaaaacaggaatcatctcaacaaactgaatgttatgaacgataccatcctatcgaacgtgtaggtatttatgtgccgggaggtaaggctagctatccgtctacagtattaatgactgcaacacttgctcaagtagcaggtgttaatgagattactgttgttaccccacctcaaaatagcggtatatgtcaagaggtgttagccgcttgttacattacaggcgttcatcatgtttatcaagtcggtggagcacaaagtattgcggcgctaacttatggcacggaaactataaaaaaagtcgacaaaatcgtaggtccagggaatcaatatgttgcttatgccaaaaagtttgtattcggtcaagtaggcatagaccaaatcgcagaaccgacagaaatagccttgattatagacgaaagtgctgacttagacgcaatcgcttatgacgtatttgcacaagcagaacatgatgaaatggcttgtacttatgtgattagtgaaaatgaaaaggtacttaatcaattgaacactataatacaagagaaacttcagtag

SEQ ID NO: 2396 - protein, 227 aa, Artificial Sequence
  Description of Artificial Sequence: synthetic amino acid sequence
VETEKLELEQSQLKNAYDMLDNETRDALEQSYQRIKVYQENIKVKQESSQQTECYERYHPIERVGIYVPGGKASYPSTVLMTATLAQVAGVNEITVVTPPQNSGICQEVLAACYITGVHHVYQVGGAQSIAALTYGTETIKKVDKIVGPGNQYVAYAKKFVFGQVGIDQIAEPTEIALIIDESADLDAIAYDVFAQAEHDEMACTYVISENEKVLNQLNTIIQEKLQ

SEQ ID NO: 2397 - DNA, 495 bp, Artificial Sequence
  Description of Artificial Sequence: synthetic nucleic acid sequence
atgtatcatttcttaagtggattcacgtctaaactagctggaacagaacgtggtgttactgaacctcaaccttcgttttcaacttgctttggtgcaccattcttacctttgagtccaacaaagtacgctgatctacttggaaatttaatcgatattcatgatgtagatgtatatctagtaaatactggatggacaggtggtaaatatggtgtagggcgaagaattagtctacactatactcgtgaaatggtagatcaagcaatatcaggtaaattaaaaaatactaaatatattaaagatgatacatttggcttaaatattccagttcaaattgacagtgtacctacaactattctgaatcctatcaatgcttggaacaataaagataactacaaagcacaagcttacgatttgattcaacgctttaataataattttaaaaaattcggcaaggaagtcgaacatattgccaacaaaggtgcatttaatcaataa

SEQ ID NO: 2398 - protein, 164 aa, Artificial Sequence
  Description of Artificial Sequence: synthetic amino acid sequence
MYHFLSGFTSKLAGTERGVTEPQPSFSTCFGAPFLPLSPTKYADLLGNLIDIHDVDVYLVNTGWTGGKYGVGRRISLHYTREMVDQAISGKLKNTKYIKDDTFGLNIPVQIDSVPTTILNPINAWNNKDNYKAQAYDLIQRFNNNFKKFGKEVEHIANKGAFNQ

SEQ ID NO: 2399 - DNA, 792 bp, Artificial Sequence
  Description of Artificial Sequence: synthetic nucleic acid sequence
atgagcaataacatgtggagggggagaaagttgaacttaaaattagaccatatcattcactatttacatcaattagagtcatttaagtttcccggagaaatattagaattgcaaaatggtggaagacatcatcatttgggcacctttaatcaaatagcaccgattaaaaatagttatatcgaattgctagatgttgaaaatgagtcaaaacttagcaatatagctaaaactgaagaaggtcgtgtatcatttgctacaaaaatagtgcaggatcattttaaacaaggggttaaaggtatttgttttagaacaaaggatataaatcaggttaaaagtactttagaaaatagaggcgttgatgtgataggtcctattgatatggaaagagaaaacaaaaaaggtcatcaaattcgttggagattgctatatattgctaaccctgactatacagtcaaaccacctttctttatagaatgggataacaacaaaaagcaaaacctatcacaaatacataatttcaacttgtcatcgtttaaaattaaagaggtgattattactagcactcaacgtgaaacaacagtaagtctttggaaagaatggtataacctgaaaatagtaaatgaaacggctacatctactgatctcaaattagaaactgatgaagttatctataaaatagaagacggcaaagattcaggttttcatacattaataatgaccgatatcaatgccacagcaccatattcaatatttatacgtggtgctaaatatcgttttgagccacccaactag

SEQ ID NO: 2400 - protein, 263 aa, Artificial Sequence
  Description of Artificial Sequence: synthetic amino acid sequence
MSNNMWRGRKLNLKLDHIIHYLHQLESFKFPGEILELQNGGRHHHLGTFNQIAPIKNSYIELLDVENESKLSNIAKTEEGRVSFATKIVQDHFKQGVKGICFRTKDINQVKSTLENRGVDVIGPIDMERENKKGHQIRWRLLYIANPDYTVKPPFFIEWDNNKKQNLSQIHNFNLSSFKIKEVIITSTQRETTVSLWKEWYNLKIVNETATSTDLKLETDEVIYKIEDGKDSGFHTLIMTDINATAPYSIFIRGAKYRFEPPN

SEQ ID NO: 2401 - DNA, 1251 bp, Artificial Sequence
  Description of Artificial Sequence: synthetic nucleic acid sequence
atggaaaagatgaacatcactaatcaacaacatgacgcatttgtgaaatctcatcccaatggtgatttattacaattatctaagtgggcagatacgaaaaaattaacaggatggtattcaagaagaattgctgtcggtgaaaatggtcaaattaaaggtgttggccagctactattcaaaaaaatacctaaacttccatacactttatgctatgtatctaggggatttgtagctgattataataataaagaagtgttagaagctctacttagctatgctaaagaagtagcaaaagatgaaaagtcgtatgctatcaaaatagatcccgatgtcgaagtagataaaggtgcagaagcacttaaaaatctacgtgagcttgggtttaaacataaaggttttaaagaaggactgtctaaagactatattcaaccaagaatgactatgattacgcctattgacaaaacagatgatgaattagttcaaagtttcgaacgtcgaaatcgttcaaaagtaagacttgcactgaagcgtggaactaaagtagaacgatcaaatcgcgaggggcttaaaatctttgctaatttaatgaagataactggggagagagatggttttttaactcgagatattagttattttgaaaatatatatgatgcacttcatgaagacggtgatgcagaactcttccttgttaaattagagcctaagccagtattagatacggttaatcaagatcttgaagcacaattagctgagaaagagaaattacaatcaaaaaagcaagataaaaagacacttaataaacttaatgatattgataataaaattaagaaaacaaatgaattaaaatcggatttaacagaacttgaaaaaagcgagccagaaggtatttacttgtcaggagcgctcttaatgtttgcaggaaacaaatcttactatctctatggcgcttcctcgaatgactatcgtgatttcttaccaaaccatcacatgcaatttgaaatgatgaaatatgcacgtgagcatggtgcaacaacctatgactttggtggtacagataatgatcctgataaagattcagaacattatgggttgtgggcttttaaacgagtttggggtacatatttaagtgaaaaaattggagaatttgattatgtattaaatcaaccgctatatcatttagttgagaaagtgaaacctcgtttaacgaaagctaaaattaaaatatcacgtaaacttaaaggtaaataa

SEQ ID NO: 2402 - protein, 416 aa, Artificial Sequence
  Description of Artificial Sequence: synthetic amino acid sequence
MEKMNITNQQHDAFVKSHPNGDLLQLSKWADTKKLTGWYSRRIAVGENGQIKGVGQLLFKKIPKLPYTLCYVSRGFVADYNNKEVLEALLSYAKEVAKDEKSYAIKIDPDVEVDKGAEALKNLRELGFKHKGFKEGLSKDYIQPRMTMITPIDKTDDELVQSFERRNRSKVRLALKRGTKVERSNREGLKIFANLMKITGERDGFLTRDISYFENIYDALHEDGDAELFLVKLEPKPVLDTVNQDLEAQLAEKEKLQSKKQDKKTLNKLNDIDNKIKKTNELKSDLTELEKSEPEGIYLSGALLMFAGNKSYYLYGASSNDYRDFLPNHHMQFEMMKYAREHGATTYDFGGTDNDPDKDSEHYGLWAFKRVWGTYLSEKIGEFDYVLNQPLYHLVEKVKPRLTKAKIKISRKLKGK

SEQ ID NO: 2403 - DNA, 359 bp, Artificial Sequence
  Description of Artificial Sequence: synthetic nucleic acid sequence
atggtagttttaattatattaggtggcgtttattcaagcgccaaattaaaacttgaattattaccagatgttgaaaatccagttatttcagttcaaactacaatgtctggagcaacaccccagtcaacacaagatgaaataagtagcaagattgataatcaagtacgctcgttggcctacgtaaatagtgtacagactgaatctatacctaatgcttctatagtaactgtagaatacgataatggtacagatatggataaagctgaagaacaattaaaaaaagaaatcgacaaaattaagtttaaagatggcgttggtgaacccgaattaacaaggaactctatggatgcttttgtttg

SEQ ID NO: 2404 - protein, 120 aa, Artificial Sequence
  Description of Artificial Sequence: synthetic amino acid sequence
  MOD_RES (120): variable amino acid
MVVLIILGGVYSSAKLKLELLPDVENPVISVQTTMSGATPQSTQDEISSKIDNQVRSLAYVNSVQTESIPNASIVTVEYDNGTDMDKAEEQLKKEIDKIKFKDGVGEPELTRNSMDAFVX

SEQ ID NO: 2405 - DNA, 360 bp, Artificial Sequence
  Description of Artificial Sequence: synthetic nucleic acid sequence
atgataaatattatattgaagaaaatagacttggaggtaattagaatgttcgttgttacaaatagaatcactgtaaaaaaaggatatgcaaaacaaatggcgcctaattttactaaaggaggacctattgaatctttaaagggctttgaaggtattgaagtttggcaaattgataaagatgattatagcgaagatatgtatgtaaatagttggtgggaaactgaagaagattttaaaaattgggtgaatagtgatgtatttaaacaagcacataaaaatactggaaaatccgaagattcaccagtcattaaaagcgaaattgttaaatcaaatgttttatcttctttgaacagaagataa

SEQ ID NO: 2406 - protein, 119 aa, Artificial Sequence
  Description of Artificial Sequence: synthetic amino acid sequence
MINIILKKIDLEVIRMFVVTNRITVKKGYAKQMAPNFTKGGPIESLKGFEGIEVWQIDKDDYSEDMYVNSWWETEEDFKNWVNSDVFKQAHKNTGKSEDSPVIKSEIVKSNVLSSLNRR

SEQ ID NO: 2407 - DNA, 1320 bp, Artificial Sequence
  Description of Artificial Sequence: synthetic nucleic acid sequence
atgtcattgttagggattatattatttttagttcctataccagtcgttcaagatggaaagcagcaaacgacacttcctatagcttttttagctggtttattaaaagattggcttggtggtatcatgccaattttaattgtaaccatcataactgtatcaggtattttaacaatattatgctctacaatttataaaaataaattaaatcctcaaggtttaatgagcagtgctttcaacgttaaaataggatggcttgttttgagagtattagctgtcttcttttcttggttaacatttttaaatattggacctgaaatgattaaatctgaagatacaggtggattagtattttcaagtttattacctactcttgtagcagtatttttatttgctgcaatctttttacctttattaatggagtatggtctattagaattacttggacccatctttagacctatcatgcgacctttgtttactttacctggtagatcgacagttgataatctagcttcatttataggtgatggtacagttggtgttttaattactagtagacaatatggtgaaggatattactctagaagagaagcaacagtaatatccacaacctttagtgttgtatctattacgttcgctattgtcattgccgaaacaattagaatgcaagatcaatttttctatttttatttaacagttgtcatttcatgcttaattgcagcaatgattatgccaagaatttggccacttaaaaatattcctgacgaatatgctaaagaagtaagtgaagaggctcgtaatgaacagctaccagaaggcaaaacagcattaaaatatggttttgatttagcaactgaagttggaattaaatcgccagggtttaaagaatttttaatttcaggttttaaaacagttgtagatatgtggtttgtaattttaccagttgttatgagtataggaacaatagctaccattattgctaactacacgcctgtttttgaaattataggaaaaccatttgttccagtactagaattgttacaaattccagaagcacatgaagcatcacaaacaattttaattgggtttgccgatatgttcttaccttcaattcttattgaaggggttcaaaatgatgtaacacgttttgtaattggagcattgagtatctcacaacttgtgtatttatctgaagtaggcggcgtgattcttggttctaaaattccagttagtataagtaaattatttatgatttttttaattcgtactatcattacgcttccaataattgctttattagcgcatttatttatcggataa

SEQ ID NO: 2408 - protein, 439 aa, Artificial Sequence
  Description of Artificial Sequence: synthetic amino acid sequence
MSLLGIILFLVPIPVVQDGKQQTTLPIAFLAGLLKDWLGGIMPILIVTIITVSGILTILCSTIYKNKLNPQGLMSSAFNVKIGWLVLRVLAVFFSWLTFLNIGPEMIKSEDTGGLVFSSLLPTLVAVFLFAAIFLPLLMEYGLLELLGPIFRPIMRPLFTLPGRSTVDNLASFIGDGTVGVLITSRQYGEGYYSRREATVISTTFSVVSITFAIVIAETIRMQDQFFYFYLTVVISCLIAAMIMPRIWPLKNIPDEYAKEVSEEARNEQLPEGKTALKYGFDLATEVGIKSPGFKEFLISGFKTVVDMWFVILPVVMSIGTIATIIANYTPVFEIIGKPFVPVLELLQIPEAHEASQTILIGFADMFLPSILIEGVQNDVTRFVIGALSISQLVYLSEVGGVILGSKIPVSISKLFMIFLIRTIITLPIIALLAHLFIG

SEQ ID NO: 2409 - DNA, 510 bp, Artificial Sequence
  Description of Artificial Sequence: synthetic nucleic acid sequence
atgacaggtaaaacacacgcatcatgtggctttttagtcggtgcaataaccacacaatattttcatacagatatatttacttctatatcagtgattgtactttcagtcatttcaagtatattgccagatatatgtcatacacaaagtaaaataggaagacgatttaggcttactagtttttttgtcagaattttatttggtcatagaacatttacgcattcacttttatttattataggaattagttttttactgtacttcatacaaactccgatgtattatatggttgcaattgttattggtatgttttcgcatgttatacttgatatattaaccccaagaggtgttaaactattatatcctttaccatttaatatcgtatcacccattcattttaaaactgggggactagtagatgtatctctagctactgcattaagtgttggtgcgatatatactttatttcaaccatatttaaatactatgatgcactattggttaatcaaataa

SEQ ID NO: 2410 - protein, 169 aa, Artificial Sequence
  Description of Artificial Sequence: synthetic amino acid sequence
MTGKTHASCGFLVGAITTQYFHTDIFTSISVIVLSVISSILPDICHTQSKIGRRFRLTSFFVRILFGHRTFTHSLLFIIGISFLLYFIQTPMYYMVAIVIGMFSHVILDILTPRGVKLLYPLPFNIVSPIHFKTGGLVDVSLATALSVGAIYTLFQPYLNTMMHYWLIK

SEQ ID NO: 2411 - DNA, 432 bp, Artificial Sequence; identical to SEQ ID NO: 1017
  Description of Artificial Sequence: synthetic nucleic acid sequence

SEQ ID NO: 2412 - protein, 143 aa, Artificial Sequence; identical to SEQ ID NO: 1018
  Description of Artificial Sequence: synthetic amino acid sequence

SEQ ID NO: 2413 - DNA, 549 bp, Artificial Sequence
  Description of Artificial Sequence: synthetic nucleic acid sequence
atggatgattataaagaatatagaaaaagacttatcgttaaattaaaaaaacctataggtagagatttatataatagattatataaaaatattcaagatactttagaacctgaggtttatgaaattgctcctaatactaaattaggacattttcctggttatcagaatgtaacgttatcccacccacaaatgcaacaaattatatcaagaaatgaacctagttggaaacaagctttaatgaatgtaaaaggtgtttatgttataaccgacttaagtaatggcaaattatacataggatcagcatcaggtaatactgatggaatatggcaacgatggtcggactatgccaacatagaaaatctaacaggtggtaataaattattaaatgaaattaaattagataaagggaaagattacatcataaataattttcaatattcaattttagagatttttgatacaaagactaaggtagacactataatcaatagagaaaattattggaagaatgtattttgcactagaaaatatggtatgaactttaactaa

SEQ ID NO: 2414 - protein, 182 aa, Artificial Sequence
  Description of Artificial Sequence: synthetic amino acid sequence
MDDYKEYRKRLIVKLKKPIGRDLYNRLYKNIQDTLEPEVYEIAPNTKLGHFPGYQNVTLSHPQMQQIISRNEPSWKQALMNVKGVYVITDLSNGKLYIGSASGNTDGIWQRWSDYANIENLTGGNKLLNEIKLDKGKDYIINNFQYSILEIFDTKTKVDTIINRENYWKNVFCTRKYGMNFN

SEQ ID NO: 2415 - DNA, 2004 bp, Artificial Sequence
  Description of Artificial Sequence: synthetic nucleic acid sequence
atgcatcatgataaccatgcctcacatcatcatagtggccatgcacatcatcatggaaattttaaagttaagttttttgtttcattaatttttgcaatacctatcattctcttatcgccaatgatgggtgttaacttaccttttcaattcacatttccaggttctgaatgggtagtgttaatattaagtacaattttattcttttatggtggtaaaccgttcttgtctggtggtaaagatgaaattgctacaaaaaaaccaggcatgatgaccttagttgctctaggtatttcagtagcttatatttatagcttgtatgctttttatatgaataactttagtagtgcaactggtcatacaatggactttttttgggaattagcaaccttaattttaattatgctattaggacattggatagaaatgaatgctgtcggaaatgctggagatgctttaaagaaaatggcagaactattacctaatagtgctattaaagttatggataatggccaacgcgaagaagttaaaatatcagacatcatgactgatgatatcgtcgaagtaaaagccggagaaagcattccaacagatggtattatcgttcaaggacaaacatctatagatgaatccctagtcactggagaatctaaaaaagtacaaaaaaatcaaaatgacaacgtcatcgggggttctattaatgggtctggaacaatacaagtcaaggttacagctgttggagaagatggatatctttctcaagttatgggacttgttaatcaagcacaaaatgataaatctagtgctgaattgttatctgataaagtagcgggttatttattctactttgctgtaagtgttggcgtgatttcttttattgtctggatgctcattcaaaatgatgttgattttgcattagaacgtcttgtaactgtgttagtcattgcttgtccacatgctttaggcttggcaatacctttagtcactgcacgttctacttcaattggtgcacataatggtttaattattaaaaatagagagtctgtagaaatagctcaacatatcgattatgtaatgatggataaaactggtactttaactgagggtaacttttctgtgaatcattatgagagctttaaaaatgatttgagtaatgatacaatattaagccttttcgcctcattagaaagtcaatctaatcacccattagctataagtattgttgattttgcgaaaagtaaaaatgtttcatttactaatccacaagacgttaataatattccaggtgtcggattagaaggtctaattgataataaaacatataaaataacaaatgtctcttatcttgataaacataaacttaattatgacgatgacttgtttactaaattagctcaacaaggtaattcaatcagttatttaattgaggatcaacaagtcattggcatgattgctcaaggagatcaaattaaagaaagctcaaaacaaatgatagctgatttactatcaagaaatattacaccagtcatgcttacaggtgacaataatgaagtggcacacgctgtcgcaaaagaattaggtattagtgatgttcacgcacaactcatgccagaagataaggaaagcattataaaagattatcaaagtgacggtaataaagtcatgatggtcggagacggtatcaacgatgcgccgagtcttataagagccgatattggtatagcaattggtgcaggcacagatgttgcagtggattcaggtgatatcatacttgttaaaagtaatccatcagatatcattcatttcttgactctttcaaataatactatgagaaaaatggtgcaaaacttatggtggggtgcaggttataatattgttgctgtacctttagcagctggcgcattagcttttatcgggttaatattatcaccagctgtaggagcaatattaatgtctttaagtacagttatagtagcgattaatgcttttacattaaaattaaaataa

SEQ ID NO: 2416 - protein, 667 aa, Artificial Sequence
  Description of Artificial Sequence: synthetic amino acid sequence
MHHDNHASHHHSGHAHHHGNFKVKFFVSLIFAIPIILLSPMMGVNLPFQFTFPGSEWVVLILSTILFFYGGKPFLSGGKDEIATKKPGMMTLVALGISVAYIYSLYAFYMNNFSSATGHTMDFFWELATLILIMLLGHWIEMNAVGNAGDALKKMAELLPNSAIKVMDNGQREEVKISDIMTDDIVEVKAGESIPTDGIIVQGQTSIDESLVTGESKKVQKNQNDNVIGGSINGSGTIQVKVTAVGEDGYLSQVMGLVNQAQNDKSSAELLSDKVAGYLFYFAVSVGVISFIVWMLIQNDVDFALERLVTVLVIACPHALGLAIPLVTARSTSIGAHNGLIIKNRESVEIAQHIDYVMMDKTGTLTEGNFSVNHYESFKNDLSNDTILSLFASLESQSNHPLAISIVDFAKSKNVSFTNPQDVNNIPGVGLEGLIDNKTYKITNVSYLDKHKLNYDDDLFTKLAQQGNSISYLIEDQQVIGMIAQGDQIKESSKQMIADLLSRNITPVMLTGDNNEVAHAVAKELGISDVHAQLMPEDKESIIKDYQSDGNKVMMVGDGINDAPSLIRADIGIAIGAGTDVAVDSGDIILVKSNPSDIIHFLTLSNNTMRKMVQNLWWGAGYNIVAVPLAAGALAFIGLILSPAVGAILMSLSTVIVAINAFTLKLK

SEQ ID NO: 2417 - DNA, 375 bp, Artificial Sequence
  Description of Artificial Sequence: synthetic nucleic acid sequence
atggaaataggcgtaagcaaaggtttttttggtgtagcaggttttgacttactagtagatgataataatgatgtttatgcgattgatttaaactttaggcaaaacggatcaacgagtatgctacttttagcaaaagatttaactcatggatatcataaattttacagttacttttctaatggagataatacaaaattctataatgctattttaaaatacgtagaattaggtgtactttatccactttcctattacgatggagattggtatggaaagaatcaagttaattctagatttggctgcatttggcatggggaaaataaagaattaattaatcgatatgaacaacaatttatattggaagctggattataa

SEQ ID NO: 2418 - protein, 124 aa, Artificial Sequence
  Description of Artificial Sequence: synthetic amino acid sequence
MEIGVSKGFFGVAGFDLLVDDNNDVYAIDLNFRQNGSTSMLLLAKDLTHGYHKFYSYFSNGDNTKFYNAILKYVELGVLYPLSYYDGDWYGKNQVNSRFGCIWHGENKELINRYEQQFILEAGL

SEQ ID NO: 2419 - DNA, 666 bp, Artificial Sequence; identical to SEQ ID NO: 1991
  Description of Artificial Sequence: synthetic nucleic acid sequence

SEQ ID NO: 2420 - protein, 221 aa, Artificial Sequence; identical to SEQ ID NO: 1992
  Description of Artificial Sequence: synthetic amino acid sequence

SEQ ID NO: 2421 - DNA, 798 bp, Artificial Sequence
  Description of Artificial Sequence: synthetic nucleic acid sequence
atgtttataaaaaaggattttgatgatattacagttcaagtatttgaagaaaaatatagagatgcacttaaccaatttgaattaagtgaacgacaacaaatatattcttcattgcctcaaactgttttagatgatgcattaaaagatgaaaatcgaattgctaatgtagctttaaataaagaaggaaaagtagtggggttcttcgttttgcatcgttattatcaacatgaaggttatgatacaccaaacaatgttgtttatgtacgttcattgtcagttaatgaaaagtttcaaggccatggatatgggacaaaaatgatgatgtttttaccagagtatgttcaagcattatttcctgattttacacatttatacttagtagtagacgctgaaaaccaaagtgcttggaacgtttatgaacgtgcaggttttatgcatacagctacaaaagaagaaggacctattgggaaagaaagactttattatttagatttagattcaaaacatgtatcttctttaaggctaaaagagggggaagtcacatataatgatgatattcacgtgattaatttgcttaaagatgatgtaaaggtaggctttattgcactagaacaaaatgataataaaatgaatatttctgcaatcgaagttaataagaaaaataggaatgagggaattgcagaaagtgctttacgccaattaccaacgtatatacgtaaacagtttgaagacattgaagttttatcaattactttagtgctccagcacgcactaactcatttaatgtatctgcaataa

SEQ ID NO: 2422 - protein, 265 aa, Artificial Sequence
  Description of Artificial Sequence: synthetic amino acid sequence
MFIKKDFDDITVQVFEEKYRDALNQFELSERQQIYSSLPQTVLDDALKDENRIANVALNKEGKVVGFFVLHRYYQHEGYDTPNNVVYVRSLSVNEKFQGHGYGTKMMMFLPEYVQALFPDFTHLYLVVDAENQSAWNVYERAGFMHTATKEEGPIGKERLYYLDLDSKHVSSLRLKEGEVTYNDDIHVINLLKDDVKVGFIALEQNDNKMNISAIEVNKKNRNEGIAESALRQLPTYIRKQFEDIEVLSITLVLQHALTHLMYLQ

SEQ ID NO: 2423 - DNA, 612 bp, Artificial Sequence
  Description of Artificial Sequence: synthetic nucleic acid sequence
atgacccaatatactttttcacctaaagattttaaagcttttgaagtcgaaggtttagaccaaagaatggaagcacttaatgactatgtcagacctcaacttcatcaattaggatcttattttgaagaatatttcactacacaaacaggtgaaactttttatgctcacgtagctaaacacgcacgtagaagtgtcaatccacctatcgatacgtgggtagcttttgctcctaataaacgtggttataaaatgttaccacactttcaaatcggattgtttagaaatcagcttttcattatgttcggtatcatgcacgaaggtagaaataaagaagaaaaagtgaaaatatttgataaacattttgataaactgacatctttaccaagtgattatagtgtttctctagatcatatgaaaactgaaaagcactatatcaaggatatgagtaatgaagagttgcatgctgctatcgatagagttaaaaatgttaaaaaaggtgaattttttgttgccagaacattatcaccaaccgataaaagattaaaatctgataagtcttttctaaaatttgttgaggaaacttttgatgaatttttaaaattttatcaataa

SEQ ID NO: 2424 - protein, 203 aa, Artificial Sequence
  Description of Artificial Sequence: synthetic amino acid sequence
MTQYTFSPKDFKAFEVEGLDQRMEALNDYVRPQLHQLGSYFEEYFTTQTGETFYAHVAKHARRSVNPPIDTWVAFAPNKRGYKMLPHFQIGLFRNQLFIMFGIMHEGRNKEEKVKIFDKHFDKLTSLPSDYSVSLDHMKTEKHYIKDMSNEELHAAIDRVKNVKKGEFFVARTLSPTDKRLKSDKSFLKFVEETFDEFLKFYQ

SEQ ID NO: 2425 - DNA, 1152 bp, Artificial Sequence
  Description of Artificial Sequence: synthetic nucleic acid sequence
atgttaggagagcaatatacacaaattaagcgtccagcaaatcggctaactgaaaaaatattaggttggtttagttgggtattcttactcatattaactattgtttcaatgtttattgcgctcgtatcttttagtaatgatacgtcaattgccaatttagaaaacacacttaataataatgaactcgtacaacaaattttagccaataatgatttaagtacaactcaatttgtgatttggttacaaaatggagtttgggcaattattgtttattttattgtttgtttgctcatctcgtttttagcgttaatttctatgaatataagaattttgtctggtttactttttttaatagctgctatagtcacaattccgcttgtattgttgattgtaactctaatcattcctatcttattctttatcattgcaatgatgatgtttgctagaagagatagaatagaaacagtgccatcttattataatgaatatgatcaaccatactatgatgagagaggtttttatgaaccagagtcaagaaatgaacatggatataatgatgatgtgtatgaacctatgcatactaaaaaggaagatagaaatacaagacgtcaattcaatagaaatgctcagcaacaagattcctataatggtataactgataatcaacccgatgaagatacatcttccgatcaactttattcagacgaatatgtagataatgaagataaatattctcaatttccaaaaagagcagttgaaagtgaatatgcatctcaacaaactgaagatgaaccaacagtcatgtcaagacaagctaagtacaataaaaaatctaaaaatacggattttgaagatgcgcaacaggaacatatggaaggtaatcaatttgatgacataggagttgttgaaccacaaattgatcctaaagaactaaaagcgcaaagaaaaagagaaaaagcagaaatacgtgctaagaaaaaagaaaagagaaaagcatataataaacgtatgaaagaacgaagaaaaaaccagccaagtgctgttaaccaacgacgtatgaattatgaagaacgtcgacaaatgattaataatgaacaagaagatacagataataacttaaatcaacaggaagattcaaaaaaagaaaattaa

SEQ ID NO: 2426 - protein, 383 aa, Artificial Sequence
  Description of Artificial Sequence: synthetic amino acid sequence
MLGEQYTQIKRPANRLTEKILGWFSWVFLLILTIVSMFIALVSFSNDTSIANLENTLNNNELVQQILANNDLSTTQFVIWLQNGVWAIIVYFIVCLLISFLALISMNIRILSGLLFLIAAIVTIPLVLLIVTLIIPILFFIIAMMMFARRDRIETVPSYYNEYDQPYYDERGFYEPESRNEHGYNDDVYEPMHTKKEDRNTRRQFNRNAQQQDSYNGITDNQPDEDTSSDQLYSDEYVDNEDKYSQFPKRAVESEYASQQTEDEPTVMSRQAKYNKKSKNTDFEDAQQEHMEGNQFDDIGVVEPQIDPKELKAQRKREKAEIRAKKKEKRKAYNKRMKERRKNQPSAVNQRRMNYEERRQMINNEQEDTDNNLNQQEDSKKEN

SEQ ID NO: 2427 - DNA, 762 bp, Artificial Sequence
  Description of Artificial Sequence: synthetic nucleic acid sequence
atgatgcaagaagagttagacattaaaactaaatcgaacccaaatgatttagttacaaatgtggataaggcgacagagaattatctatatgaaacgattcttcataattatccagatcatcaggttattggcgaagagggacatggtcataatctcgagtatttaaagggggttatttgggttattgatccaattgatggaacacttaattttgttcaccaaaaagaaaattttgccatctctattggtatttatcatgatgggaagccttatgcaggttttgtttatgatgtcatgaaagatgttttatatcatgcaaaggttggacagggtgcatttgaaaatacacataaacttgaaatgattcaaaatactgaacttaaaagaagtattataggtattaatcccaattggctgacgaaaccaatactcagtgatatttttagttcaatagtgaatgaggcaagaagtgcacgagcatatggtagtgcagcattagaaattataagtgtagcgaagggtcaattggcggcttacctaacacctagactacaaccgtgggattttgcaggtggattgttgattttgaacgaagtaggtgggataggaaccaacttattaggcgataaattagacttcaatcaaccgaattcaatattaatagcaaatcctagccttcatcgtgaaatattaaatcatcatttaaatcagcaaagagatacgcttattacacttcatgaaaaaaggtttggaaagagatag

SEQ ID NO: 2428 - protein, 253 aa, Artificial Sequence
  Description of Artificial Sequence: synthetic amino acid sequence
MMQEELDIKTKSNPNDLVTNVDKATENYLYETILHNYPDHQVIGEEGHGHNLEYLKGVIWVIDPIDGTLNFVHQKENFAISIGIYHDGKPYAGFVYDVMKDVLYHAKVGQGAFENTHKLEMIQNTELKRSIIGINPNWLTKPILSDIFSSIVNEARSARAYGSAALEIISVAKGQLAAYLTPRLQPWDFAGGLLILNEVGGIGTNLLGDKLDFNQPNSILIANPSLHREILNHHLNQQRDTLITLHEKRFGKR

SEQ ID NO: 2429 - DNA, 507 bp, Artificial Sequence
  Description of Artificial Sequence: synthetic nucleic acid sequence
atgaaagacaacaaacctaataattcgaaattaattcaaacatatttaagtaagaaaactttaagatatggtacagcaagtgcattaacattggcactctatttatttaacagtaacgtaactgtgtatgcggatgaaaatactgcaaaccaaaatcaaggaacatcaccaaaaacttcacagacagcacctacaaataatactgaaaatacagatgccacagccataacaacagatcaaaataataatgatgaagaagaatacgatgcgtcatatgaacttccaattctttatgtaactgtctggctagatgatcaaggaaatattattaaagatgctgtggaagatgctaaaacccctgcttcagaaaggcaaccggtgaaaattcctgggtaccaacattatagaacttctgtgagtgacggaattactaagtttatttatcgtaaaattagcactgcacaatcacctatagttgaaaatcaaaaacgtatggtcgtggcatag

SEQ ID NO: 2430 - protein, 168 aa, Artificial Sequence
  Description of Artificial Sequence: synthetic amino acid sequence
MKDNKPNNSKLIQTYLSKKTLRYGTASALTLALYLFNSNVTVYADENTANQNQGTSPKTSQTAPTNNTENTDATAITTDQNNNDEEEYDASYELPILYVTVWLDDQGNIIKDAVEDAKTPASERQPVKIPGYQHYRTSVSDGITKFIYRKISTAQSPIVENQKRMVVA

SEQ ID NO: 2431 - DNA, 489 bp, Artificial Sequence; identical to SEQ ID NO: 1009
  Description of Artificial Sequence: synthetic nucleic acid sequence

SEQ ID NO: 2432 - protein, 162 aa, Artificial Sequence; identical to SEQ ID NO: 1010
  Description of Artificial Sequence: synthetic amino acid sequence

SEQ ID NO: 2433 - DNA, 1278 bp, Artificial Sequence; identical to SEQ ID NO: 1011
  Description of Artificial Sequence: synthetic nucleic acid sequence

SEQ ID NO: 2434 - protein, 425 aa, Artificial Sequence; identical to SEQ ID NO: 1012
  Description of Artificial Sequence: synthetic amino acid sequence

SEQ ID NO: 2435 - DNA, 522 bp, Artificial Sequence
  Description of Artificial Sequence: synthetic nucleic acid sequence
atgaataaactcacaaaactaagtacagtcatttttgtatctggaattattttagccggttgtggaaataacaaagaactaacagagaaaaaagagaataaagtattatcatatacaactgtcaaagatattggagatatgaatccccatgtttatggaggttcaatgtcagcagaaagtatgatttatgagccgttagttcgcaataccaaggatggtattaagccattattagcaaaaaaatgggacatttcacctgatggtaagacatatacgtttcatttaagggatgatgtatcttttcatgatggtacgaaatttgatgcagatgcagtgaagaaaaacatcgatgcagtacaacaaaataagaaactacattcatggttaagactttcaacactgattgatgatgtcaaagttaaggataagtatacgatacaactacatttgaaggaagcttatcaacctgcgttagcagaactagctatgccacgaccatacgtttttgattttcaactatag

SEQ ID NO: 2436 - protein, 173 aa, Artificial Sequence
  Description of Artificial Sequence: synthetic amino acid sequence
MNKLTKLSTVIFVSGIILAGCGNNKELTEKKENKVLSYTTVKDIGDMNPHVYGGSMSAESMIYEPLVRNTKDGIKPLLAKKWDISPDGKTYTFHLRDDVSFHDGTKFDADAVKKNIDAVQQNKKLHSWLRLSTLIDDVKVKDKYTIQLHLKEAYQPALAELAMPRPYVFDFQL

SEQ ID NO: 2437 - DNA, 423 bp, Artificial Sequence; identical to SEQ ID NO: 2267
  Description of Artificial Sequence: synthetic nucleic acid sequence

SEQ ID NO: 2438 - protein, 140 aa, Artificial Sequence; identical to SEQ ID NO: 2268
  Description of Artificial Sequence: synthetic amino acid sequence

SEQ ID NO: 2439 - DNA, 414 bp, Artificial Sequence; identical to SEQ ID NO: 257
  Description of Artificial Sequence: synthetic nucleic acid sequence

SEQ ID NO: 2440 - protein, 137 aa, Artificial Sequence; identical to SEQ ID NO: 258
  Description of Artificial Sequence: synthetic amino acid sequence

SEQ ID NO: 2441 - DNA, 786 bp, Artificial Sequence; identical to SEQ ID NO: 261
  Description of Artificial Sequence: synthetic nucleic acid sequence

SEQ ID NO: 2442 - protein, 261 aa, Artificial Sequence; identical to SEQ ID NO: 262
  Description of Artificial Sequence: synthetic amino acid sequence

SEQ ID NO: 2443 - DNA, 450 bp, Artificial Sequence
  Description of Artificial Sequence: synthetic nucleic acid sequence
atgaagactaacgtaattatagatggagatgcttgtcctgttgttaattctgtcattgaattgacgaaagggacaggcatttttgttacaattttaagaagttttagccatttttcacaacaaatacaacccgaacatgtaaaaattgtatacgttgatgacggtcccgatgcggtagactataaaatagtcgaacttgctagcaataatgatatcgtcatcacacaagattatggacttgctagtctactgatagacaaagtacatactgtcatgcatcataaaggaaatatttatcactcaaacaacatccaaagcttattaaatcaaagatatctaaatgctcaaataagaagacgaggtggtcgtcacaaaggccctcctcccttcacaacagaggatagacttaaattcgagcatgcttttagaaaaatcattaatcaaatatag

SEQ ID NO: 2444 - protein, 149 aa, Artificial Sequence
  Description of Artificial Sequence: synthetic amino acid sequence
MKTNVIIDGDACPVVNSVIELTKGTGIFVTILRSFSHFSQQIQPEHVKIVYVDDGPDAVDYKIVELASNNDIVITQDYGLASLLIDKVHTVMHHKGNIYHSNNIQSLLNQRYLNAQIRRRGGRHKGPPPFTTEDRLKFEHAFRKIINQI

SEQ ID NO: 2445 - DNA, 927 bp, Artificial Sequence
  Description of Artificial Sequence: synthetic nucleic acid sequence
atgatggggtgtttatcattgtttagaaagcaaaaccttaaatggttaggtgttttagctacgattattatgacctttgtacaattaggtggcgccctcgtaactaaaacgggatcagaagatggttgtggctcgtcttggcctttatgtaatggcgctttacttccagaaaatttaccaatacaaacaattatagaactgagtcatcgcgcagtatcagccatttcacttatagttgtattatggcttgtaattacagcttggaaaaacattggatatattaaagaaatcaaaccactctctattattagtgttggttttttattagttcaagcacttgtaggtgctgctgctgtgatatggcaacaaaatccttatgtattagcgctacattttggtatttcacttatcagtttctcttctgttttcttaatgacattaattattttctcaattgacaaaaaatatgaagctgacattttatttattcacaaacctttacgtatcttaacttggttaatggctatcatcgtatacttaactatttatacaggtgctttagttagacatactaaatcaagtcttgcttatggtgcttggcctattccatttgatgatatcgttcctcataatgcgcatgattgggtacaattttcgcacagaggtatggcgctcatcacttttatctggattatgattacatttatacacgctattaagaattattcagataatcgaactgtacgttatggttatactgcatcatttatacttgttatccttcaagttattacaggtgctttatcagtcataactaatgtcaatttaattattgcgttattccatgctttgtttatcacttacttattcggaatgattgcttattttattttactaatgttaagaacgacgagaagtcaaaaataa

SEQ ID NO: 2446 - protein, 308 aa, Artificial Sequence
  Description of Artificial Sequence: synthetic amino acid sequence
MMGCLSLFRKQNLKWLGVLATIIMTFVQLGGALVTKTGSEDGCGSSWPLCNGALLPENLPIQTIIELSHRAVSAISLIVVLWLVITAWKNIGYIKEIKPLSIISVGFLLVQALVGAAAVIWQQNPYVLALHFGISLISFSSVFLMTLIIFSIDKKYEADILFIHKPLRILTWLMAIIVYLTIYTGALVRHTKSSLAYGAWPIPFDDIVPHNAHDWVQFSHRGMALITFIWIMITFIHAIKNYSDNRTVRYGYTASFILVILQVITGALSVITNVNLIIALFHALFITYLFGMIAYFILLMLRTTRSQK

SEQ ID NO: 2447 - DNA, 3456 bp, Artificial Sequence
  Description of Artificial Sequence: synthetic nucleic acid sequence
gtgtcttggcttttgaaacaaataaagaaattacttgttgctaaccgtggtgaaatcgccattagaatttttagagcggcagcagaattaaatatcagtacagtagcaatttattctaatgaagataaaagttcgttacatagatataaagcagatgaatcctatctagttggaagtgatttaggacctgctgaaagttatttgaatatcgaacgtatcatcgaagtagctcttcgcgcaggtgtcgatgcaattcatcctgggtatggttttttaagtgaaaatgaacaatttgcacgccgatgtgctgaggaaggcattaaatttataggtccgcatcttgaacatctagacatgtttggagataaggttaaggctagaacaactgctattaacgctaacttacctgtaatcccgggtacagatggtcctattgaaagttttgaagctgcagaacagtttgctaatgaagcaggttacccacttatgattaaggccacaagcggtggcggtggtaaaggtatgcgaatcgttcgtgaatcaagcgaattagaagacgctttccatcgtgcgaaatcagaagccgaaaagtcatttggtaatagcgaagtttatatcgaaagatatattgataatccaaagcatatagaggttcaagttattggtgatgaattcgggaatatcattcatttgtatgaaagagattgctccgtacaacgacgtcatcaaaaggttgttgaagttgcaccttcagtaggtctttctaacaaattaagagagcgaatttgtgatgccgcaattcaactgatggaaaatataaaatacgtcaacgctggaacagtagaatttttagtttctggggatgaatttttcttcattgaggttaatccacgtgttcaagttgagcatacaattactgaaatgattactggtatagacattgtgaaaacgcaaattttagttgctgatggagaatcgttatttggagataaaatctctatgccacagcaaaatgaaattcaaacattagggtatgcgatacaatgtcgtataacaactgaagatcctactaatgattttatgccagattctggcacaattattgcatatcgatcaagtggcggttttggtgtgagacttgatgcaggggatggattccaaggtgcagaaatttcaccttactacgattcactattagttaagctttctacacatgccgtttcatttaaacaagctgaagagaaaatggaacgttcattacgcgaaatgcgaattcgtggcgtaaagacgaatattccatttctcatcaatgttatgcgtaatgataaatttagaagtggtgattatactactaaatttattgaagaaacacctgaacttttcgatattgcaccgacattggacagaggtaccaagactttagagtatattggtaatgtgacgataaacggatttcctaatgtagaaaagcgtccaaaaccagaatatgaatctaccaaaatcccaaaaatttctcaaaagaaaatcaatcagttatttggaacaaaacaaattcttgagcaacatggaccaacaggtgttacaaattgggttagagaacaagaagatgttttaattaccgatactacatttagagatgcacaccaatctttacttgcaacacgtgtaagaacaaaagatatgatgaacattgcatctaaaactgctgaagtttttaaagatagtttttcattagaaatgtggggtggtgcaacatttgatgtcgcctataatttcttgaaagagaatccatgggaacgtttagaaagattgcgcaaagccattccgaatgtgttattccaaatgttattacgagcttcgaacgcagtaggttataaaaactatcctgataatgtaattaagaaattcgttcatgaaagtgcaaaagctggtgtagatgttttccgtatattcgactcattgaactgggttgatcaaatgaaagtagcgaatgaagctgttcaagaagctggaatggtatctgagggtacaatttgctatacaggtgatattttaaatgctgaacgttccaatatttatactttagattattacgttaaaatggctaaagaactggaaagagaaggattccatatattagcaattaaagatatggctggtttattgaaaccgaaagcagcttacgaattaattggtgaattacgtgaggcaacacatcttccaattcatttacatacacatgatactagtggaaatggattgttgacatataaacaagcaattgatgctggcgtagatattatagatactgctgttgcatctatgagtggtttaacgagtcaaccaagtgcaaattcattatattatgcactaaatggatttccacgtaatttaagaactgatattgatgggttagaagagttgagtcattactggtctgtagtcagaccttactatgcagactttgagagtgatatcaaatcaccaaatacagaaatttatcaacatgaaatgccaggtggccaatattcaaacttaagtcaacaagctaaaagtttaggattgggcgaacgttttgatgaagtcaaagagatgtatcgtcgtgtcaacttcctgtttggagatcttgtaaaagtaacaccatcttcaaaggtagttggagatatggcactatatatggtgcaaaatgatcttgatgaagatacggtcatcaatgatggttataaattagatttcccagaatctgttgtgtcattctttaaaggtgacattggacaacctgtcaacggattcaacaagaaattgcaagatgttattttaaaaggacagcaaccaattactgaaagaccaggtgaatacttggagccggtcgattttgaagcaatccgtcaagaattaagcgacatacaacaagacgaggtaacagaacaagatataattagttatgtactttatccgaaggtatataaacaatatattcaaacgaaagagcaatttggtaatgtatctttactggatacaccgacattcttatttggcatgcgtaatggtgaaacagttgaaattgaaattgatactggtaaacgtctaattattaaattagaaacaatcagtgaaccagatgagaatggtaaacgtacaatttattacgctatgaatggtcaagcaagacgtatttatattcaagatgaaaatgttaaaacgaatgctaatgttaaacctaaggcggataaatcaaatccaaatcatattggtgctcaaatgcctggttctgtaactgaagtcaaagtgtctgtaggcgatgaagttcaagctaatcagccattattaatcactgaagcaatgaagatggaaacgacgattcaggcaccatttgatggaattattaaacaaatcaatgttgctaatggagatgccattgccacaggagatttattagtggaaattgaaaagtaa

SEQ ID NO: 2448 - protein, 1151 aa, Artificial Sequence
  Description of Artificial Sequence: synthetic amino acid sequence
VSWLLKQIKKLLVANRGEIAIRIFRAAAELNISTVAIYSNEDKSSLHRYKADESYLVGSDLGPAESYLNIERIIEVALRAGVDAIHPGYGFLSENEQFARRCAEEGIKFIGPHLEHLDMFGDKVKARTTAINANLPVIPGTDGPIESFEAAEQFANEAGYPLMIKATSGGGGKGMRIVRESSELEDAFHRAKSEAEKSFGNSEVYIERYIDNPKHIEVQVIGDEFGNIIHLYERDCSVQRRHQKVVEVAPSVGLSNKLRERICDAAIQLMENIKYVNAGTVEFLVSGDEFFFIEVNPRVQVEHTITEMITGIDIVKTQILVADGESLFGDKISMPQQNEIQTLGYAIQCRITTEDPTNDFMPDSGTIIAYRSSGGFGVRLDAGDGFQGAEISPYYDSLLVKLSTHAVSFKQAEEKMERSLREMRIRGVKTNIPFLINVMRNDKFRSGDYTTKFIEETPELFDIAPTLDRGTKTLEYIGNVTINGFPNVEKRPKPEYESTKIPKISQKKINQLFGTKQILEQHGPTGVTNWVREQEDVLITDTTFRDAHQSLLATRVRTKDMMNIASKTAEVFKDSFSLEMWGGATFDVAYNFLKENPWERLERLRKAIPNVLFQMLLRASNAVGYKNYPDNVIKKFVHESAKAGVDVFRIFDSLNWVDQMKVANEAVQEAGMVSEGTICYTGDILNAERSNIYTLDYYVKMAKELEREGFHILAIKDMAGLLKPKAAYELIGELREATHLPIHLHTHDTSGNGLLTYKQAIDAGVDIIDTAVASMSGLTSQPSANSLYYALNGFPRNLRTDIDGLEELSHYWSVVRPYYADFESDIKSPNTEIYQHEMPGGQYSNLSQQAKSLGLGERFDEVKEMYRRVNFLFGDLVKVTPSSKVVGDMALYMVQNDLDEDTVINDGYKLDFPESVVSFFKGDIGQPVNGFNKKLQDVILKGQQPITERPGEYLEPVDFEAIRQELSDIQQDEVTEQDIISYVLYPKVYKQYIQTKEQFGNVSLLDTPTFLFGMRNGETVEIEIDTGKRLIIKLETISEPDENGKRTIYYAMNGQARRIYIQDENVKTNANVKPKADKSNPNHIGAQMPGSVTEVKVSVGDEVQANQPLLITEAMKMETTIQAPFDGIIKQINVANGDAIATGDLLVEIEK

SEQ ID NO: 2449 - DNA, 936 bp, Artificial Sequence
  Description of Artificial Sequence: synthetic nucleic acid sequence
atgagaaatttaaggaggggaattatgaacaaagatcaaactttgtcacatactacgggccgtgtatccttcaaagaattacaacaaattattaaaatgggccttgttcaaggtaatttaatacctgcttttgcaggcgcatggcttgcaatagtaatgacaaaccattccttcctatcttccattccacaaatactattgatgctagttggctctacgcttattatggggggcgcttgtgctttaaataattattatgatcaagatattgatcgcattatgcctagtaagcaaagtagaccaacagtaaatgatagaatatctgatagaaacttattaatgttaagttttgggatgatgttaataggtgaagcatgtttattcttattaaatataccttctggtgttttaggattaattggtattgttggatatgtatcttactattcaatttggtctaagcgccatacaacttggaatactgttgttggaagttttcctggagctgtaccaccattaattggttgggtagctatcgatggatcattaagtttagcagcagtagcactctttttagttgtcttttgttggcaacctatccatttctacgctctagcaattaaacgtagtgatgagtatgcgcttgcaaatattcctatgttaccatcagtgaaaggtttcaaacggacaagagtaagcatgtttatttggttagtgttattattaccattgccattcttattatctaatttaggcgtaacttttgttgttattgctacactacttaatttaggatggttagctttaggttttacaacgttcagaaaagaatctaatcaaactaaatgggcaacgcaaatgttcgtttattcattgaactacttagtagtattctttgcactcgttgtagttgtttcattaatcaagatgatataa

SEQ ID NO: 2450 - protein, 311 aa, Artificial Sequence
  Description of Artificial Sequence: synthetic amino acid sequence
MRNLRRGIMNKDQTLSHTTGRVSFKELQQIIKMGLVQGNLIPAFAGAWLAIVMTNHSFLSSIPQILLMLVGSTLIMGGACALNNYYDQDIDRIMPSKQSRPTVNDRISDRNLLMLSFGMMLIGEACLFLLNIPSGVLGLIGIVGYVSYYSIWSKRHTTWNTVVGSFPGAVPPLIGWVAIDGSLSLAAVALFLVVFCWQPIHFYALAIKRSDEYALANIPMLPSVKGFKRTRVSMFIWLVLLLPLPFLLSNLGVTFVVIATLLNLGWLALGFTTFRKESNQTKWATQMFVYSLNYLVVFFALVVVVSLIKMI

SEQ ID NO: 2451 - DNA, 471 bp, Artificial Sequence
  Description of Artificial Sequence: synthetic nucleic acid sequence
atgaaacttatgaacgtacccattttaccaacgataagtacatcgtgtattgttattagtgcgattttagtcgctattggttgggcattgatttggaaacgtcaagttcataagcataaaaacattatgctatgggctgcctttttcgctttaacattctttattatttatgcagcaagaactatttttatcggtaatacagctttcggtggaccaagttctattaaagtttattacactattttcttagttttccatatcattcttgcaacagttggtggcgttttaggcttaattcaaatcattttagccttcaaagataaacttcatattcacagaaaaattgggccttgggcttcaataatttggttctttaccgcaattactggtgttgcagtttatgtattgttatatgtattgtatccaggtggagaaacaacatcattgcttaaagctacattaggtctataa

SEQ ID NO: 2452 - protein, 156 aa, Artificial Sequence
  Description of Artificial Sequence: synthetic amino acid sequence
MKLMNVPILPTISTSCIVISAILVAIGWALIWKRQVHKHKNIMLWAAFFALTFFIIYAARTIFIGNTAFGGPSSIKVYYTIFLVFHIILATVGGVLGLIQIILAFKDKLHIHRKIGPWASIIWFFTAITGVAVYVLLYVLYPGGETTSLLKATLGL

SEQ ID NO: 2453 - DNA, 1080 bp, Artificial Sequence
  Description of Artificial Sequence: synthetic nucleic acid sequence
atgtcaattgctagacacctcagtgcaacacacttagatgttgcagtcatagatagagatgtacctggaaagcatgcgtcatataaagctggaggtatgcttggcgcacaaaatgaatttacagaggatagtgacttgtttcaattagccatcgaatctcgtgctatgtttccacaattaagtaaatcattattagatgaaacaggcatagacattcaatttaaaaattcaggacttatcaaaattgctaatgaacacgatgatatctcatctataaaacgacaatatcaatttctgaatagtcaagaccgtagtgtcaaacaattatcagatgatgatttgctacaacttacacatggtgaagttaaaccttcatacgcggccattcacataccacacgatggtcaaattaatgcacatcattacacactggcattattagaatcaatgaagttaagagatattaagcgttatgagtctacagaggtcacttcaatagaacggcataatggctattattcagtgaaaaccgatcaatcttcaacaattgaagcgcacaaaattatcgttgcaggtggcgcatggtcttcgcaattattaacacaatatcatctacaacgacaagtgattggcgttaaaggtgaagttatcttattagaaaataacgatctttcacttactgagacattatttatgactaatggttgttacatcgttccaaaacaacccaatcgttttttaattggtgcgacgagtgaatttaataattattctgtcggtactacagatgaaggtatggattggcttcttcgccatgcatatcatcgtgtacctcaactaaaagacagtcatatactgaagaaatggtcaggagtaagaccatacacagaaaaagaaatgccagtcatggatcaaattgatgatggcttatacgtgataagtggtcattatcgaaacggaatattattgtcacctattatcggtcgtgacattgccaattggctactttctggtattaaaccatcacgttattcaagttttacagttacaaggaggaataatcatgaagtgtatcattaa

SEQ ID NO: 2454 - protein, 359 aa, Artificial Sequence
  Description of Artificial Sequence: synthetic amino acid sequence
MSIARHLSATHLDVAVIDRDVPGKHASYKAGGMLGAQNEFTEDSDLFQLAIESRAMFPQLSKSLLDETGIDIQFKNSGLIKIANEHDDISSIKRQYQFLNSQDRSVKQLSDDDLLQLTHGEVKPSYAAIHIPHDGQINAHHYTLALLESMKLRDIKRYESTEVTSIERHNGYYSVKTDQSSTIEAHKIIVAGGAWSSQLLTQYHLQRQVIGVKGEVILLENNDLSLTETLFMTNGCYIVPKQPNRFLIGATSEFNNYSVGTTDEGMDWLLRHAYHRVPQLKDSHILKKWSGVRPYTEKEMPVMDQIDDGLYVISGHYRNGILLSPIIGRDIANWLLSGIKPSRYSSFTVTRRNNHEVYH

SEQ ID NO: 2455 - DNA, 999 bp, Artificial Sequence
  Description of Artificial Sequence: synthetic nucleic acid sequence
atgtcgcgttatgaacgtcaaacacgctttgcaccatttggagaagagggtcagcaaaagctatcctcctctcaaatacttatttttggcgctggtgctttaggaagccatattgtagatcaactcgcacgcatgggggctcatcatattgcaatcgtcgatatggatattgttgaaatttcaaatttacatcgacaaacactcttcgatgaagaagacgcacatactttaatatccaaagttgaagcaatcaagcataaggttaatcaaattaatataaatgtcaatctaacaacttatgatttagaagttacttcatcaaatatcgaaaatttgataaaaaatgtcgaaccagacatcatcattgatggcatggataacttcaaaatacgatacctgattaatgaggtttgtcacaagtatcaaatcccatgggtttatggtgcagctgttggtagtaaaggatcagtatatggaatagatcaccaaggaccatgtctaaaatgtttattgcaaacaattcctgacacaggggaaagttgcgctattaatggcgtaattccccctgttatatcaatgattgcaagctatgaagtagcagaggccgtacgttatctttcaggaaaaggattttcaaagcaattaatcactattgatgcatttaatatcaattataagtcaatgaatgtagatgcactcaaaaataaagattgcccagtgtgtgaaaaacatgaatatacgttactagaaagccaacaagaacgtactattgaggacttgtgtgggaatgcttatttatttagattcccacctaaagcttttaaacacgctgcccatttccctgggaatatggtgaaatctacttcctttgccaaattaattcaatatcaaacttatgaattcaccttgtttaaagatggtcgtatgaatgcatatggtatacacaatgatgaagaagcacatcacctatacaatacgttgttaaaatccatacgctaa

SEQ ID NO: 2456 - protein, 332 aa, Artificial Sequence
  Description of Artificial Sequence: synthetic amino acid sequence
MSRYERQTRFAPFGEEGQQKLSSSQILIFGAGALGSHIVDQLARMGAHHIAIVDMDIVEISNLHRQTLFDEEDAHTLISKVEAIKHKVNQININVNLTTYDLEVTSSNIENLIKNVEPDIIIDGMDNFKIRYLINEVCHKYQIPWVYGAAVGSKGSVYGIDHQGPCLKCLLQTIPDTGESCAINGVIPPVISMIASYEVAEAVRYLSGKGFSKQLITIDAFNINYKSMNVDALKNKDCPVCEKHEYTLLESQQERTIEDLCGNAYLFRFPPKAFKHAAHFPGNMVKSTSFAKLIQYQTYEFTLFKDGRMNAYGIHNDEEAHHLYNTLLKSIR

SEQ ID NO: 2457 - DNA, 615 bp, Artificial Sequence
  Description of Artificial Sequence: synthetic nucleic acid sequence
atggaacaaattatcactgattttattagtaagtggggttatacagcgatattcattttaatcttattagagaacgtattacctgtcgttccatctgagattattttaacttttgcaggcttattatctgtgaaatcacacttatctatttggacattattaatcatagcaacaattgcttcattcattggtttactcattttgtattatatttgtagacttatctcagaagagaaattatatcgtttcgttgatcgacatggtaagtggatgaagttaaaaagtaaagatttgaaacgggcaaatgattggtttaaaaagtatggtgcgtgggctgtatttttatgtcgttttgtcccagtacttcgagtattaattacaatacctgctggcattaatcgaatgaacgttatacagtttacaactttatctttaataggtactacaatttggaattttgctttaatactgctcggtcgtttgctcagtgacagttttgacgctttgatgaatggtattcatacatattcacgtatcatgtatgtcattattattattgcagtcatatattttgttatacgttatttaatgaaacgtcgtcggagtgttaaataa

SEQ ID NO: 2458 - protein, 204 aa, Artificial Sequence
  Description of Artificial Sequence: synthetic amino acid sequence
MEQIITDFISKWGYTAIFILILLENVLPVVPSEIILTFAGLLSVKSHLSIWTLLIIATIASFIGLLILYYICRLISEEKLYRFVDRHGKWMKLKSKDLKRANDWFKKYGAWAVFLCRFVPVLRVLITIPAGINRMNVIQFTTLSLIGTTIWNFALILLGRLLSDSFDALMNGIHTYSRIMYVIIIIAVIYFVIRYLMKRRRSVK

SEQ ID NO: 2459 - DNA, 936 bp, Artificial Sequence
  Description of Artificial Sequence: synthetic nucleic acid sequence
atgaaacaaaaatatctagatttactctcacaaaaatttgacagtgcagaaaaacttgctactgaaattattaacttagagtcaatcttagaattacctaaagggactgaacattttgttagtgaccttcatggtgaatacgaatctttccaacatgttttaagaaacggatctggaaatgtgcgtgctaaaattaatgatatcttcaaagataaattatcccagcaagaaatcaacgacttagcagcattagtatactatccggaagaaaaactaaaattagttaaaaataatttcgattcaatcggaacattaaatatttggtatattacaaccattcaacgattaattgatttaattacatattgctcatcaaaatatacacgttcaaaattacgcaaagcattacctgaacaatacgtttatattattgaagagctactttacaagagcaatgaatttcataataaaaagccttattatgaaacattagttaaccaaattattgaattagaacaatcagatgatttaatcattggcctttcctatactgtacaacgtctagtcgtagaccatcttcatgtcgtgggcgatatctatgaccgtggtcctaaacctgataagattatggatacattaataaattatcattctgtagatatccaatggggaaatcatgatgtattatggattggcgcctatgctggttcaaaagtatgtcttgctaaccttctacgtatctgtgcacgttatgataatttagatattattgaagatgcatatggcatcaatctacgccctttacttacgcttgctgaaaagtattacgatgctgaaaacccagcgtttaaacctaagaaacgaccagataaagacgtcagtcttacaaaacgcgagaaagtcaaatcacaaaaattcatcaagcaattgcgatga

SEQ ID NO: 2460 - protein, 311 aa, Artificial Sequence
  Description of Artificial Sequence: synthetic amino acid sequence
MKQKYLDLLSQKFDSAEKLATEIINLESILELPKGTEHFVSDLHGEYESFQHVLRNGSGNVRAKINDIFKDKLSQQEINDLAALVYYPEEKLKLVKNNFDSIGTLNIWYITTIQRLIDLITYCSSKYTRSKLRKALPEQYVYIIEELLYKSNEFHNKKPYYETLVNQIIELEQSDDLIIGLSYTVQRLVVDHLHVVGDIYDRGPKPDKIMDTLINYHSVDIQWGNHDVLWIGAYAGSKVCLANLLRICARYDNLDIIEDAYGINLRPLLTLAEKYYDAENPAFKPKKRPDKDVSLTKREKVKSQKFIKQLR

SEQ ID NO: 2461 - DNA, 1380 bp, Artificial Sequence
  Description of Artificial Sequence: synthetic nucleic acid sequence
atggattttgatacgattacaagtatttcaacaccgatgggtgaaggtgctattggaattgtgagattatctgggccacaagctattgaaatcggagatatcttatataaaggtaagaaaaagttatctgaagttgagacgcatacaataaattacggtcatattattgatccagaaacaaatgaaacagttgaagaagtcatggtgtctgtattacgtgcccctaaaactttcacacgagaagatattattgagataaattgtcatggtggtattttaacaattaatcgtatattagagttaactatgacttatggtgcacgtatggcagaaccaggtgaatatacaaaacgtgcatttttaaatggtcgtatagatttatctcaagcagaagcggttatggattttatacgttccaaaactgatcgagcttctaaggttgcgatgaatcaaatagaaggacgtttaagtgacttaatcaagaaacaacgtcaatccatattagagatactcgcccaagttgaagttaacattgattatccagagtatgatgatgtagaagacgcaacgacggacttcttactagaacagtctaagcgtattaaagaagaaatcaatcagttacttgaaacaggagcacaaggtaaaataatgagagaagggttatctacagttattgtaggacgtcctaatgttgggaagtcttcgatgctaaataaccttattcaagataataaagcaattgtgactgaggtcgctggtacaacaagagacgtgttagaagaatatgtcaatgttagaggtgtcccgttacgacttgtagatactgcgggtattagggatactgaagatatcgtagagaagattggtgtagaacgttctaggaaagctttaagtgaagcagatttaattttatttgtgcttaataacaatgaacctctgacggaagatgatcaaactttattcgaagtcattaaaaatgaggatgttattgtaatcattaataaaacagatttagaacagcgattagatgttagcgaactaagagagatgattggtgatatgccacttatacaaacatcgatgcttaaacaagaaggtattgatgaattagaaatacaaattaaagatttattctttggtggcgaagtacaaaatcaagatatgacttatgtatctaattcacgtcacatttcattgttgaaacaagcgagacaatcaattcaagatgcgattgatgctgctgagtctggtatcccaatggatatggtacagattgatttaacacgtacttgggaaattctaggagaaattattggagaatcagcgagtgatgaattaatagatcaactatttagtcaattttgtttaggaaaataa

SEQ ID NO: 2462 - protein, 459 aa, Artificial Sequence
  Description of Artificial Sequence: synthetic amino acid sequence
MDFDTITSISTPMGEGAIGIVRLSGPQAIEIGDILYKGKKKLSEVETHTINYGHIIDPETNETVEEVMVSVLRAPKTFTREDIIEINCHGGILTINRILELTMTYGARMAEPGEYTKRAFLNGRIDLSQAEAVMDFIRSKTDRASKVAMNQIEGRLSDLIKKQRQSILEILAQVEVNIDYPEYDDVEDATTDFLLEQSKRIKEEINQLLETGAQGKIMREGLSTVIVGRPNVGKSSMLNNLIQDNKAIVTEVAGTTRDVLEEYVNVRGVPLRLVDTAGIRDTEDIVEKIGVERSRKALSEADLILFVLNNNEPLTEDDQTLFEVIKNEDVIVIINKTDLEQRLDVSELREMIGDMPLIQTSMLKQEGIDELEIQIKDLFFGGEVQNQDMTYVSNSRHISLLKQARQSIQDAIDAAESGIPMDMVQIDLTRTWEILGEIIGESASDELIDQLFSQFCLGK

SEQ ID NO: 2463 - DNA, 1878 bp, Artificial Sequence
  Description of Artificial Sequence: synthetic nucleic acid sequence
gtggttcaagaatatgatgtagtagtcattggtgctggtcacgccggtattgaagcaggtctagcttcagctcgccggggtgctaaaacactgatgttaacaattaatttagataatattgctttcatgccatgtaatccatctgtaggtggtcctgcgaaaggaatcgttgtacgtgaaatagacgctttaggtggacaaatggcaaaaactattgataaaactcacattcaaatgcgtatgcttaatacaggtaaaggtccagctgttagagctttacgtgctcaagcagataaagtattatatcaacaagaaatgaagcgtgtacttgagaatgaggataatttagacatcatgcaaggtatggttgatgaactcattatagaagataatgaagttaaaggtgttcgtactaatattggtacagaatatcgttctaaagctgtcattattacaacaggtacattcttacgtggagaaattatactaggaaacttaaaatattctagtggccctaaccatcaattaccatctgtaactctagcggataatttaagaaaattaggatttgatatcgttagatttaaaacgggtacaccaccacgtgtaaatgcgagaaccatcgattattctaaaactgaaatccaaccaggtgatgatataggtcgagcgtttagttttgaaacaaccgaatttattttagatcaattaccttgttggttaacttatacaaatggagatacacatcaagtcattgatgataacttacatttatctgctatgtattccggtatgattaaaggtacaggtcctagatattgtccatcaattgaggataaatttgtccgctttaacgataaaccaagacatcaacttttcttagaacctgaaggacgtaatacgaatgaggtatacgtgcaaggattatctactagtttacctgaacatgttcaacgtcaaatgttagaaaccattccaggtcttgaaaaagcagatatgatgcgtgcgggttatgctattgaatatgatgcaatcgtgcctactcaattatggccaacgttagaaacaaaagcgattaaaaacttgtatactgcaggtcagattaatggaacatcaggatatgaagaagcagcgggacaaggaatcatggcaggtattaacgctgctggtaatgttttaggtacaggtgaaaaaatactcagccgttcagacgcatatattggtgtacttatagatgatttagtcactaagggtacaaatgaaccgtatcgattattaacttcacgtgcggaatatcgattattactacgtcatgataatgctgatttacgtcttactgatatggggtatgaattaggtttaatatcagaagaacgctatgcaagatttaatgaaaagcgtcaacaaatcaaagatgaaatacaacgacttaccgatgtacgtattaaaccaaatgaacatacgcaagcaattattgaagctaagggtggttcaagattaaaagatggcatattagcgattgatttattacgtcgtcccgaaatgaactacgaaacaattttagaaatcttagaagaatcacatcaacttcctgaagcggttgaggaacaagttgaaattcaaacaaaatatgaaggttatatcaataaatctttacaacaagtagaaaaagttaaaagaatggaagcgaaaaaaattcctgaggatttagattatagcaaggtagatagtttagcatctgaagcacgcgaaaagttagctgaagttaaaccattaaatattgcacaggcttcacgaatttcaggtgtgaatccagcagatatctcaattctacttgtttatttagaacaaggtaaacttcaaagggtgaaacaataa

SEQ ID NO: 2464 - protein, 625 aa, Artificial Sequence
  Description of Artificial Sequence: synthetic amino acid sequence
VVQEYDVVVIGAGHAGIEAGLASARRGAKTLMLTINLDNIAFMPCNPSVGGPAKGIVVREIDALGGQMAKTIDKTHIQMRMLNTGKGPAVRALRAQADKVLYQQEMKRVLENEDNLDIMQGMVDELIIEDNEVKGVRTNIGTEYRSKAVIITTGTFLRGEIILGNLKYSSGPNHQLPSVTLADNLRKLGFDIVRFKTGTPPRVNARTIDYSKTEIQPGDDIGRAFSFETTEFILDQLPCWLTYTNGDTHQVIDDNLHLSAMYSGMIKGTGPRYCPSIEDKFVRFNDKPRHQLFLEPEGRNTNEVYVQGLSTSLPEHVQRQMLETIPGLEKADMMRAGYAIEYDAIVPTQLWPTLETKAIKNLYTAGQINGTSGYEEAAGQGIMAGINAAGNVLGTGEKILSRSDAYIGVLIDDLVTKGTNEPYRLLTSRAEYRLLLRHDNADLRLTDMGYELGLISEERYARFNEKRQQIKDEIQRLTDVRIKPNEHTQAIIEAKGGSRLKDGILAIDLLRRPEMNYETILEILEESHQLPEAVEEQVEIQTKYEGYINKSLQQVEKVKRMEAKKIPEDLDYSKVDSLASEAREKLAEVKPLNIAQASRISGVNPADISILLVYLEQGKLQRVKQ

SEQ ID NO: 2465 - DNA, 609 bp, Artificial Sequence
  Description of Artificial Sequence: synthetic nucleic acid sequence
atgttcgaaattatagccggcgaacgacgatttcgagcattacagtcgttgcataaacctcaagtagatgtcattgttcgagatatggatgatgaagaaacagcggtagttgcattgattgaaaatattcaacgtgaaaacttatctgtcgtcgaagaagcggaagcttataaaaagttacttgaaatcgggggaacgactcaaaatgaattagcaaaaagtctaggcaagagccaaagcttcattgctaataaacttagattattgaagttagcacccaatgtgattaagagattacgtgaaggtaagattacagaaagacatgcacgagcggtattagtattacctgatgaaacacaagaagaattaatcgagcaagttattagtcagaagttgaatgtgaaacaaactgaggatagagtacgtcagaaaactggaccagagaaagtaaaagcgcagactttccaattttctcaagatgtaacacaagcaaaagaagaactaggtaagagtattgaaacgatagaaaaatcaggtatacgcgttgaacaaaaagataaagaacatgaagattattatgaaattaaaataaagatatataagaaataa

SEQ ID NO: 2466 - protein, 202 aa, Artificial Sequence
  Description of Artificial Sequence: synthetic amino acid sequence
MFEIIAGERRFRALQSLHKPQVDVIVRDMDDEETAVVALIENIQRENLSVVEEAEAYKKLLEIGGTTQNELAKSLGKSQSFIANKLRLLKLAPNVIKRLREGKITERHARAVLVLPDETQEELIEQVISQKLNVKQTEDRVRQKTGPEKVKAQTFQFSQDVTQAKEELGKSIETIEKSGIRVEQKDKEHEDYYEIKIKIYKK

SEQ ID NO: 2467 - DNA, 681 bp, Artificial Sequence
  Description of Artificial Sequence: synthetic nucleic acid sequence
atggctaaaagctatgattatcaaagtgctttcgatattattggaccagtaatgatgggaccttcaagttctcatacagcaggtgcagtaaaaattggtaattcagcgagagctgtgttaggagatatgcctaagcatatagaaattcgttattatgaatcttttgctaaaacgcatcaagggcatggtacagacgttgctattgtcggaggtgctatgggctacagcactttcgatagtagaattaaatcatccttagacatagcaaaagatgaaaatattacaattgatattattgaagatgaaggagaaagtattggtcaacatcctaactgtgcttatatcaaagcaaatacgaaagacggacgttatatagaagtgataggtatttctattggtggcggtacaatcaaactaaaaggtatcaatgtaaatggtttaaatgtggaactgaatcatgggcttccaatgttagttatagatggaaatatgaataaagctaaaataaatcatcttattaatgatttatcagatatggacttagacttaggtgaagaattaatagaaacaaatgataatgaaggtttagttgtatttcctttaaataaagcaatctcagaatcagcattaaatattattaaagataaacatagtgatttaaacgtttcctatatcaaatag

SEQ ID NO: 2468 - protein, 226 aa, Artificial Sequence
  Description of Artificial Sequence: synthetic amino acid sequence
MAKSYDYQSAFDIIGPVMMGPSSSHTAGAVKIGNSARAVLGDMPKHIEIRYYESFAKTHQGHGTDVAIVGGAMGYSTFDSRIKSSLDIAKDENITIDIIEDEGESIGQHPNCAYIKANTKDGRYIEVIGISIGGGTIKLKGINVNGLNVELNHGLPMLVIDGNMNKAKINHLINDLSDMDLDLGEELIETNDNEGLVVFPLNKAISESALNIIKDKHSDLNVSYIK

SEQ ID NO: 2469 - DNA, 612 bp, Artificial Sequence
  Description of Artificial Sequence: synthetic nucleic acid sequence
atgaagcagtggatgaatagattaatcaccttaataggcgtattgttaatcattttagctatttatttattctcaaagccatatatcgataattatctacatgaaaaagataacgatcataaaattgaaaattatgataaaaaggaaaaagaacagacaaagacatctaaatcgacgccaaagataccttccgataaatctaaaatggctggttatatagaagttccagatgcacaaataaaagaaccagtataccctggtccagcaacaccagaacaactcaatagaggtgttagttttgcagaaggtgacgaatctcttaatcaacagaatatttcaattgctggtcatacgtttacagatcgttcgcactatcaatttacaaatttaaaatcagccaaaatcggtagtaaagtgtattttaaaactggaaatcaaactagaaagtataaaataactaaaatacgtgatgttaagcctacagaggttaaggtattagacgaacatcctaataagaaaaatcaattaacattaattacttgcgatgactataacgaagaaacgggtgtttgggaaacaaggaaaatattcatagctacacaaattaactaa

SEQ ID NO: 2470 - protein, 203 aa, Artificial Sequence
  Description of Artificial Sequence: synthetic amino acid sequence
MKQWMNRLITLIGVLLIILAIYLFSKPYIDNYLHEKDNDHKIENYDKKEKEQTKTSKSTPKIPSDKSKMAGYIEVPDAQIKEPVYPGPATPEQLNRGVSFAEGDESLNQQNISIAGHTFTDRSHYQFTNLKSAKIGSKVYFKTGNQTRKYKITKIRDVKPTEVKVLDEHPNKKNQLTLITCDDYNEETGVWETRKIFIATQIN

SEQ ID NO: 2471 - DNA, 810 bp, Artificial Sequence
  Description of Artificial Sequence: synthetic nucleic acid sequence
atgattaaagccattgcggtagatatggatggaacatttcttgacacaaataaacagtttgatcgaaatcgttttgaaactatttttaaagaattaatagataaaaatattaagtttatagctgcgagtgggaatcaatttgcaaagctaaaatcaatttttggagatagggaaatgttctttatatctgaaaatggagcagtcatctataaaggtaatcaactttacaattatcgaagttttgatcagtatatttttcaaaaagttgtaaattatttaaatttgaatcaaaagataaacaatttgattatttgtggtgtaaaaagtgcatatattttaaaagaaacaagcgaagcatttaagcaagatgcacgtacatattatcaccaactaatagaggttgactccttacaaacattacctgatgatgattatgtgaaaattgctttcaatataaatcgtcagactcatccagacttagatgagaaattagctcttaagtttaaagacgatattaaactagtatcaagtgggagagatagtatagatgttattatgccaaatatgactaagggtcaagctttgtctagattattaaaagaatggcaaatgcctgcttcacatttaatggcatttggagatgcaaataacgataaagatatgttggagcttgccgaacatagttatgttatggctaatagtgaagatcaatcattatttaatatagcgagtcatgtggcaccttccaatgatgaacaaggcgtactatcaacaatcgaaaatgttgttctcggttattccaataaataa

SEQ ID NO: 2472 - protein, 269 aa, Artificial Sequence
  Description of Artificial Sequence: synthetic amino acid sequence
MIKAIAVDMDGTFLDTNKQFDRNRFETIFKELIDKNIKFIAASGNQFAKLKSIFGDREMFFISENGAVIYKGNQLYNYRSFDQYIFQKVVNYLNLNQKINNLIICGVKSAYILKETSEAFKQDARTYYHQLIEVDSLQTLPDDDYVKIAFNINRQTHPDLDEKLALKFKDDIKLVSSGRDSIDVIMPNMTKGQALSRLLKEWQMPASHLMAFGDANNDKDMLELAEHSYVMANSEDQSLFNIASHVAPSNDEQGVLSTIENVVLGYSNK

SEQ ID NO: 2473 - DNA, 669 bp, Artificial Sequence
  Description of Artificial Sequence: synthetic nucleic acid sequence
atgattatgaatcagatgaatcaaacgattattgatgcattccattttagacatgcgacaaaagaatttgaccctacgaaaaaaattagtgatgaagattttaatacgattttagaaacaggtagattatctccaagttcactaggtttagaaccttggcactttgtagtggttcaaaataaagaattgagagaaaaattgaaagcctatagttggggagcacaaaagcaacttgatacagcaagtcactttgtattaatttttgctcgtaagaatgtgacggctcatacagattacgtgcaacatttacttcgtggcgtcaaaaaatatgaagaaagtacaattccagcagttgaaaataaatttgatgatttccaagaaagtttccatattgccgataatgaacgaacattatatgactgggcgagtaaacaaacatatattgcattagcaaacatgatgacaagtgctgcattactaggtatcgactcatgtccaattgaaggatttgatttagataaagtgactgaaattctttcagatgagggtgttttagatacggaacaatttggtatttcagttatggtaggctttggttacagagcacaagaacctaaacatggcaaagttagacaaaacgaagacgacatcattagttggattgaataa

SEQ ID NO: 2474 - protein, 222 aa, Artificial Sequence
  Description of Artificial Sequence: synthetic amino acid sequence
MIMNQMNQTIIDAFHFRHATKEFDPTKKISDEDFNTILETGRLSPSSLGLEPWHFVVVQNKELREKLKAYSWGAQKQLDTASHFVLIFARKNVTAHTDYVQHLLRGVKKYEESTIPAVENKFDDFQESFHIADNERTLYDWASKQTYIALANMMTSAALLGIDSCPIEGFDLDKVTEILSDEGVLDTEQFGISVMVGFGYRAQEPKHGKVRQNEDDIISWIE

SEQ ID NO: 2475 - DNA, 993 bp, Artificial Sequence
  Description of Artificial Sequence: synthetic nucleic acid sequence
atgacaaaaattatgtttttcggcacaagagcatatgagaaggacatggcattacgttggggaaagaaaaataatatcgatgtcactacatcaacagaacttttaagtgtagatactgtcgatcaattaaaagattatgacggtgttacaacaatgcagttcggtaaattagaacctgaagtttaccctaaattagagtcctatggtattaaacaaattgcacaacgtacggctggatttgatatgtatgacttagaacttgcaaaaaaacatgaaattattatctcgaatatacctagttattcacctgaaacaattgctgaatattcggtatctatcgctctgcaactcgtacgaaaattcccaacaattgaaaaacgtgtgcaagcacataatttcacatgggcgtcccctattatgtctcgtccagtaaaaaatatgactgtagcaatcatcggtacagggcgtattggtgctgcaactggtaaaatctatgctggttttggtgcgagagtagttggttatgatgcatatcctaatcattctttatctttcttagaatataaagaaacagtagaggatgcaattaaagatgctgatattatctcattacatgtacccgctaataaagatagtttccatttatttgataacaatatgtttaaaaatgttaaaaaaggtgccgttttagtcaatgccgcaagaggagctgtgataaacacgcctgatttaattgaagcagtaaataatggtacattatcaggtgctgccattgacacatatgaaaatgaagctaattatttcacatttgattgttcaaatcaaacgattgacgacccaatattattagacctaattagaaatgaaaatattttagttacacctcatattgcctttttctccgatgaagcagtacaaaatttagtagagggtggtttgaatgcagcattatcagtaattaatactggcacatgtgatacgcgattaaactaa

SEQ ID NO: 2476 - protein, 330 aa, Artificial Sequence
  Description of Artificial Sequence: synthetic amino acid sequence
MTKIMFFGTRAYEKDMALRWGKKNNIDVTTSTELLSVDTVDQLKDYDGVTTMQFGKLEPEVYPKLESYGIKQIAQRTAGFDMYDLELAKKHEIIISNIPSYSPETIAEYSVSIALQLVRKFPTIEKRVQAHNFTWASPIMSRPVKNMTVAIIGTGRIGAATGKIYAGFGARVVGYDAYPNHSLSFLEYKETVEDAIKDADIISLHVPANKDSFHLFDNNMFKNVKKGAVLVNAARGAVINTPDLIEAVNNGTLSGAAIDTYENEANYFTFDCSNQTIDDPILLDLIRNENILVTPHIAFFSDEAVQNLVEGGLNAALSVINTGTCDTRLN

SEQ ID NO: 2477 - DNA, 495 bp, Artificial Sequence
  Description of Artificial Sequence: synthetic nucleic acid sequence
atgattagatttgcacgactagaagatcttcaagatattttgacaatttataatgatgccatccttaatacaacagctgtttatacgtataagccacaacaattagatgaacgtcttcaatggtatcaatctaaagcaaaaataaacgaacctatatgggtttatgaaaaagaagggaaagtagttggttttgccacttatggttcctttagacaatggccggcctatttatatactattgaacattctatatatgttcatcaacagtacagaggactaggtatcgcttctcaattattagagaatttaattcgttacgctaaagaacaaggttatcgcaccattgttgctgggattgatgcatcgaacatggatagtatcgcattgcataagaagtttgacttctcacatgcaggtacaattaaaaatgtaggttataaatttgatcgatggctcgatttatcattttatcaatatgatttatctgattcataa

SEQ ID NO: 2478 - protein, 164 aa, Artificial Sequence
  Description of Artificial Sequence: synthetic amino acid sequence
MIRFARLEDLQDILTIYNDAILNTTAVYTYKPQQLDERLQWYQSKAKINEPIWVYEKEGKVVGFATYGSFRQWPAYLYTIEHSIYVHQQYRGLGIASQLLENLIRYAKEQGYRTIVAGIDASNMDSIALHKKFDFSHAGTIKNVGYKFDRWLDLSFYQYDLSDS

SEQ ID NO: 2479 - DNA, 363 bp, Artificial Sequence
  Description of Artificial Sequence: synthetic nucleic acid sequence
atgattatttatgtagttttaattattgcatttgcatatttttatgcttttgtacaagttaatcctgaaaaaatggcagataaccttaaaaagcaaggtagttatgtcccaggaattagacctggtgaacaaacaaaaaaatatattactaaagtactttatagattgacttttgttggttcaattttcttagcagctatagctattttacctataattgcgactaaatttatgggcttaccacaatcaattcaaattggtggtacgagtcttttgatcgttattggtgtagctattgaaactatgaaaactttagaagcacaagtcactcaaaaagaatataaaggctttggtggtagataa

SEQ ID NO: 2480 - protein, 120 aa, Artificial Sequence
  Description of Artificial Sequence: synthetic amino acid sequence
MIIYVVLIIAFAYFYAFVQVNPEKMADNLKKQGSYVPGIRPGEQTKKYITKVLYRLTFVGSIFLAAIAILPIIATKFMGLPQSIQIGGTSLLIVIGVAIETMKTLEAQVTQKEYKGFGGR

SEQ ID NO: 2481 - DNA, 1707 bp, Artificial Sequence
  Description of Artificial Sequence: synthetic nucleic acid sequence
atgaaacgtattaatgaagttggtataccaattatttttgtgattaatcagattgataaacataatgaagaagaaattacatttgaaacttttaaatcaagagtcgaaaaatcaatcaaagactgggatatcaaacttcaagatacttattacgtttcaaagtttgatcatccacagaatgaaattgacaaactttcaaattttctagtatttatggatcaacatcgtgaatcaacagaagactatgttaatagaaccattcaattcattaccgacgcacaatacatatacattcaaaatgaaatgcaatctattcttgacacccttcaaattaatgaagaacaattcgaggaagcatatattcaatttcaacaaaatcaagaagtcagcgcagaagcacaattgctcaatgactctaatcaattatttaattatttaaaacagaagcgtaaagatatattagataatgcttatatcatgacgtacgatatgcgtgaatctttacggaattatttagaaagcatggcaactgattttaaagtgaatggattttttaataaaaggaagaaaaaagaagaagaacaaatcaaacgacttaatgaggcgaccactcaattgcaagagaaagttaatcaacaagtacgacaaccacttcgtgaagatatgtcatttttaactagattcataaataaacatgctgtgaatgaaaaaatactaaatcaagaatatgacgtcgttccgtcacttatatcagagctatatcaaactcaaacgagcattagcaacacatacgttttaacattttcagatgaagttataaaagctttgaataaaaaaatagaaaatgagtcaacaccactatttgaagaagctgtcaatcatgtacaagttaatgaattatcgagtgatgaaaatgaagataggtatgaatatgatagatacattgaacttaacacattaaaggattcgcttacatcccacaactacaaacattactatatccatttagacgattctttagataaattaattggaagaacagagactcattttgaacttaaacaagaaaattcaactgcttatcatcgtaaacatgagacacaacatcgtaacgagtttgttacatctaatcaagatattaagcgtgcattagatatcgttaaagatgtaccattatttgatcgcactaaacaagatatcaccgataccattctgagactcgataatcaaataacaaaagttggtgtttttggtacatttagcgcaggtaaaagcagcttaatcaacgctctactaggtgaaaactatttagttagttctcctaatccaacaacagcggcaacgacggaattatcatatggtaaagagagtcaaatcacattaaaatcgaaagaacaattactagaggaagttaatcatgtactagaattttatgaaatatcgtttaacacattagacgactttattgagagtgatttagataagttaaaattgaaactagaaaagaaccaacttgcatttattagtgcaattgagaaacattatgaaatgtacacatctatgttagaacattcacttatacacacagtatcgcttgaagaaattaaaaaatggagtgccgaggatgagtatgctactttcgtgaaaactgtacaccttaagctacctttagattggctcaagggtaaaatcattattgcccattaa

SEQ ID NO: 2482 - protein, 568 aa, Artificial Sequence
  Description of Artificial Sequence: synthetic amino acid sequence
MKRINEVGIPIIFVINQIDKHNEEEITFETFKSRVEKSIKDWDIKLQDTYYVSKFDHPQNEIDKLSNFLVFMDQHRESTEDYVNRTIQFITDAQYIYIQNEMQSILDTLQINEEQFEEAYIQFQQNQEVSAEAQLLNDSNQLFNYLKQKRKDILDNAYIMTYDMRESLRNYLESMATDFKVNGFFNKRKKKEEEQIKRLNEATTQLQEKVNQQVRQPLREDMSFLTRFINKHAVNEKILNQEYDVVPSLISELYQTQTSISNTYVLTFSDEVIKALNKKIENESTPLFEEAVNHVQVNELSSDENEDRYEYDRYIELNTLKDSLTSHNYKHYYIHLDDSLDKLIGRTETHFELKQENSTAYHRKHETQHRNEFVTSNQDIKRALDIVKDVPLFDRTKQDITDTILRLDNQITKVGVFGTFSAGKSSLINALLGENYLVSSPNPTTAATTELSYGKESQITLKSKEQLLEEVNHVLEFYEISFNTLDDFIESDLDKLKLKLEKNQLAFISAIEKHYEMYTSMLEHSLIHTVSLEEIKKWSAEDEYATFVKTVHLKLPLDWLKGKIIIAH

SEQ ID NO: 2483 - DNA, 300 bp, Artificial Sequence
  Description of Artificial Sequence: synthetic nucleic acid sequence
atgtctaatccagagcgttttggacaaccatctcatatgaatgattttgtttatacaaattctgacaacggaggcgtacatacgaattcaggtattccgaacaaagcagcttacaacacaattcgtagtattggtaaacaacgttctgaacaaatttattatagagcgttaactgtttatttaacttcaaattctgatttccaagatgccaaagcatcattacaacaagcagcatttgatttatatggcgacggtattgctcaacaagtaggtcaagcatgggacagtgttggcgtgtag

SEQ ID NO: 2484 - protein, 99 aa, Artificial Sequence
  Description of Artificial Sequence: synthetic amino acid sequence
MSNPERFGQPSHMNDFVYTNSDNGGVHTNSGIPNKAAYNTIRSIGKQRSEQIYYRALTVYLTSNSDFQDAKASLQQAAFDLYGDGIAQQVGQAWDSVGV

SEQ ID NO: 2485 - DNA, 462 bp, Artificial Sequence
  Description of Artificial Sequence: synthetic nucleic acid sequence
atgaaaaagagtaaacgacaagatttagtaactatgattgttaagcaaaatcacatttataaaaaagcagatattattgattacattgatgatcactttggtgtacgttatagcatgactactattgcgagagatttaagagaacttcatatttatcgcctgcctgtgaaggcaaatcaatatgaatacaaattacttacgcaacaatctcaattagactcaagagtaagactaaatgattatatagaaacagaaattattaacactatgattaaagaatcgtatatactaataaagacgacaccaggatttgcacaaagcataaattattatattgatcagttacaactgaaagagattataggaacgataagtggtaatgatacaattatgattcttacacattcccagtctatagctgaatatgtctattacaaaatatttaatcataattattcataa

SEQ ID NO: 2486 - protein, 153 aa, Artificial Sequence
  Description of Artificial Sequence: synthetic amino acid sequence
MKKSKRQDLVTMIVKQNHIYKKADIIDYIDDHFGVRYSMTTIARDLRELHIYRLPVKANQYEYKLLTQQSQLDSRVRLNDYIETEIINTMIKESYILIKTTPGFAQSINYYIDQLQLKEIIGTISGNDTIMILTHSQSIAEYVYYKIFNHNYS

SEQ ID NO: 2487 - DNA, 1071 bp, Artificial Sequence
  Description of Artificial Sequence: synthetic nucleic acid sequence
atgagtatgacaaatggacctattcaagttaacagtgaaatcggcaaattaaagacggtattacttaaaagaccagggaaggaattagaaaacttagtgcctgattacttagatggattattgtttgatgatattccatttttaaaggtagctcaacaagagcatgatcattttgctcaagttcttcaagatgaaggaatagaagtgctttatttagaaaaattagcagcacaaagtatagaagattcaaatgtcagagagcaatttatagatgacgttttagcagaatctagaaaaactatcctaggtcatgaaaaagaaataaaaaaactcttttcaactttgtcaaatcaagcattaattaataagattatggctggcgtacgcaaagaagaaatacaacttgaatcgacacatcttgtagagtacatggatgataaatatccgttttatcttgacccaatgcctaatctatatttcacacgtgatcctcaagcttcaattggtagaggtatgacagtaaatcgtatgttttggagagcgagacgcagagaatcgattttcatttcatatattttaaaacatcatcctagatttaaagatgagaatattcctttatgggtggatcgtgactgtccgttcaacatcgaaggtggagacgaactggtgttatctaaagatgtacttgcaatagggatatctgaacgtacttctgcacaagcaattgaacgtttagcacgacgtatttttaaagatccgttatctacttttaaaaaggtggtggcgattgagattccaactagtcgaacatttatgcacttagatactgtttgtacaatgattgattacgacaaattcactacacattcagcaattcttaaatcagaaggaaacatgaatatctttattatcgaatatgatgataaagctgaagatatcaaaatccaacattctagtcatcttaaacaaacattagaagaagtgctcgatgttgatgaaatcacattaataccaactggaaatggtgatatcatcgacggtgctcgtgaatggatgtccaggtcctggtga

SEQ ID NO: 2488 - protein, 356 aa, Artificial Sequence
  Description of Artificial Sequence: synthetic amino acid sequence
MSMTNGPIQVNSEIGKLKTVLLKRPGKELENLVPDYLDGLLFDDIPFLKVAQQEHDHFAQVLQDEGIEVLYLEKLAAQSIEDSNVREQFIDDVLAESRKTILGHEKEIKKLFSTLSNQALINKIMAGVRKEEIQLESTHLVEYMDDKYPFYLDPMPNLYFTRDPQASIGRGMTVNRMFWRARRRESIFISYILKHHPRFKDENIPLWVDRDCPFNIEGGDELVLSKDVLAIGISERTSAQAIERLARRIFKDPLSTFKKVVAIEIPTSRTFMHLDTVCTMIDYDKFTTHSAILKSEGNMNIFIIEYDDKAEDIKIQHSSHLKQTLEEVLDVDEITLIPTGNGDIIDGAREWMSRSW

SEQ ID NO: 2489 - DNA, 921 bp, Artificial Sequence; identical to SEQ ID NO: 573
  Description of Artificial Sequence: synthetic nucleic acid sequence

SEQ ID NO: 2490 - protein, 306 aa, Artificial Sequence; identical to SEQ ID NO: 574
  Description of Artificial Sequence: synthetic amino acid sequence

SEQ ID NO: 2491 - DNA, 333 bp, Artificial Sequence
  Description of Artificial Sequence: synthetic nucleic acid sequence
atgcagaagcacctcaatctgagccaacgaagacagaagaaggaagcaacgcaaaagcagctcaatctgagccaacgaaggcagaagaaggaggcaatgcagaagcagctcaatctgagccaacgaagacagaagaaggaagcaatgcagaagcacctcaatctgagccaacgaaggcagaagaaggaggcaatgcagaagcacctcaatctgagccaacgaagacagaagaaggaggcaatgcagaagcaccgaatgttccaactatcaaagctaattcagataatgatacacaaacacaattttcagaagcccctacaagaaatgacctag

SEQ ID NO: 2492 - protein, 110 aa, Artificial Sequence
  Description of Artificial Sequence: synthetic amino acid sequence
MQKHLNLSQRRQKKEATQKQLNLSQRRQKKEAMQKQLNLSQRRQKKEAMQKHLNLSQRRQKKEAMQKHLNLSQRRQKKEAMQKHRMFQLSKLIQIMIHKHNFQKPLQEMT

SEQ ID NO: 2493 - DNA, 1179 bp, Artificial Sequence
  Description of Artificial Sequence: synthetic nucleic acid sequence
gtgaatttaaattatagttctccgtttatgtccttattaagcatgcctgctgatagttcatccaataacactaaaaatacaatagatataccgccaactacggttaaaggtagagataattacgatttttacggtagagtagatatcgaaagtaatcctacagatttaaatgcgacaaatttaacgagatataattatggacagccacctggtacaacaacagctggtgcagttcaatttaaaaatcaagttagttttgataaagatttcgactttaacattagagtagcaaacaatcgtcaaagtaatacaactggtgcagatggttggggctttatgttcagcaagaaagatggggatgatttcctaaaaaacggtggtatcttacgtgaaaaaggtacacctagtgcagctggtttcagaattgatacaggatattataataacgatccattagataaaatacagaaacaagctggtcaaggctatagagggtatgggacatttgttaaaaatgactcccaaggtaatacttctaaagtaggatcaggtactccatcaacagattttcttaactacgcagataatactactaatgatttagatggtaaattccatggtcaaaaattaaataatgttaatttgaaatataatgcttcaaatcaaacttttacagctacttatgctggtaaaacttggacggctacgttatctgaattaggattgagtccaactgatagttacaattttttagttacatcaagtcaatatggaaatggtaatagtggtacatacgcaagtggcgttatgagagctgatttagatggtgcaacattgacatacactcctaaagcagtcgatggagatccaattatatcaactaaggaaataccatttaataagaaacgtgaatttgatccaaacttagccccaggtacagaaaaagtagtccaaaaaggtgaaccaggaattgaaacaacaacaacaccaacttatgtcaatcctaatacaggagaaaaagttggcgaaggtgaaccaacagaaaaaataacaaaacaaccagtggatgaaatcgttcattatggtggcgaagaaatcaagccaggccataaggatgaatttgatccaaatgcaccgaaaggtagtcaaacaacgcaaccaggtaagccggggggttaa

SEQ ID NO: 2494 - protein, 392 aa, Artificial Sequence
  Description of Artificial Sequence: synthetic amino acid sequence
VNLNYSSPFMSLLSMPADSSSNNTKNTIDIPPTTVKGRDNYDFYGRVDIESNPTDLNATNLTRYNYGQPPGTTTAGAVQFKNQVSFDKDFDFNIRVANNRQSNTTGADGWGFMFSKKDGDDFLKNGGILREKGTPSAAGFRIDTGYYNNDPLDKIQKQAGQGYRGYGTFVKNDSQGNTSKVGSGTPSTDFLNYADNTTNDLDGKFHGQKLNNVNLKYNASNQTFTATYAGKTWTATLSELGLSPTDSYNFLVTSSQYGNGNSGTYASGVMRADLDGATLTYTPKAVDGDPIISTKEIPFNKKREFDPNLAPGTEKVVQKGEPGIETTTTPTYVNPNTGEKVGEGEPTEKITKQPVDEIVHYGGEEIKPGHKDEFDPNAPKGSQTTQPGKPGG

SEQ ID NO: 2495 - DNA, 1408 bp, Artificial Sequence
  Description of Artificial Sequence: synthetic nucleic acid sequence
gtggatgatgtgacaaaatatggtccagttgatggagatccgatcacgtcaacggaagaaattccattcgacaagaaacgtgaattcaatcctgatttaaaaccaggtgaagagcgtgttaaacaaaaaggtgaaccaggaacaaaaacaattacaacaccaacaactaagaacccattaacaggggaaaaagttggcgaaggtgaaccaacagaaaaaataacaaaacaaccagtagatgaaatcacagaatatggtggcgaagaaatcaagccaggccataaggatgaatttgatccaaatgcaccgaaaggtagccaagaggacgttccaggtaaaccaggagttaaaaaccctgatacaggcgaagtagtcacaccaccagtggatgatgtgacaaaatatggtccagttgatggagatccgatcacgtcaacggaagaaattccattcgacaagaaacgtgaattcaatcctgatttaaaaccaggtaaagagcgcgttaaacagaaaggtgaaccaggaacaaaaacaattacaacaccaacaactaagaacccattaacaggggaaaaagttggcgaaggtgaaccaacagaaaaagtaacaaaacaaccagtagatgaaatcacagaatatggtggcgaagaaatcaagccaggccataaggatgaatttgatccaaatgcaccgaaaggtagccaagaggacgttccaggtaaaccaggagttaaaaatcctgatacaggcgaagtagttactccaccagtggatgatgtgacaaaatatggtccagttgatggagatccgattacgtcaacggaagaaattccgtttgataaaaaacgcgaatttgatccaaacttagcgccaggtacagagaaagtcgttcaaaaaggtgaaccaggaacaaaaacaattacaacaccaacaactaagaacccattaacaggggaaaaagttggcgaaggtgaaccaacagaaaaagtaacaaaacaaccagtggatgaaatcgttcattatggtggcgaagaaatcaagccaggccataaggatgaatttgatccaaatgcaccgaaaggtagccaagaggacgttccaggtaaaccaggagttaaaaaccctgatacaggcgaagtagttactccaccagtggatgatgtgacaaaatatggtccagttgatggagatccgattacgtcaacggaagaaattccgtttgataaaaaacgcgaatttgatccaaacttagcgccaggtacagagaaagtcgttcaaaaaggtgaaccaggaacaaaaacaattacaacaccaacaactaagaacccattaacaggggaaaaagttggcgaaggtgaaccaacagaaaaagtaacaaaacaaccagtggatgaaatcgttcatatcg

SEQ ID NO: 2496 - protein, 470 aa, Artificial Sequence
  Description of Artificial Sequence: synthetic amino acid sequence
  MOD_RES (470): variable amino acid
VDDVTKYGPVDGDPITSTEEIPFDKKREFNPDLKPGEERVKQKGEPGTKTITTPTTKNPLTGEKVGEGEPTEKITKQPVDEITEYGGEEIKPGHKDEFDPNAPKGSQEDVPGKPGVKNPDTGEVVTPPVDDVTKYGPVDGDPITSTEEIPFDKKREFNPDLKPGKERVKQKGEPGTKTITTPTTKNPLTGEKVGEGEPTEKVTKQPVDEITEYGGEEIKPGHKDEFDPNAPKGSQEDVPGKPGVKNPDTGEVVTPPVDDVTKYGPVDGDPITSTEEIPFDKKREFDPNLAPGTEKVVQKGEPGTKTITTPTTKNPLTGEKVGEGEPTEKVTKQPVDEIVHYGGEEIKPGHKDEFDPNAPKGSQEDVPGKPGVKNPDTGEVVTPPVDDVTKYGPVDGDPITSTEEIPFDKKREFDPNLAPGTEKVVQKGEPGTKTITTPTTKNPLTGEKVGEGEPTEKVTKQPVDEIVHIX

SEQ ID NO: 2497 - DNA, 1455 bp, Artificial Sequence
  Description of Artificial Sequence: synthetic nucleic acid sequence
atggaagaaataccaacttatataacccgtagacataatcctaaccaatttgcttatttacatccagatttagaaccaatcttaaaaaacacatatggtgttatcatttatcaagaacaaataatgctaatagcaagtcaagttgctggttttagttatggtgaagcagatattttaagaagggcaatgagtaaaaagaatcgtgcaatcttagaaagtgagcgtcaacatttcattgatggtgcaaaaaataacggttacgatgaacagataagtaagcaaatttttgatttaatacttaagtttgcagattatgggttcccacgtgcccatgctgttagttactcaaaaattgcatacattatgagctatttaaaagtgcactatcctcattatttttatgcaaatatcttgagtaatgtaataggaagtgaaaaaaagactgcagctatgattgacgaagctaagcaccaaagaattagcatcttgcctcccaatattaatcaaagtcattggtattataaggcaagtaataaaggaatatatctgtctttaggtacaattaaaggaattggatatcaaagcgttaaattaattattgatgaacgtcagcagaatggaccttatagagatttctttgatttttcaagacgtataccaaaaagggtgaaaaatagaaaattacttgagtctcttatcttagtaggcgcattcgacacttttggcaaaactagagcgacattattacaagcaattgatcaagtattagatttgaattctgatgttgagcaagatgaaatgcttttcgatcttttaactcctaaacaatcgtatgaagaaaaagaggaactacctgatcaattattaagtgattatgaaaaagaatacctaggattctatattagtaaacatccagttgaaaagaaatttgaaaagaaacaatatttaggcatatttcaattgtctaatggaagtcactaccaacctatacttgttcaatttgaccatatcaaacaaataagaacgaagaatggtcaaaatatggcatttgtaacgatgaatgatggaagaacgatgatggatggagtgattttcccagataagtttaaaaaatacgaaacttctatttcaaaggaacagatgtatatcgtattaggtaaatttgaaaagcgtaaccaacaaatgcaacttatcatcaatcaactttttgaagttgaagcgtatgagcaaacaaaattgtctaattcgaaaaaagttattttacgtaatgtaacacatctagaaccacaatttgaacattcaaaagtagaatctaatgaacaacatgcattaaatatttatggttttgacgaaagtgcaaataagatgacaatgttgggacaaattgaacgtcaacgtcaaaattttgatctattaatacaaacttattcgccagctgatattagatttatttaa

SEQ ID NO: 2498 - protein, 484 aa, Artificial Sequence
  Description of Artificial Sequence: synthetic amino acid sequence
MEEIPTYITRRHNPNQFAYLHPDLEPILKNTYGVIIYQEQIMLIASQVAGFSYGEADILRRAMSKKNRAILESERQHFIDGAKNNGYDEQISKQIFDLILKFADYGFPRAHAVSYSKIAYIMSYLKVHYPHYFYANILSNVIGSEKKTAAMIDEAKHQRISILPPNINQSHWYYKASNKGIYLSLGTIKGIGYQSVKLIIDERQQNGPYRDFFDFSRRIPKRVKNRKLLESLILVGAFDTFGKTRATLLQAIDQVLDLNSDVEQDEMLFDLLTPKQSYEEKEELPDQLLSDYEKEYLGFYISKHPVEKKFEKKQYLGIFQLSNGSHYQPILVQFDHIKQIRTKNGQNMAFVTMNDGRTMMDGVIFPDKFKKYETSISKEQMYIVLGKFEKRNQQMQLIINQLFEVEAYEQTKLSNSKKVILRNVTHLEPQFEHSKVESNEQHALNIYGFDESANKMTMLGQIERQRQNFDLLIQTYSPADIRFI

SEQ ID NO: 2499 - DNA, 798 bp, Artificial Sequence
  Description of Artificial Sequence: synthetic nucleic acid sequence
atgattgtactattgttctacatatttactagtaaatcgtgtatatttaaaatgattcagttttcttttcagccagtgattaatattaaaaatttaaataaaaaatttggagcaaatgaagtattgagagatattaatcttactgttgaaaagggtgaagtggttgcaataattggaccatctggaagtggtaaaagcactttactccgttgtatgaatttgttagatgtaccttcaaaaggtaaagttatatttgaagataatgaattaactcaacataatgttcatttagataatttacgacaaaaaatgggtatggtatttcaaaattttaatttatttcctcataaaaaggtcattgaaaatgtaatgttggcaccacttttattacataaagatagtaaagatcaattaaaagagaaagctttatatttacttgaaaaagtggggcttaaagacaaagcagattcatatcctaatcaactgtctggaggtcaaaaacaaagagttgctattgcaagagctttggcaatggaacctgatgttatgttatttgatgaaccaacatctgcacttgatcctgaagtagtaggggatgttttaaaagtaatgagacaattagcgaatgaaggtatgacaatggtgattgtcacgcatgagatgaactttgctaaagaaataagtgataaagtagtatttatggccgatggtgttgtggttgaatctggtacaccacaaaacatatttgaaaatcctcagcacagtcgaactgaaaattttttatcacgagtgttataa

SEQ ID NO: 2500 - protein, 265 aa, Artificial Sequence
  Description of Artificial Sequence: synthetic amino acid sequence
MIVLLFYIFTSKSCIFKMIQFSFQPVINIKNLNKKFGANEVLRDINLTVEKGEVVAIIGPSGSGKSTLLRCMNLLDVPSKGKVIFEDNELTQHNVHLDNLRQKMGMVFQNFNLFPHKKVIENVMLAPLLLHKDSKDQLKEKALYLLEKVGLKDKADSYPNQLSGGQKQRVAIARALAMEPDVMLFDEPTSALDPEVVGDVLKVMRQLANEGMTMVIVTHEMNFAKEISDKVVFMADGVVVESGTPQNIFENPQHSRTENFLSRVL

SEQ ID NO: 2501 - DNA, 444 bp, Artificial Sequence
  Description of Artificial Sequence: synthetic nucleic acid sequence
atggtttcagattatcaatttgatccattaaaaaaccaaatcactcatattgactttttagcaatcaacatgagtgaagaacgtactgttgaagtacaagttcaattagttggtgaagctgtaggtgctaaagaaggcggcgtagttgaacaaccattattcaacttagaagttacagctacacctgaaaatattcctgaaactatcgaagtagatatcagtgaattacaagttaatgacagcttagcagtttctgatattaaaatctctggtgatttcacaatcgaaaataatccagaagattctatcgtaacagtagttcctccaacagatgaaccttctgaagaagaagttgaagctatggaaggcgaatcagcaactgaagaaccagaagttgttggtgaagacaaagaagacgatgaagaagaaaataaagaagactaa

SEQ ID NO: 2502 - protein, 147 aa, Artificial Sequence
  Description of Artificial Sequence: synthetic amino acid sequence
MVSDYQFDPLKNQITHIDFLAINMSEERTVEVQVQLVGEAVGAKEGGVVEQPLFNLEVTATPENIPETIEVDISELQVNDSLAVSDIKISGDFTIENNPEDSIVTVVPPTDEPSEEEVEAMEGESATEEPEVVGEDKEDDEEENKED

SEQ ID NO: 2503 - DNA, 567 bp, Artificial Sequence
  Description of Artificial Sequence: synthetic nucleic acid sequence
gtggaggtaacaataatgaaatgcattgtcggtcttggcaacattggtaaacgttttgaattaacaagacataatattggtttcgaagttgtcgatgatattctagaacgccaccaatttactttagacaaacaaaaatttaaaggtgcatatactattgaacgtttaaacggcgaaaaagtattatttattgagccaatgaccatgatgaacttatctggtcaagctgtagcccctttaatggattattataatgtcgatgttgaagatttgatcgttttatatgacgatttagatttagaacaaggacaagtgcgtctgcgccaaaaggggagtgcaggcggtcataatggtatgaaatcgataattaaaatgcttggtacagatcaatttaaacgtattcgaattggtgttggccgtccaacaaatgggatgtctgttccggactatgttttacaaaaattttcaaaagaagaaatgatcattatggaaaaggtaattgaacattctgcaagagctgtagaatcttttattgaaagttctcgttttgatcatgttatgaatgaa

SEQ ID NO: 2504 - protein, 189 aa, Artificial Sequence
  Description of Artificial Sequence: synthetic amino acid sequence
VEVTIMKCIVGLGNIGKRFELTRHNIGFEVVDDILERHQFTLDKQKFKGAYTIERLNGEKVLFIEPMTMMNLSGQAVAPLMDYYNVDVEDLIVLYDDLDLEQGQVRLRQKGSAGGHNGMKSIIKMLGTDQFKRIRIGVGRPTNGMSVPDYVLQKFSKEEMIIMEKVIEHSARAVESFIESSRFDHVMNE

SEQ ID NO: 2505 - DNA, 366 bp, Artificial Sequence
  Description of Artificial Sequence: synthetic nucleic acid sequence
atgtatagtgaaaaagaaatcatacgaaaagtcgaaagtttagcagagaaaattggaaaactagaagttgttcaagattatcataatgtagaaaaacaaattcataataatcaagcaataaaacaaaagatgaatcgtttgaaagcgcaacaaaaacaatcggttaattttcaaaattatggaaaacaaaatgcactcgagcaatctgaagttaaaattcagaatctaaaagatgaaattaatgaattacctattgttgaagaatttcgttcagcacaatatgaagcgaatgatttactacaaatgatggtcaaaacaatggaagatagactcaatgaatataataaaaaagaacacaatgaataa

SEQ ID NO: 2506 - protein, 121 aa, Artificial Sequence
  Description of Artificial Sequence: synthetic amino acid sequence
MYSEKEIIRKVESLAEKIGKLEVVQDYHNVEKQIHNNQAIKQKMNRLKAQQKQSVNFQNYGKQNALEQSEVKIQNLKDEINELPIVEEFRSAQYEANDLLQMMVKTMEDRLNEYNKKEHNE

SEQ ID NO: 2507 - DNA, 495 bp, Artificial Sequence
  Description of Artificial Sequence: synthetic nucleic acid sequence
atgaatattagaaagttgaccatcacagcattcttaatagctattaatgtcgtgttaagtagtttaattgtcattcctttaggtccaattaaagccgcacccgttcaacattttgtaaatgtattatgtgctgtatttgttggaccatggtatggtttagcgcaagcttttatttcttctgtactacgaatttcatttggaactggaagcgcatttgcttttccaggaagtatgataggtgtcttactttccagtctgttttatatgtataggaagcatatttttatggcttcagttggtgaagtattagggactggtgttattggtagtttaatgtgtatacctttagcatggtttttaggacttcaagatttctttattaaaccattaatgcttatgttcatagtatcaagttttattggggctttaattagttatatattgcttattattttgaaaagaagaggtttactagatagatttaacaaaaattaa

SEQ ID NO: 2508 - protein, 164 aa, Artificial Sequence
  Description of Artificial Sequence: synthetic amino acid sequence
MNIRKLTITAFLIAINVVLSSLIVIPLGPIKAAPVQHFVNVLCAVFVGPWYGLAQAFISSVLRISFGTGSAFAFPGSMIGVLLSSLFYMYRKHIFMASVGEVLGTGVIGSLMCIPLAWFLGLQDFFIKPLMLMFIVSSFIGALISYILLIILKRRGLLDRFNKN

SEQ ID NO: 2509 - DNA, 613 bp, Artificial Sequence
  Description of Artificial Sequence: synthetic nucleic acid sequence
gtgaaaatagaaatggctaacattacaccaatgatgcaacaatatttaaagataaaatctgaatatgatgattgtttgctattttttagactcggagatttctatgaaatgttctttgatgatgctaaagaagcatcaagagtacttgaaataacattgacgaaaagagatgctaaaaaagaaaatcctattccgatgtgtggcgtaccatatcattctgctgataattacattgaaacattgattaataatgggtataaggtcgctatatgtgaacaaatggaagatccaaagcaaacaaaaggaatggttagaagagaagttgtaagaatcatcacaccaggaactgttatggatcaaaatggtatggatgaaaagaaaaataattatattttaagttttatcgaaaatgaagaatttggattatgctattgtgatgtttctacaggcgaactcaaagtaactcatttcaaagatacagcaaccttgcttaatgagattacaacaattaatcccaatgaaatcgtcataaagcaagctctatctgaagaattaaaaagacaaatcaacatgataactgagacgattactgttcgcgaagatatatatgttt

SEQ ID NO: 2510 - protein, 205 aa, Artificial Sequence
  Description of Artificial Sequence: synthetic amino acid sequence
  MOD_RES (205): variable amino acid
VKIEMANITPMMQQYLKIKSEYDDCLLFFRLGDFYEMFFDDAKEASRVLEITLTKRDAKKENPIPMCGVPYHSADNYIETLINNGYKVAICEQMEDPKQTKGMVRREVVRIITPGTVMDQNGMDEKKNNYILSFIENEEFGLCYCDVSTGELKVTHFKDTATLLNEITTINPNEIVIKQALSEELKRQINMITETITVREDIYVX

SEQ ID NO: 2511 - DNA, 315 bp, Artificial Sequence
  Description of Artificial Sequence: synthetic nucleic acid sequence
atgagttcagcaattggacgtagccctgtcgcagcagctcctactgccgtgctcaatgtaatgtgttcagcaattggtgtatcgattacacgtttacgactatatttttttgcaagtccttttgttacaccaaatacaccaccgaatgtatcgtcatctttgatgtggtctacttttgcaccacctgagacatcagtaccaattaaaatgacatcctcatctttttccatagattggtcaatagcttcattaatagcccccataaatgttaacttgcgttcttcactcatcgtaaaaacctccttatgtggttag

SEQ ID NO: 2512 - protein, 104 aa, Artificial Sequence
  Description of Artificial Sequence: synthetic amino acid sequence
MSSAIGRSPVAAAPTAVLNVMCSAIGVSITRLRLYFFASPFVTPNTPPNVSSSLMWSTFAPPETSVPIKMTSSSFSIDWSIASLIAPINVNLRSSLIVKTSLCG

SEQ ID NO: 2513 - DNA, 1041 bp, Artificial Sequence
  Description of Artificial Sequence: synthetic nucleic acid sequence
atgagtgaagaacgcaagttaacatttatgggggctattaatgaagctattgaccaatctatggaaaaagatgaggatgtcattttaattggtactgatgtctcaggtggtgcaaaagtagaccacatcaaagatgacgatacattcggtggtgtatttggtgtaacaaaaggacttgcaaaaaaatatagtcgtaaacgtgtaatcgatacaccaattgctgaacacattacattgagcacggcagtaggagctgctgcgacagggctacgtccaattgctgaactcatgttcaacgactttattggatttggtttagatccaattttaaatcaaggggcaaaaatgagatatatgtttggtggaaaagccaaaatcccactagttgtacgtactcttcatggagcaggggcaagcgctgctgcacagcactctcagtctttatataatatgtttgcagcaattccaggagttaaagttgttgttccatctaatccatatgatgcgaagggtctactgatgtcagctattcaagaggacaatcttgttgtcttttcagaagataaaacattattaggacaaaaaggtaatgttcctgaagaaccttatactatagaaattggtaaagccaatgtgacgcgtgaaggtgacgatttaacaattgtggctattggaaaaatggtagctgtagcggaagaaactgctgaaaaacttgcagaagaccaagtatcagttgaggtcatcgatttacgctcagtgtcaccatgggatcaagaaacagttttagattctgtgaagaaaacgggtcgcttaattgttattgacgaatctaatccacagtgtaacattgctggagacgttgcttcagtgattggagatgtaggatttgattacttagatggtccaattaagaaagtgaccgcaccagacactcctgtaccatttgcagcgaacttagaggcggcatatatgccgaatgctgataaggtattagacattgcatctgaattaattgatgatttaaaaaaggctaacgcatag

SEQ ID NO: 2514 - protein, 346 aa, Artificial Sequence
  Description of Artificial Sequence: synthetic amino acid sequence
MSEERKLTFMGAINEAIDQSMEKDEDVILIGTDVSGGAKVDHIKDDDTFGGVFGVTKGLAKKYSRKRVIDTPIAEHITLSTAVGAAATGLRPIAELMFNDFIGFGLDPILNQGAKMRYMFGGKAKIPLVVRTLHGAGASAAAQHSQSLYNMFAAIPGVKVVVPSNPYDAKGLLMSAIQEDNLVVFSEDKTLLGQKGNVPEEPYTIEIGKANVTREGDDLTIVAIGKMVAVAEETAEKLAEDQVSVEVIDLRSVSPWDQETVLDSVKKTGRLIVIDESNPQCNIAGDVASVIGDVGFDYLDGPIKKVTAPDTPVPFAANLEAAYMPNADKVLDIASELIDDLKKANA

SEQ ID NO: 2515 - DNA, 1260 bp, Artificial Sequence
  Description of Artificial Sequence: synthetic nucleic acid sequence
atgccaaagcttggaatgacaatgaaagagggaactgttgaagagtggtttaaatcagagggtgacaccgtaaaacaaggagagagtattgttacaataagctctgaaaaattaaccaacgatgttgaagcgccggcgagtgggacattgttagaaattaaagtgcaagccggagaagatgcagaggttaaagcggtattaggtataattggagaagaaggggaagctattgataaagatgaagatgatttagcatcagaaaaagtaaaagaagacaacgagcatgagaaggaaacgcaagaagttaaagatacatcacaacagtcttccgataataaagataattcgcctaaaagcgcagcacgagaaagaatctttatctcacccctcgcacgtaatatggctgaggataaaggattagacattaacaagataaaaggcacaggcggtaatcatcgtattacaaaactagatattcaacgtgttgaagcaaatgggtacgactatgctagtgatacgacatctaatgaagatacaagtcatgttccaacacagactgtggatacaagtgcgattggtgaaggattgaatcctatgcgtcaacgtattgctcaaaacatgagacaaagtcttaatagtactgctcaattaacattacatcgtaaggttgatgcggatcgcttgctagatttcaaagacagattagctacggaacttaaacaagcagatcaagatgttaaattaactgttactacattattagctaaagcagtagtgcttgcacttaaagaatatggggcaatgaatgctcgctatgaacaaggcgagttaactgagtatgaagatgttcatttaggaatcgcaacgtctctagatgaaggccttatggtgccagtgattaatcatgcagatacaaaaagtatcggcactttagcccatgaaattaaatcatcggctgaggctgttcgggaaggaaacacaggagcagtacaattagagggagcaacatttacaattactaatatgggtgctagtggtatagaatactttacaccaattttaaatttaggtgaaacaggtattctaggcgttggtgctttaactaaagaagtcgtgctagaagcggataacattaaacaagtttcaaaaattcctttaagcttgacatttgatcatcaaattttagatggtgcaggtgcggccgattttcttaaagtactagctaaatatatcgaaaacccttatttattaatgttatag

SEQ ID NO: 2516 - protein, 419 aa, Artificial Sequence
  Description of Artificial Sequence: synthetic amino acid sequence
MPKLGMTMKEGTVEEWFKSEGDTVKQGESIVTISSEKLTNDVEAPASGTLLEIKVQAGEDAEVKAVLGIIGEEGEAIDKDEDDLASEKVKEDNEHEKETQEVKDTSQQSSDNKDNSPKSAARERIFISPLARNMAEDKGLDINKIKGTGGNHRITKLDIQRVEANGYDYASDTTSNEDTSHVPTQTVDTSAIGEGLNPMRQRIAQNMRQSLNSTAQLTLHRKVDADRLLDFKDRLATELKQADQDVKLTVTTLLAKAVVLALKEYGAMNARYEQGELTEYEDVHLGIATSLDEGLMVPVINHADTKSIGTLAHEIKSSAEAVREGNTGAVQLEGATFTITNMGASGIEYFTPILNLGETGILGVGALTKEVVLEADNIKQVSKIPLSLTFDHQILDGAGAADFLKVLAKYIENPYLLML

SEQ ID NO: 2517 - DNA, 513 bp, Artificial Sequence
  Description of Artificial Sequence: synthetic nucleic acid sequence
atgaaaaggtttgcaaaagcatttgtcgtaagtggtattactttaggtgcagttttaggtttaaacgtaacagagcataatggtgtatctaatgaagcaaaggcacaaacagcacacagttactggtataaatataatggttatactgcatcgggtggcgactttgtacttagcaattcattttatcaaggtttaaaagctggaaacgttacatttaatggtattaaggtaaatcaaaaatatgaatctaagactgctactaaaaaaatatacgatcagacatttcaacaaattaatggaaataaagcaaacaacgtacaatttaaaattgcttccagaactgttactttagatcaagttaaacaaaagtatggaaaaaattataattatcagccgtcattatctaaaaacaaaacaagtaagacagatggcttgtacggttatcaagtcggaaaaggaaacatcgttttccacgttaaagatgggtatgtcacaagtgctacattgtcataa

SEQ ID NO: 2518 - protein, 170 aa, Artificial Sequence
  Description of Artificial Sequence: synthetic amino acid sequence
MKRFAKAFVVSGITLGAVLGLNVTEHNGVSNEAKAQTAHSYWYKYNGYTASGGDFVLSNSFYQGLKAGNVTFNGIKVNQKYESKTATKKIYDQTFQQINGNKANNVQFKIASRTVTLDQVKQKYGKNYNYQPSLSKNKTSKTDGLYGYQVGKGNIVFHVKDGYVTSATLS

SEQ ID NO: 2519 - DNA, 309 bp, Artificial Sequence
  Description of Artificial Sequence: synthetic nucleic acid sequence
atgagtgagaatatcattaataataaaatgatagagaatggtagacctgtaataactgatgcagtttgtaaacttttaagaccacctgcaattgtcatagcaactgaaatcgccccaataagtagaccccataggactttatgttttaaagttggattgatagaaccacctgtagccatacctgcaacaatatgcgtagttgaatcagcacttgttacaataaagatgaaaataagtacaatagctaaggaactagtgacttccgacaatggaaaatgtgataataattcaaacaaggcaacagtataa

SEQ ID NO: 2520 - protein, 102 aa, Artificial Sequence
  Description of Artificial Sequence: synthetic amino acid sequence
MSENIINNKMIENGRPVITDAVCKLLRPPAIVIATEIAPISRPHRTLCFKVGLIEPPVAIPATICVVESALVTIKMKISTIAKELVTSDNGKCDNNSNKATV

SEQ ID NO: 2521 - DNA, 345 bp, Artificial Sequence; identical to SEQ ID NO: 329
  Description of Artificial Sequence: synthetic nucleic acid sequence

SEQ ID NO: 2522 - protein, 114 aa, Artificial Sequence; identical to SEQ ID NO: 256
  Description of Artificial Sequence: synthetic amino acid sequence

SEQ ID NO: 2523 - DNA, 366 bp, Artificial Sequence
  Description of Artificial Sequence: synthetic nucleic acid sequence
atgacgaaagatgctcaaatctatgaaaaggaggataacaaaatagcaacattttgcgttgctacagaaagaaactacaaagatgatattaatgaaatttctacagattatttactttgtaaagctttcggtaaaactgccactaatattgaaaagtacactagtcaaggtactttagtaggtataactggacaaatgcgttcaagaaaatatgaaaaagaaggccaaacacattttgttacagaattatacgttgaaacaataaaattcatgtccccaaaaaataaaaacaatgaaactccctctgataatcaatttgaaaacaacacttatcaacctgatgatttagaaataattcatatttaa

SEQ ID NO: 2524 - protein, 121 aa, Artificial Sequence
  Description of Artificial Sequence: synthetic amino acid sequence
MTKDAQIYEKEDNKIATFCVATERNYKDDINEISTDYLLCKAFGKTATNIEKYTSQGTLVGITGQMRSRKYEKEGQTHFVTELYVETIKFMSPKNKNNETPSDNQFENNTYQPDDLEIIHI

SEQ ID NO: 2525 - DNA, 660 bp, Artificial Sequence
  Description of Artificial Sequence: synthetic nucleic acid sequence
atgaaaaaaacattagttgcatcatcattagctataggactaggcgttgtagcaggtaacgcaggtcatgacgcacatgcaagtgagactacaaatgttgataaagcagagttagctcaaaaagcgttaactaatgatcaatcactaaatgaaagccctgttcaagaaggtgcttataatattaattttgattacaatggtaattcatatcattttgaatctgatggttctacttggagttggagttatgaatcaacaaacaatgctacgcaacctgttcaaccaagccaatctcaagtagctacacaacaacaacctgtacaagtatcagcaccacaaaatgagcaaacagcacaaccacaaacaaaatcaacatctacaagtcaaacttcttcaagtaaagcttcaagtggttcatcagtaaatgtaaattcacatttacaacaaattgctcaacgtgaatcaggtggcgatattcatgcaataaacccatcttcaggtgcagcaggtaaatatcaattcttacaatcaacttgggattctgttgctccaagtcaatataaaggtgtttcacctgcaaaagctccagaaagcgtacaagaccgagcagcagtaaaattatataatactggtggcccaggtcattgggtaactgcataa

SEQ ID NO: 2526 - protein, 219 aa, Artificial Sequence
  Description of Artificial Sequence: synthetic amino acid sequence
MKKTLVASSLAIGLGVVAGNAGHDAHASETTNVDKAELAQKALTNDQSLNESPVQEGAYNINFDYNGNSYHFESDGSTWSWSYESTNNATQPVQPSQSQVATQQQPVQVSAPQNEQTAQPQTKSTSTSQTSSSKASSGSSVNVNSHLQQIAQRESGGDIHAINPSSGAAGKYQFLQSTWDSVAPSQYKGVSPAKAPESVQDRAAVKLYNTGGPGHWVTA

SEQ ID NO: 2527 - DNA, 498 bp, Artificial Sequence
  Description of Artificial Sequence: synthetic nucleic acid sequence
atggaagatgttaaatttctagtagaacaaattgagtttatgttagaaggagaagttgaagcgcatgaggttctagctgatttcattaatgaaccatatgaagaaatagtaaaagaaaaagtatggccaccaagtggtgatcattatattaaacatatgtacttcaatgcatttgcacgtgaaaatgcagccttcacgattgcagcgatggcaccctgtccatacgtctacgctgtcattggtaaacgtgcgatggaagatcccaaattaaataaagaatcagtgacttctaaatggtttcaattttatagtactgaaatggacgaacttgttgatgtgttcgatcaattgatggaccgtttaactaaacattgtagtgagacagaaaaaaaagagattaaagaaaatttcttgcaaagtactattcatgagagacatttcttcaatatggcatatattaatgaaaaatgggaatatgggggaaataacaatgaataa

SEQ ID NO: 2528 - protein, 165 aa, Artificial Sequence
  Description of Artificial Sequence: synthetic amino acid sequence
MEDVKFLVEQIEFMLEGEVEAHEVLADFINEPYEEIVKEKVWPPSGDHYIKHMYFNAFARENAAFTIAAMAPCPYVYAVIGKRAMEDPKLNKESVTSKWFQFYSTEMDELVDVFDQLMDRLTKHCSETEKKEIKENFLQSTIHERHFFNMAYINEKWEYGGNNNE

SEQ ID NO: 2529 - DNA, 561 bp, Artificial Sequence
  Description of Artificial Sequence: synthetic nucleic acid sequence
atggagttgattcaaagttacttaaaggaacattccaatattccttatgtgattgatccagttatgcttgccaaaagtggtgattcattgatggatgaaaatactaaaaatcatttgcaatcaacattattacctttggctgatgttgtcactccgaatatacctgaagctgaggaaattactggtattaaaattaatgatgaagaaagcatacgtaaagcaggtcaaatctttattaatgaaattggtagtaagggtgttgtaattaagggagggcattcagccgatttaaataatgctaaagattttctttttactaagaatgaaacgtatacctttgagaacaaacgctttgatactaaacatactcatggaactggttgtactttttcagcagttattacagcagaattagctaaaggtcgttccataaaagatgcagttaaaaaagcaaaagagtttatttcattaagtattgaacataccccagaaattggcaaggggagaggacctgtaaatcattttgcttatatgaagaaagtaggtttagatgatgaataa

SEQ ID NO: 2530 - protein, 186 aa, Artificial Sequence
  Description of Artificial Sequence: synthetic amino acid sequence
MELIQSYLKEHSNIPYVIDPVMLAKSGDSLMDENTKNHLQSTLLPLADVVTPNIPEAEEITGIKINDEESIRKAGQIFINEIGSKGVVIKGGHSADLNNAKDFLFTKNETYTFENKRFDTKHTHGTGCTFSAVITAELAKGRSIKDAVKKAKEFISLSIEHTPEIGKGRGPVNHFAYMKKVGLDDE

SEQ ID NO: 2531 - DNA, 534 bp, Artificial Sequence
  Description of Artificial Sequence: synthetic nucleic acid sequence
atgtttaatttcttaaaaccagctagacatatcaaatcattgccatcagaaaaagtagatgatacgtataaaagactacgctttcaagtctttttaggaatatttatcggttatgctggttactatttattaagaaagaacttctctttagcaatgccttcattaattgagcaaggctttagtaaaggggaattaggtattgcattatctgcagtatctatcgcatatggctttagtaaatttgtaatgggcactgtcagcgatcgaagtaatgctcggatgttcttaactttaggtttagtattgacagcaattattaacttattattaggatttattccattctttacttcaagcataactattatgtttatcatgctgtttttagttggatggttccaaggaatgggctggccaccatctggacgtgtgttagttcattggtttagtgtcagcgaacgtggaagcaaaacgtcaatatggaatgtagcacataatgtaggcggaggtttaatggcacctattgctacgtag

SEQ ID NO: 2532 - protein, 177 aa, Artificial Sequence
  Description of Artificial Sequence: synthetic amino acid sequence
MFNFLKPARHIKSLPSEKVDDTYKRLRFQVFLGIFIGYAGYYLLRKNFSLAMPSLIEQGFSKGELGIALSAVSIAYGFSKFVMGTVSDRSNARMFLTLGLVLTAIINLLLGFIPFFTSSITIMFIMLFLVGWFQGMGWPPSGRVLVHWFSVSERGSKTSIWNVAHNVGGGLMAPIAT

SEQ ID NO: 2533 - DNA, 816 bp, Artificial Sequence
  Description of Artificial Sequence: synthetic nucleic acid sequence
atgactgcattatacaacttcggttatttaaaagggtttgaaggtgtctttatataccctgcactattggttatcattattgccatcttgtcttacatactaattagagatacaccacaatctcagggtttaccaccaattgagcagtataaaaatgattatgccacttcaactaaacaaacaattgaaacagaactaactacgaaagaaatattatttaaatatgtacttaataacaaatgggtatgggcgattgcttttacaaacattttcgtttattttgtgcgttatggtgttttggactgggctccgacatacttaagtgaggaaaagcattttgatttaagtgcttcaggttgggcttacttcttatacgaatgggcaggaattccgggcacgctactctgtggttatctatctgacaaactatttaaaggtcgccgtggtccagcaggcttcttctttatgttaggcgtaacaatctttatccttatatattggttaaatccaccaggtcacgcatggttagataatctttcattaattggtattggtttcttaatttatggtccagtcatgttaattggtttacaagcgttagattatgttcctaaaaaagcagctggcactgcggctggtctaactggtctatttggatacttattcggtgcagttatggctaatattgtattagggtttgtagttcaacattttggatggcatattggctttgtgttattaacagtcatcagcatactcgctatgttatgtttcattttaacttggaataaacgtggtcaagaacaaatcgactag

SEQ ID NO: 2534 - protein, 271 aa, Artificial Sequence
  Description of Artificial Sequence: synthetic amino acid sequence
MTALYNFGYLKGFEGVFIYPALLVIIIAILSYILIRDTPQSQGLPPIEQYKNDYATSTKQTIETELTTKEILFKYVLNNKWVWAIAFTNIFVYFVRYGVLDWAPTYLSEEKHFDLSASGWAYFLYEWAGIPGTLLCGYLSDKLFKGRRGPAGFFFMLGVTIFILIYWLNPPGHAWLDNLSLIGIGFLIYGPVMLIGLQALDYVPKKAAGTAAGLTGLFGYLFGAVMANIVLGFVVQHFGWHIGFVLLTVISILAMLCFILTWNKRGQEQID

SEQ ID NO: 2535 - DNA, 918 bp, Artificial Sequence
  Description of Artificial Sequence: synthetic nucleic acid sequence
atggttatttcaaagaaattagcatttatcactataggtatcttaatatgtattcttttaagttcacctctgatcgatcaacagatttcaaattatttcatgaatcaagattcaattttcggtactttatttcaaaactacggtttatttccacctacgctcatattaattatttcaactgtaattttaaattattatattttaactacatttcaaaataaattagcaaaaacgttaactttgattttatcttttatctttacgttgataaaaaccaatgaattcgtgtcagaaaccgctcaatatatgttatctacatcagaaaacatcaaaaatcataagccaatgggtatggcaaataatgaaggaaacgctggaaatgctttatctttaggaatgagtttttttatttctttgattatcattataattatcactattatttgttatcagttttggttaaaacatacaaataaccaagaacttgatcatttattcaaagtttcacttattagctttatgattttatttattggattagaactcgttgatagcttgaaacatttatggggacgttttagaccatatgaaatcactgacaaagctggacatttcactcactggcttacaataaatggaaacactggacatagttccttcccttcaggacacactggaaatggtgcatttctaatgtttatcgcattttactttaaaaaattacgcactcaaaaaatagtgtttagtatcggattatgttatagtattttaatggcattgagcagaattcgtattggtgcacatttcactagtgatgtaacaatgagcttgcttattatgttttcactcatggttattgcagattttatcattaatcaagtcatatctatacataaaaacaagctaagtaaagtctag

SEQ ID NO: 2536 - protein, 305 aa, Artificial Sequence
  Description of Artificial Sequence: synthetic amino acid sequence
MVISKKLAFITIGILICILLSSPLIDQQISNYFMNQDSIFGTLFQNYGLFPPTLILIISTVILNYYILTTFQNKLAKTLTLILSFIFTLIKTNEFVSETAQYMLSTSENIKNHKPMGMANNEGNAGNALSLGMSFFISLIIIIIITIICYQFWLKHTNNQELDHLFKVSLISFMILFIGLELVDSLKHLWGRFRPYEITDKAGHFTHWLTINGNTGHSSFPSGHTGNGAFLMFIAFYFKKLRTQKIVFSIGLCYSILMALSRIRIGAHFTSDVTMSLLIMFSLMVIADFIINQVISIHKNKLSKV

SEQ ID NO: 2537 - DNA, 864 bp, Artificial Sequence
  Description of Artificial Sequence: synthetic nucleic acid sequence
atgccgttaatcttaggtatcgaaaaaggttggtttaaagaagaatcattagaaattgagatgattgaaccaaaggaacactttgacgcactagacgagattgaaaatggttcaatggatatcgcgattactgaacctattcatctggttcaagatagagctaaagaacaaaaagtcatcgggtttgcgagatatcttcacactaatggaggtattatgtataacaaagataaaaatatcgctcgccccaaagatttaatcggtaaacggcttcaatatcccggtgctcccggtccaggtggtattgctatggctaaaacgatgattgaagctgatggtggtacatttgaagaaggtgacatcacaccagttaatcatagtttttatcatactgatgcacttttaactgataaagctgatgctgctacactcattttcgaaaattttgaaattcttgaagctagaaatcaaggacttaatgtagattattttccacttaaaaattataatgtacccgatttttgtcaactcattttcattacaacacctgaagtattaaatacgagtgaggttaaactcaaaaagttcctaaaaatcattcaaaaaacaattcattacatcaatcatcatttagaaagtgcaattgaaatttactcaacgtatactcaaaccgatatctctaaccaattaaacaaagatacaattgaagcaacagctaaatgttttacaaatgatttgtctatgagttccgactactacaatgatttacagttgtggcttaaagaagtcaatgatattaaagacacgattaacccaactttatattttacaaatcaactactattcagtcgatatacaaaataa

SEQ ID NO: 2538 - protein, 287 aa, Artificial Sequence
  Description of Artificial Sequence: synthetic amino acid sequence
MPLILGIEKGWFKEESLEIEMIEPKEHFDALDEIENGSMDIAITEPIHLVQDRAKEQKVIGFARYLHTNGGIMYNKDKNIARPKDLIGKRLQYPGAPGPGGIAMAKTMIEADGGTFEEGDITPVNHSFYHTDALLTDKADAATLIFENFEILEARNQGLNVDYFPLKNYNVPDFCQLIFITTPEVLNTSEVKLKKFLKIIQKTIHYINHHLESAIEIYSTYTQTDISNQLNKDTIEATAKCFTNDLSMSSDYYNDLQLWLKEVNDIKDTINPTLYFTNQLLFSRYTK

SEQ ID NO: 2539 - DNA, 330 bp, Artificial Sequence
  Description of Artificial Sequence: synthetic nucleic acid sequence
atgggtttgaagagaaattggaggttgagaaagatgtatgtagagagaaagcctgcactttatatcgaagatttacgagacgaattcaaaaatagcttaaaacattttaaagatgatgatgaagcatttaatacattagttggatttgtggaactggaccacctatattcttcagcacttaaagaaataagtacaaaattaagtattttagatgataactttaactatcaatataaacacaatccaattcatcatatggaacgacgagtaaaagagatgcacagtttagttaaaaagttgaatcgtaaaggatttgaagtaagtgcataa

SEQ ID NO: 2540 - protein, 109 aa, Artificial Sequence
  Description of Artificial Sequence: synthetic amino acid sequence
MGLKRNWRLRKMYVERKPALYIEDLRDEFKNSLKHFKDDDEAFNTLVGFVELDHLYSSALKEISTKLSILDDNFNYQYKHNPIHHMERRVKEMHSLVKKLNRKGFEVSA

SEQ ID NO: 2541 - DNA, 882 bp, Artificial Sequence
  Description of Artificial Sequence: synthetic nucleic acid sequence
atgtatatgattaagcaaaattttacaactaaagtttatccacttaaacaatttgagggagaatatagtgaagttgcctacgcaggagatagccaagctgatgatgtgattgtatttattcatggtgcacttttaacatataaaattatgacgatgttcgaaccttacttcagagattacaaattaatatttattaattgtccaagtcgtggtagaagttcagatttagatcgtgacacacatacattagatgattacgctgcacgtatatatgatgtattaacgcaaattgttaaggagcaacaaataaaagaactgagtattgtcggttattcaatgggaggaatgattgcgacacggttacttaagtataatacattaccagtctctcatcttatttatttacatagcgcagcgaaaattactccagatgcaagtatgttagcacgattattcactagtgagagtaagagagcagtgttaaaagatgaaattaaggcagtgaaaaatcttcctcaatatatactagataaaacgatttatgcacaaaaggaaaacgcacttgatttggtacaatttattgcacctattaaaactataattacggatatgatttacacgattaatacagattatttaccagatatcgatgagattaaacaatttccgaaaatattatttatgtctggaaaagaagatcaaattattccttatacggattctcaagctacgttagaaaagtttaaggcgttaggtggagaaactaaagaagttatttatccaggaattggtcatatcgatttcccaagtgttttagaaacccaatcggatggacaaactggcgtggtagatgaaattaaagcgtggatttcaaaaaaataa

SEQ ID NO: 2542 - protein, 293 aa, Artificial Sequence
  Description of Artificial Sequence: synthetic amino acid sequence
MYMIKQNFTTKVYPLKQFEGEYSEVAYAGDSQADDVIVFIHGALLTYKIMTMFEPYFRDYKLIFINCPSRGRSSDLDRDTHTLDDYAARIYDVLTQIVKEQQIKELSIVGYSMGGMIATRLLKYNTLPVSHLIYLHSAAKITPDASMLARLFTSESKRAVLKDEIKAVKNLPQYILDKTIYAQKENALDLVQFIAPIKTIITDMIYTINTDYLPDIDEIKQFPKILFMSGKEDQIIPYTDSQATLEKFKALGGETKEVIYPGIGHIDFPSVLETQSDGQTGVVDEIKAWISKK

SEQ ID NO: 2543 - DNA, 579 bp, Artificial Sequence
  Description of Artificial Sequence: synthetic nucleic acid sequence
gtggagaaacttgaactgattttactacttaaggaaataggttgcacaattaaagaaattaaagtgttattaaaagatgattcatcaatgaaatctctttacacgtttcttcaaatcaaaaagcatgaaatacaacagtcaataacagataaagaaaacaaggtatgtaaaatagagcaaattcaacgctatgttcatcaaaattcaatttctccaattcattatttacaagatatagctatttatatggaagaatctcatagactcaaaggtgtcagaaagaaattatggttaagtatagctctgattggttcattacaatatggtggtttgatcacctcaattgtaactcaaaggaaaaagcctttcttgtcgatgatgcctgtggtagctatgtattcactttggttaacgaaaaagtataaaaagaatgtttcatatgtctgtcctaattgccaccatgtgtttaatcctagtgtcattcattttgtaacagcatcacatacacctaaaacaagaaagcttcaatgtcctgattgtcacgaaatgcattactgtgtagaaattgctaagctatga

SEQ ID NO: 2544 - protein, 192 aa, Artificial Sequence
  Description of Artificial Sequence: synthetic amino acid sequence
VEKLELILLLKEIGCTIKEIKVLLKDDSSMKSLYTFLQIKKHEIQQSITDKENKVCKIEQIQRYVHQNSISPIHYLQDIAIYMEESHRLKGVRKKLWLSIALIGSLQYGGLITSIVTQRKKPFLSMMPVVAMYSLWLTKKYKKNVSYVCPNCHHVFNPSVIHFVTASHTPKTRKLQCPDCHEMHYCVEIAKL

SEQ ID NO: 2545 - DNA, 600 bp, Artificial Sequence
  Description of Artificial Sequence: synthetic nucleic acid sequence
gtgagtggtgagattgaatcccatatacaactaagtgaaaatcaagttgcacaacaatttaatgttagtcgttcaccagtcagagatgcatttaagttacttcaaacagatcaactgattcaattagaacgtatgggcgctcaggtacttccttttggtgatcaagagaaaaaggaaatgtatgatttgcgtttgatgctcgaatcattcgccttttcaaaattaagtggaacagatacacaacatattattaaggaaatgaaaaagcaattagaaatgatgaaggttgcagtccaatttgaggatgctgaagcatttacacaacatgattttgagtttcatgaggtgatgattcaagcaacaaaccatcagtatcttaaagtgttttggaatcaccttaaacctgttatggaatcactcatactcatttcaatgagacaaagaatggcaaatgaccccaaagatttcgagagaattcataaaaatcatcaagtttttatagatgctgttgagaacgatgatgcctccatattgagaaaagcattccatttaaattttgatgatgtaggagaaaatattgaagcattctggttacgttaa

SEQ ID NO: 2546 - protein, 199 aa, Artificial Sequence
  Description of Artificial Sequence: synthetic amino acid sequence
VSGEIESHIQLSENQVAQQFNVSRSPVRDAFKLLQTDQLIQLERMGAQVLPFGDQEKKEMYDLRLMLESFAFSKLSGTDTQHIIKEMKKQLEMMKVAVQFEDAEAFTQHDFEFHEVMIQATNHQYLKVFWNHLKPVMESLILISMRQRMANDPKDFERIHKNHQVFIDAVENDDASILRKAFHLNFDDVGENIEAFWLR

SEQ ID NO: 2547 - DNA, 348 bp, Artificial Sequence
  Description of Artificial Sequence: synthetic nucleic acid sequence
atgtctaaaatagtaggatcagatcgagttaaaagaggaatggctgaaatgcaaaaaggcggtgtcattatggacgtcgttaatgcagaacaagctaaaattgctgaagaagccggagctgttgccgtaatggcattagagcgtgtaccatcagatattcgtgctgctggcggtgttgcacgtatggcgaatcctaaaatagttgaagaagttatgaatgccgtatcaattccggttatggctaaagccagaattggtcatattacagaagctagagttttagaatcgatgggtacacggtttcaagaacccaacatactacaaacgaatttcaaaaggcgagagtaa

SEQ ID NO: 2548 - protein, 115 aa, Artificial Sequence
  Description of Artificial Sequence: synthetic amino acid sequence
MSKIVGSDRVKRGMAEMQKGGVIMDVVNAEQAKIAEEAGAVAVMALERVPSDIRAAGGVARMANPKIVEEVMNAVSIPVMAKARIGHITEARVLESMGTRFQEPNILQTNFKRRE

SEQ ID NO: 2549 - DNA, 303 bp, Artificial Sequence
  Description of Artificial Sequence: synthetic nucleic acid sequence
atgattcgaccttcagattcttttacttctttcaatactgcttttaaacgttcttcaaattcacctctatattttgcacctgcaactaaggcacttaaatcaagctcgaaaatcgttttatcgagtaatgattctggaacgtctttacgtacaattcgttgtgctaaaccttcaacaattgcagttttacctacacctggttcaccgattaaaaccggattattttttgtttttcgacttaatatacgaattgtattacgtatttcttcatctctaccgatgacagggtccattttaccttga

SEQ ID NO: 2550 - protein, 100 aa, Artificial Sequence
  Description of Artificial Sequence: synthetic amino acid sequence
MIRPSDSFTSFNTAFKRSSNSPLYFAPATKALKSSSKIVLSSNDSGTSLRTIRCAKPSTIAVLPTPGSPIKTGLFFVFRLNIRIVLRISSSLPMTGSILP

SEQ ID NO: 2551 - DNA, 945 bp, Artificial Sequence
  Description of Artificial Sequence: synthetic nucleic acid sequence
gtggaaacagaaagagaaaagctattaagtttaagtgacatcttacacaaacgtgtagtaggtcaagataaagcagttgatttagtatcagacgcagtagttagagcacgtgctggaattaaagatccgaatagaccaatcggaagtttcttattcttaggacctactggagtaggtaaaactgaattagcaaaatcgcttgcttcatcacttttcgattctgaaaaacatatgattagaattgatatgagcgaatatatggaaaaacatgctgtatcacgtttaattggtgcacctccaggttatgtaggtcacgatgaaggtggtcaattaactgaagcagttagacgtaatccatactcagttattttgttagacgaagttgaaaaagcacatagcgatgtttttaatgtattacttcaaatactagatgaaggtcgtcttacggattctaaaggtagaagtgttgactttaaaaataccattatcatcatgactagtaatattggttcacaagtattacttgaaaatgtaaaagatgctggtgaaattagtgatgatacagagaaagcagttatggacagtctacatgcatacttcaaacctgaaatattaaatcgtatggatgacatcgtgttatttaaaccattatcagttaatgatatgagtatgattgtagataaaattttaacacaattaaatatgagattattagatcaacatatctcaattgaagtgacagaagaagcgaaaaaatggctaggtgaagaagcgtatgaaccacaatttggtgcaagaccattaaaacgctttgttcaacgacaaatagaaactccaattgcacgtatgatgattaaagaaagtctacctgaaggtacaataattaaagtagatttaaatgacaataaagaacttgattttaaggttgttaaacctacgtcttaa

SEQ ID NO: 2552 - protein, 314 aa, Artificial Sequence
  Description of Artificial Sequence: synthetic amino acid sequence
VETEREKLLSLSDILHKRVVGQDKAVDLVSDAVVRARAGIKDPNRPIGSFLFLGPTGVGKTELAKSLASSLFDSEKHMIRIDMSEYMEKHAVSRLIGAPPGYVGHDEGGQLTEAVRRNPYSVILLDEVEKAHSDVFNVLLQILDEGRLTDSKGRSVDFKNTIIIMTSNIGSQVLLENVKDAGEISDDTEKAVMDSLHAYFKPEILNRMDDIVLFKPLSVNDMSMIVDKILTQLNMRLLDQHISIEVTEEAKKWLGEEAYEPQFGARPLKRFVQRQIETPIARMMIKESLPEGTIIKVDLNDNKELDFKVVKPTS

SEQ ID NO: 2553 - DNA, 1380 bp, Artificial Sequence; identical to SEQ ID NO: 1245
  Description of Artificial Sequence: synthetic nucleic acid sequence

SEQ ID NO: 2554 - protein, 459 aa, Artificial Sequence; identical to SEQ ID NO: 1246
  Description of Artificial Sequence: synthetic amino acid sequence

SEQ ID NO: 2555 - DNA, 654 bp, Artificial Sequence
  Description of Artificial Sequence: synthetic nucleic acid sequence
atgaaaaatttacgtaacagaagctttttaactttattagacttttcacgacaagaggtagaatttttattaacactctccgaagatttgaagcgtgccaaatatatcggcactgaaaagcctatgctaaaaaataaaaatatcgcgcttctttttgaaaaagattccactagaacacgttgcgcattcgaagttgccgcacatgatcaaggtgcacacgtcacttatcttggacctacaggttctcaaatgggtaaaaaagaaactgctaaagatacagcacgtgtacttggtggtatgtatgatggtattgagtaccgaggtttctctcaacgtactgtagaaacattagcgcaatattcaggtgttccggtatggaatggattaaccgatgaagatcaccctacacaagtgcttgctgactttttaactgctaaagaagtattgaaaaaagagtatgctgatatcaactttacttatgttggcgatggacgtaacaatgttgctaacgcattaatgcaaggtgctgccattatgggtatgaatttccatcttgtttgtcctaaagaactcaatccgacagaagaattattaaatcgttgcgaacgtattgcgacggaaaatggcggtaacattttaatatcattactttaa

SEQ ID NO: 2556 - protein, 217 aa, Artificial Sequence
  Description of Artificial Sequence: synthetic amino acid sequence
MKNLRNRSFLTLLDFSRQEVEFLLTLSEDLKRAKYIGTEKPMLKNKNIALLFEKDSTRTRCAFEVAAHDQGAHVTYLGPTGSQMGKKETAKDTARVLGGMYDGIEYRGFSQRTVETLAQYSGVPVWNGLTDEDHPTQVLADFLTAKEVLKKEYADINFTYVGDGRNNVANALMQGAAIMGMNFHLVCPKELNPTEELLNRCERIATENGGNILISLL

SEQ ID NO: 2557 - DNA, 1074 bp, Artificial Sequence
  Description of Artificial Sequence: synthetic nucleic acid sequence
atgattaattcatttggaatggttgtaggtaatttgttaggtggttttttgtttgataaacttggtggttacaaaacgattttaataggtacatttacgtgtttatgtagtaccacattactcaacttgtttcatggctggccatggtatgcaatttggttagtactacttggatttggtggcggaatgatagttcctgctatttatgcgatggcaggtgccgtttggcctaatggaggaagacaaacttttaatgctatctacttagcacaaaatataggggttgctttaggcgcggcattaggaggttttgtggctgaatttagtttcaattatatttttatggcaaacctcattatgtatgtactttttgccatcgtggcgattacacagttcaatttagagattaatgctaaatttaaaccacaagattcgatagatttaaaaagcaaagaaaataaaaaacgatttactgctatgatgctagtatgtgcaatgtttgcaatttgttggattgcatatattcaatgggaaacaacgatagcttcattcacacaatcaattaatatttcaatgtctcaatatagtgtattatggacaattaatggaattatgattttagtagctcaacctttaataagaccaattattatcttattaaaaggtaatttaaaacatcaaatgtttgtaggtattttaatttttatgagttctttcctagtgacgagttttgcaaatcactttgctatatttgtagttggcatggtcattttaacttttggagaaatgtttgtttggcctgcagtaccaactatagcaaatcaacttgcaccagttggaaagcaagggcaataccaaggatttgttaattcagcatctacagtgggtaaagcatttggaccatttattgggggtatacttgtagatacatttaatatgagtatgatgtttattgggatgattatattattaagttttgcactgttatttttaagtttctatgataaagtgttacccaagaattttaaaaatcaacatcaatcaagaagacgacgaaatcagaatggtatttaa

SEQ ID NO: 2558 - protein, 357 aa, Artificial Sequence
  Description of Artificial Sequence: synthetic amino acid sequence
MINSFGMVVGNLLGGFLFDKLGGYKTILIGTFTCLCSTTLLNLFHGWPWYAIWLVLLGFGGGMIVPAIYAMAGAVWPNGGRQTFNAIYLAQNIGVALGAALGGFVAEFSFNYIFMANLIMYVLFAIVAITQFNLEINAKFKPQDSIDLKSKENKKRFTAMMLVCAMFAICWIAYIQWETTIASFTQSINISMSQYSVLWTINGIMILVAQPLIRPIIILLKGNLKHQMFVGILIFMSSFLVTSFANHFAIFVVGMVILTFGEMFVWPAVPTIANQLAPVGKQGQYQGFVNSASTVGKAFGPFIGGILVDTFNMSMMFIGMIILLSFALLFLSFYDKVLPKNFKNQHQSRRRRNQNGI

SEQ ID NO: 2559 - DNA, 429 bp, Artificial Sequence; identical to SEQ ID NO: 537
  Description of Artificial Sequence: synthetic nucleic acid sequence

SEQ ID NO: 2560 - protein, 142 aa, Artificial Sequence; identical to SEQ ID NO: 538
  Description of Artificial Sequence: synthetic amino acid sequence

SEQ ID NO: 2561 - DNA, 999 bp, Artificial Sequence
  Description of Artificial Sequence: synthetic nucleic acid sequence
atgctaatttttaagaaaaaggagttaaagattatgacattaaacctagctcaacgtgtgttaaatcaagagtcattaacaaaagatgaagcaatatctattttcgaaaatgctgaaattgatacatttgatttattaaatgaagcctacacagtgagaaaacattactatggtaaaaaagttaagcttaatatgatattaaatgctaaaagtggtatctgtgcagaaaattgtgggtactgtgggcaatctgtaaaaatgaaagaaaagcaacgttatgcacttgttgaacaggaccaaattaaagaaggcgctcaagtggcaactgaaaatcaaatcggtacatactgtattgttatgagtggtagaggtcctagtaacagagaagtcgatcatatttgcgaaacagtagaagatattaaaaagatacacccacaactaaagatttgtgcgtgcttaggattaacgaaagaagaacaggctaaaaaattaaaggctgctggtgtcgatcgttataatcataatttaaatacgagtgagcgttatcacgatgaagtagtaactacacatacatatgaggatagagtgaatacggttgaaatgatgaaagataataatatttctccttgttcaggtgtgatatgtggtatgggagagtcgaatgaggacattattgatatggcatttgctttaagagccatcgatgctgatagcattcctattaattttttacatcctattaaaggaactaaatttggtggattagatttattgtcaccaatgaaatgtttaagaattatagcgatgtttaggttaatcaatccaacaaaagaaattcgaattgcaggtggacgggaggtaaatctacgttcattacaaccactcgcattgaaagcggctaattcaatttttgtaggagattacttaattacaggcggtcaaccgaatgaggaagattatcgcatgattgaagatttagggtttgaaatcgacagttaa

SEQ ID NO: 2562 - protein, 332 aa, Artificial Sequence
  Description of Artificial Sequence: synthetic amino acid sequence
MLIFKKKELKIMTLNLAQRVLNQESLTKDEAISIFENAEIDTFDLLNEAYTVRKHYYGKKVKLNMILNAKSGICAENCGYCGQSVKMKEKQRYALVEQDQIKEGAQVATENQIGTYCIVMSGRGPSNREVDHICETVEDIKKIHPQLKICACLGLTKEEQAKKLKAAGVDRYNHNLNTSERYHDEVVTTHTYEDRVNTVEMMKDNNISPCSGVICGMGESNEDIIDMAFALRAIDADSIPINFLHPIKGTKFGGLDLLSPMKCLRIIAMFRLINPTKEIRIAGGREVNLRSLQPLALKAANSIFVGDYLITGGQPNEEDYRMIEDLGFEIDS

SEQ ID NO: 2563 - DNA, 438 bp, Artificial Sequence
  Description of Artificial Sequence: synthetic nucleic acid sequence
atgttaaaagtattcaacactgaatcaagcatctctctatgttgggcggtgactacaacaacgggttccaggtcagaatctttctctaacgttttaatcaacggagccatttttatagcttcaggcctagttccaaatatggtcataacttttttcatcaaaaatatctatctccgaatctattatttagtaccgaataatctatcccctgcatcacctaaacctggtgtaatatacgctttgtcatttaatttttcatctaatgccgcaatatatatatctacatctgggtgtgcttcttgcattttttcaacgccttcaggggcagctattaaacacataaaacgtatacttttagctccacgtttttttaatgaagaaattgcttcaatagctgaagcaccagtagcaagcataggatcaaccacaataatttga

SEQ ID NO: 2564 - protein, 145 aa, Artificial Sequence
  Description of Artificial Sequence: synthetic amino acid sequence
MLKVFNTESSISLCWAVTTTTGSRSESFSNVLINGAIFIASGLVPNMVITFFIKNIYLRIYYLVPNNLSPASPKPGVIYALSFNFSSNAAIYISTSGCASCIFSTPSGAAIKHIKRILLAPRFFNEEIASIAEAPVASIGSTTII

SEQ ID NO: 2565 - DNA, 1296 bp, Artificial Sequence
  Description of Artificial Sequence: synthetic nucleic acid sequence
gtgccattacaatcatcatacaatagtgatattggtactattaatatagcagttagcttatcggcactattttctggtctgtttattgtaggtgcaggagatattgcagataaaattggtagagtaaaagtgacgtacataggcttagcacttaatattgttgggtcgattttaatcattattacgccattaccaagtctattgattattggacgtgctattcaaggattgtcagcggcatgtataatgccagcgacactcgcaatcattaatgaatattatatcgggacagcacgacaacgtgcattaagctactggtccatcggttcatggggaggtagtggtgtttgtactttgtttggtggtttaatggcaactaaccttggatggcgctcaatctttattgtttcaattattctgacaatattatccatgtttctcattaaacatacacccgaaacaaaagcagagcctataggagatcaaccgacagagacaaagaaatttgatgttgttggtttaatcatcttagtggttagtatgttaagtattaatgtgataataactcaaacctctcaatttggtttgttctcaccatttattttgggacttattgcaatttttgttatatcgttaattatattcgtgatttacgaaaataaaatcaaacaaccacttgtcgattttgatatctttaaaaacaaaggttatacaggtgcaacgatttcaaactttatgttgaatggtgtagctggtggtacattgattgtagtaaatactttttatcagcaaaaattagattttaactctcaggaaacaggatatatttcacttacatacctaattgcagtattaattatgatacgtgtgggtgaaatgatattacaatcgttaggacctaaaagacctttgttactcggaagtgccttgaccgtcataggattaatattattatctttgacgtttttacctaatgcttggtatatagcgtcaagtgtcattggttatttattatttggtaccggtttaggtgtttatgcaacaccatccacggatacagctgttgcacaagcaccagatgataaagtaggcgtcgcatccggtgtatataagatggcatcatccttaggaaatgcatttggtgtggccatctcaagtacagtttacagcgtacttgcagcccaacttaatctgactttaggtggttttactggagtaatgtttaatgcgcttatagcattattagcattcctttctattttgttcttaataccgaaaaaacagtctaatgtataa

SEQ ID NO: 2566 - protein, 431 aa, Artificial Sequence
  Description of Artificial Sequence: synthetic amino acid sequence
VPLQSSYNSDIGTINIAVSLSALFSGLFIVGAGDIADKIGRVKVTYIGLALNIVGSILIIITPLPSLLIIGRAIQGLSAACIMPATLAIINEYYIGTARQRALSYWSIGSWGGSGVCTLFGGLMATNLGWRSIFIVSIILTILSMFLIKHTPETKAEPIGDQPTETKKFDVVGLIILVVSMLSINVIITQTSQFGLFSPFILGLIAIFVISLIIFVIYENKIKQPLVDFDIFKNKGYTGATISNFMLNGVAGGTLIVVNTFYQQKLDFNSQETGYISLTYLIAVLIMIRVGEMILQSLGPKRPLLLGSALTVIGLILLSLTFLPNAWYIASSVIGYLLFGTGLGVYATPSTDTAVAQAPDDKVGVASGVYKMASSLGNAFGVAISSTVYSVLAAQLNLTLGGFTGVMFNALIALLAFLSILFLIPKKQSNV

SEQ ID NO: 2567 - DNA, 942 bp, Artificial Sequence
  Description of Artificial Sequence: synthetic nucleic acid sequence
atggaatatatgaaaatagcaattgcaggttctggcgcattaggtagtggatttggtgctaagttgtttcaacatggttatgacgtcactttaattgataattgggaacctcaagttactacaatacaacaggacggtctacatatcgatattaatggtgaagcgcatcatttcaggctacctatgtatagactaacggaaattcctaaagcaacgtcctatgatattgtttttctatttcctaaatctatgcaattagaagaggtgcttagtcatattcaaccccatcttcatgataatacaattgttgtgtgcactatgaatggtttgaaacatgaacgtcttatacaacaatatgtttctatagatagaattgtacgtggagtaacaacgtggactgccggtattgatcaacctggtcacacgcacttaatggggcaaggtcctgttgaaattgggtgtctcgtgcccgagggaaaagaaagcgtagatatcattgttaatctgctacaaaatgcagaattaaaaggtgtaaaaagtgaacatttacatcaatcaatttggaagaaaatatgtgttaatggaacagctaattcattatgtactatacttgaatgtaatttggcagcactgaataatagtgatgacgctaaaaatttgatatataaaattacacaagaaattgttcatgttgcaacagttgatgatgttcatcttaatgttgatgagatttttgattacttaattgctttaaatgataaagtaggcccacactatccttctatgtaccaagacttaattaaagataatcgaacaactgaaatagattatattaatggagcagttagtaaattagggaaagagaatcatattgctacacctgtaaatgattttgtaacaaatcttgtacatgctaaagaaaatcaacgtggtgcacaatga

SEQ ID NO: 2568 - protein, 313 aa, Artificial Sequence
  Description of Artificial Sequence: synthetic amino acid sequence
MEYMKIAIAGSGALGSGFGAKLFQHGYDVTLIDNWEPQVTTIQQDGLHIDINGEAHHFRLPMYRLTEIPKATSYDIVFLFPKSMQLEEVLSHIQPHLHDNTIVVCTMNGLKHERLIQQYVSIDRIVRGVTTWTAGIDQPGHTHLMGQGPVEIGCLVPEGKESVDIIVNLLQNAELKGVKSEHLHQSIWKKICVNGTANSLCTILECNLAALNNSDDAKNLIYKITQEIVHVATVDDVHLNVDEIFDYLIALNDKVGPHYPSMYQDLIKDNRTTEIDYINGAVSKLGKENHIATPVNDFVTNLVHAKENQRGAQ

SEQ ID NO: 2569 - DNA, 309 bp, Artificial Sequence
  Description of Artificial Sequence: synthetic nucleic acid sequence
atgattaaaatcgacccaacaatattaagtgctaagcctatgtacgtcacttttactctaccaattttatctgcaatatctcctgcacctacaataaacagaccagaaaatagtgccgataagctaactgctatattaatagtaccaatatcactattgtatgatgattgtaatggcacgactagatttacaagtgattgtgcaaataaccaaaatgtaataacccctaaaataatccctaataataagcgattatctcccctaaacttttgtgatgtattcatctatcacttactccttcacaattaa

SEQ ID NO: 2570 - protein, 102 aa, Artificial Sequence
  Description of Artificial Sequence: synthetic amino acid sequence
MIKIDPTILSAKPMYVTFTLPILSAISPAPTINRPENSADKLTAILIVPISLLYDDCNGTTRFTSDCANNQNVITPKIIPNNKRLSPLNFCDVFIYHLLLHN

SEQ ID NO: 2571 - DNA, 597 bp, Artificial Sequence
  Description of Artificial Sequence: synthetic nucleic acid sequence
atgaaaaaagttatgaccatatttggaactaggcctgaagctataaaaatggctccgttgattaaaacgttagagaaagattctgacctggaacccgttgttgtagtcaccgcccaacatagagagatgcttgattcagtgttgaatacttttaacataagtgcagattatgatttgaatattatgaaagctggtcaaacattgtctgaagtaacatctgaagcaatgaaaaagttagaagatatcatacaaaaggaagtgcctgatatggtacttgttcatggtgatacagtgacaaccttttctggagcattagccgcattttatagtcaaacacctataggacatgttgaagctggattaaggagttataataaatattcaccttatcctgaagaaataaatagacaaatggttggggtaatggcagatttgcactttgccccaacctataatgctgcacagaatttagtaaaagagggtaaattagccaaacatatagctatcactggtaatacagctattgacgcaatgaattatacaatcgatcaccaatattcatcatctatcatacaaaaacataaaaataaaaatact

SEQ ID NO: 2572 - protein, 199 aa, Artificial Sequence
  Description of Artificial Sequence: synthetic amino acid sequence
MKKVMTIFGTRPEAIKMAPLIKTLEKDSDLEPVVVVTAQHREMLDSVLNTFNISADYDLNIMKAGQTLSEVTSEAMKKLEDIIQKEVPDMVLVHGDTVTTFSGALAAFYSQTPIGHVEAGLRSYNKYSPYPEEINRQMVGVMADLHFAPTYNAAQNLVKEGKLAKHIAITGNTAIDAMNYTIDHQYSSSIIQKHKNKNT

SEQ ID NO: 2573 - DNA, 722 bp, Artificial Sequence
  Description of Artificial Sequence: synthetic nucleic acid sequence
gtgtttatagctgctgaacatcaaacgtcagttgatgagttagagtatatttatgttccacctttaactacagaagctcaaaatgcctttgacgaacttaagcatgtgatgccaaaagtatgttataaagccaatttagaacgtttggcatcgttgccaaatataaataacactgaccataatcctaatgctgaagcgcatcgtcacgctagcgattggagtgaagttcgtccagaatggggtctagcacgaaatgctgaattcattattgggaaacgtcaaatcacccaaaatagtaatctagagggacgggcatttcttcataattatgattggacaaaggatgaagacggtgagattttaaatacaattatttctgggccagcactagtagcacaatggattaatttacaatactacgcctcaaccgtggcacctcactattatggaagcggtagtaaaacaacgcaaactgtaacaagtggtgtaggtgtcatgcaaggaaatgctagtgatttaatgtatggcttaccatggcagtcagtaatgatgaatgacaaagaggcgtatcacgcacctattaggcttttaattgttattcaagcgccagatgcatatattcaacgtttgttaaaacatcataatcactttagacaaaaggttgatcatcaatggataagacttgccagtattgatgaaaataatagttggaaagactggta

SEQ ID NO: 2574 - protein, 241 aa, Artificial Sequence
  Description of Artificial Sequence: synthetic amino acid sequence
  MOD_RES (241): variable amino acid
VFIAAEHQTSVDELEYIYVPPLTTEAQNAFDELKHVMPKVCYKANLERLASLPNINNTDHNPNAEAHRHASDWSEVRPEWGLARNAEFIIGKRQITQNSNLEGRAFLHNYDWTKDEDGEILNTIISGPALVAQWINLQYYASTVAPHYYGSGSKTTQTVTSGVGVMQGNASDLMYGLPWQSVMMNDKEAYHAPIRLLIVIQAPDAYIQRLLKHHNHFRQKVDHQWIRLASIDENNSWKDWX

SEQ ID NO: 2575 - DNA, 1200 bp, Artificial Sequence
  Description of Artificial Sequence: synthetic nucleic acid sequence
atgaaacatattttattagctgttacaggcggtatcgcagcatataaagcaattgatttaacaagtaaattaatacaatccggctatgatgtaagagttatgctatctgatcatgctcaagagtttgttactccgctagcttttcaagcaatcagtagaaatcctgtttacacaaatacatttaaagaagaaaatcctgaagagattcaacatgtatcattaggagactgggcagatgcgattatagtcgcgccagcaactgctaatactatcgcaaaattaagtgttggaattgctgatgatttaattacttctacattacttgctacaacaacaccaaaattcgttgcacccgcaatgaatgtaaatatgtataacaatccacgtactaaacataatatgaaagtgctaagtcaagacggatattattttattgaacctggtagtggctatttagcatgtggttatgtagcaaaagggcgaatggaagaacccatgcaaatcctatctgttattaataaattttttactcaacagaagaatgttgtcaaaagctctttttctggaaagcgcgcattagttacagctgggcctacagttgaagttattgatcctgttcgatacgtatcaaatcgttcatcaggaaaaatgggatatgctatagctgaagcattacgagataagggagcaatcgtaactttaattagtggtcccacccacttatctctacctgaagggattaatgtagtaaaagttgagagtgcagatgatatgtttcaagctgtaaccgaacgctttgcgaaacaagatatagtgattaaagcagcggcggtgtctgattatacaccaatggacatacttgaacataaattaaaaaaacaagaaggaggattatctgttcaatttaagcgtacaaaggatattttaaaatacttaggagaaaataaaacgcaccaatatcttgttggttttgctgctgaaacacaaaatattgaacagtatgctctagacaaactcaaaagaaaaaatgcagatgttatcatttcgaacaatgtaggtgatacatccataggctttagttcagatgacaatgaattaactatgcattttaaaaataatgaaaaagtaaatattaagaaaggaaaaaaatcagctttagcacatcaaattatagaaattttagaaactaggtggcagtaa

SEQ ID NO: 2576 - protein, 399 aa, Artificial Sequence
  Description of Artificial Sequence: synthetic amino acid sequence
MKHILLAVTGGIAAYKAIDLTSKLIQSGYDVRVMLSDHAQEFVTPLAFQAISRNPVYTNTFKEENPEEIQHVSLGDWADAIIVAPATANTIAKLSVGIADDLITSTLLATTTPKFVAPAMNVNMYNNPRTKHNMKVLSQDGYYFIEPGSGYLACGYVAKGRMEEPMQILSVINKFFTQQKNVVKSSFSGKRALVTAGPTVEVIDPVRYVSNRSSGKMGYAIAEALRDKGAIVTLISGPTHLSLPEGINVVKVESADDMFQAVTERFAKQDIVIKAAAVSDYTPMDILEHKLKKQEGGLSVQFKRTKDILKYLGENKTHQYLVGFAAETQNIEQYALDKLKRKNADVIISNNVGDTSIGFSSDDNELTMHFKNNEKVNIKKGKKSALAHQIIEILETRWQ

SEQ ID NO: 2577 - DNA, 2301 bp, Artificial Sequence
  Description of Artificial Sequence: synthetic nucleic acid sequence
gtggtaccttttggccctagaactatacaaggatacgtcatgaatattcaacaaaaaccagatggaaatatggatatatcgaaactaaaagaaataaaagaagtacgtgatattaaacctgaattaacatccgaactgattcaattaagcgaatggatgagccattatcatgtgatgaaacgtatttctgttttagaagcgatgttgccaagtgccattaaagcaaagtataagaaagctttttcaattatcgatccaaaaaatttatcttcaaaaaccaaagcgctatttaacaatgacggttattacttatataaagaagttcagcaaaacaatgatttagaagaaatgttgactttgttaaatcaaggattgattgaagaggtcacgatactttctcaaaacacaaaaaagaaaactcaaaaagctgttggcgtagttaatacgttgaatggtgatgaagtacttgcaaaactcgagaaatatacaaaacaatatgatttgtatgcatttttattagaagagtctcatcgaacagtgtttttaaaagaaatcaatgatatgggcttctctcactcgagtttagattctttaatcaaaaaaggttatattgaaaaatatatcgccgaggttttcagagatccatatgcaaatcgtatatttgaacaagaacaaaagaggatattaactaaagaacagcaagatgcatttgaagctattcaacattatattcatgatgaaaaagaaagaacatttttattacacggagtcacaggttcaggtaaaaccgaagtctatcttcaaacaatagaagaagttcttaataaaggtaaagaagccatgatgttagtgccggaaatcgccttaacacctcagatggtactaagatttaaacgtcgatttggagatgatgtagcggtattacattccggactttcaaaaggtgaacgttatgatgagtggcaaaaaattagagacggtcgagctcgagtgagtgtaggtgctcgttcaagtattttcgcaccgtttaaaaatttaggcatcattataattgatgaagaacatgaatctacatataaacaagaagattatcccagatatcatgcacgtgatattgcacaatggagaagtcaatttcatcattgtcctgtagttttaggtagcgcaacaccgagtcttgagtcatatgcaagagcagaaaaaaatgtttacgagttgttgtcattgccacatagagtcaatcaacaagcgttaccgcatattgatattatagatatgagagaagaattaagtgaaggtaatcgttccatgttttctatagcactaagacaagcgatacaagaacggttggataaaaaagaacaaatagtactattcttaaatagaaggggatatgcttcatttatgttatgtagagattgtggttacgttccccaatgtccccattgtgatatttcgttaacatatcataaaacaaccgatcaattaaaatgtcattactgtggttatcaagaaaatccaccatctcaatgtccaaattgtgaaggtgatcatatcagacaagtcggaactggaacgcaacgtgtagaagaattattacaacaagaattccctcatgctcgtattataaggatggatgttgatacaacttcaagaaaaggtgcacatgagaaattgttaaatgactttgaagcaggaaaaggagatatcttattaggtacgcaaatgattgctaaaggtttggattatcctaacattactctagttggtgtgctcaatgctgacactatgttaaacttacctgactttcgtgccagtgaacgaacataccaacttttaactcaggtatctggacgcgcaggtcgtcatgaaaaagaaggacaagttatcatacaaacgtacaaccctgatcattattcaataaaggatgtgaaattaaacgattatctttctttttatcaaaaagaaatgaattatcgaaaattaggaaaatatccaccttactattttttgattaactttaccatttcacatactgatataaaaaaggtcatgatggcctctaagcatatacatcaaattttagtacagcacttaagtgaaaaagcattcgtgctaggcccttcaccagcagcactagcaagaattaacaatgagtatcgttttcaaatactagtaaaatataagagtgagcctcaattacatcaagcgttacaatatttagatgattataatcatgatcaatatgtaaaggataaactatcattaaaaattgatatcaatccacaaatgatgatgtga

SEQ ID NO: 2578 - protein, 766 aa, Artificial Sequence
  Description of Artificial Sequence: synthetic amino acid sequence
VVPFGPRTIQGYVMNIQQKPDGNMDISKLKEIKEVRDIKPELTSELIQLSEWMSHYHVMKRISVLEAMLPSAIKAKYKKAFSIIDPKNLSSKTKALFNNDGYYLYKEVQQNNDLEEMLTLLNQGLIEEVTILSQNTKKKTQKAVGVVNTLNGDEVLAKLEKYTKQYDLYAFLLEESHRTVFLKEINDMGFSHSSLDSLIKKGYIEKYIAEVFRDPYANRIFEQEQKRILTKEQQDAFEAIQHYIHDEKERTFLLHGVTGSGKTEVYLQTIEEVLNKGKEAMMLVPEIALTPQMVLRFKRRFGDDVAVLHSGLSKGERYDEWQKIRDGRARVSVGARSSIFAPFKNLGIIIIDEEHESTYKQEDYPRYHARDIAQWRSQFHHCPVVLGSATPSLESYARAEKNVYELLSLPHRVNQQALPHIDIIDMREELSEGNRSMFSIALRQAIQERLDKKEQIVLFLNRRGYASFMLCRDCGYVPQCPHCDISLTYHKTTDQLKCHYCGYQENPPSQCPNCEGDHIRQVGTGTQRVEELLQQEFPHARIIRMDVDTTSRKGAHEKLLNDFEAGKGDILLGTQMIAKGLDYPNITLVGVLNADTMLNLPDFRASERTYQLLTQVSGRAGRHEKEGQVIIQTYNPDHYSIKDVKLNDYLSFYQKEMNYRKLGKYPPYYFLINFTISHTDIKKVMMASKHIHQILVQHLSEKAFVLGPSPAALARINNEYRFQILVKYKSEPQLHQALQYLDDYNHDQYVKDKLSLKIDINPQMMM

SEQ ID NO: 2579 - DNA, 705 bp, Artificial Sequence
  Description of Artificial Sequence: synthetic nucleic acid sequence
atgtataatgaaatatttggtattgcgtcatttattgttacattcgctttaatggtactgatgtatcgctgttttggtaaacaaggactaattgcttgggtagcaataggaacgattatcgctaatatacaggtcataaaagcggttcatatttttggtattacggctacacttggaaatgtcatgtttgcttctatatatttagctactgatatattaaatgacatctatggtcgtaaagttgctaaaagagcggtgtggcttggtttctcttctaccttagtaatgattatagtcatgcaaatgtcattgcattttattcctgccccagtagacaatgcgcaaaactcattaaaaatgatttttgatttagtgcctagaattgctataggttccattattgcttatatcataggccaacatattgatgtatttatattcagtatgattaaaaagatatttagctctgataagaccttttttattagagcatatggtagtaccattttaagttctatcattgataccggtttatttgtttcaattgcttttattggtactatgcctggtactgctgtttttgaaatatttattaccacttacttgttaaaactagtgtcaactatttttaatgtaccatttggatatatcgctaagtcactatatcgaaaaggaaagatagaacaactagataatgggtattga

SEQ ID NO: 2580 - protein, 234 aa, Artificial Sequence
  Description of Artificial Sequence: synthetic amino acid sequence
MYNEIFGIASFIVTFALMVLMYRCFGKQGLIAWVAIGTIIANIQVIKAVHIFGITATLGNVMFASIYLATDILNDIYGRKVAKRAVWLGFSSTLVMIIVMQMSLHFIPAPVDNAQNSLKMIFDLVPRIAIGSIIAYIIGQHIDVFIFSMIKKIFSSDKTFFIRAYGSTILSSIIDTGLFVSIAFIGTMPGTAVFEIFITTYLLKLVSTIFNVPFGYIAKSLYRKGKIEQLDNGY

SEQ ID NO: 2581 - DNA, 393 bp, Artificial Sequence
  Description of Artificial Sequence: synthetic nucleic acid sequence
atggctaaaatacattttgatgctgcgactaaaggaaatcccggccgaagtgcttgtgcgattattattaaagaaaattcacaaagatatacatttacccatgatttaggtgaaatggataatcatagtgcagaatgggcagcaatgttacacgctttggaacatgcacgcgaattaaaagtatctaacgcgttactttttactgattcaaaattaattgaagatagtatgatgcaaggtaaagttaaaaatgctaagtttaaagtttattttgaaaacatagaaatcttagagcaaagttttgatttgatgtttgtgagatggattccacgaaagcaaaataaagaagcgaatcaacttgctcaacaaacactatacaaacttacatcataa

SEQ ID NO: 2582 - protein, 130 aa, Artificial Sequence
  Description of Artificial Sequence: synthetic amino acid sequence
MAKIHFDAATKGNPGRSACAIIIKENSQRYTFTHDLGEMDNHSAEWAAMLHALEHARELKVSNALLFTDSKLIEDSMMQGKVKNAKFKVYFENIEILEQSFDLMFVRWIPRKQNKEANQLAQQTLYKLTS

SEQ ID NO: 2583 - DNA, 591 bp, Artificial Sequence
  Description of Artificial Sequence: synthetic nucleic acid sequence
gtgttcgttatggaaaaagaagaaatctttcttcctgaaagtgaaaaaaatgggaaacctatcgacttattttttatatggtttgcagccaatctaggtattctcgggatagtttatggcgctgtcatagtaagttacggattgagctttttacaatcaattttgattgctataataggaccgttatcctttgttctagttggttatataagtgtagctggtagagatagtggagctataacttttatgctctcaagagcaccatttggatttaaaggcaatcatatacctgctttaattggctgggtaggtcaagttggttggttatctgttaatgtttctacaggaactttaactcttctggctttattcaatacttttggttttaagactagtacatttctaattttgatgagtttagcgatttttgctgggctagttattatatctgttcttttttcacaaaaagtacttgtatcagtacaaacatttttcacatatgtatttggtgcattaaccttattagttataacaattttaattactaatactgattggaacgcccttttttctatgaaatctgggtcttaa

SEQ ID NO: 2584 - protein, 196 aa, Artificial Sequence
  Description of Artificial Sequence: synthetic amino acid sequence
VFVMEKEEIFLPESEKNGKPIDLFFIWFAANLGILGIVYGAVIVSYGLSFLQSILIAIIGPLSFVLVGYISVAGRDSGAITFMLSRAPFGFKGNHIPALIGWVGQVGWLSVNVSTGTLTLLALFNTFGFKTSTFLILMSLAIFAGLVIISVLFSQKVLVSVQTFFTYVFGALTLLVITILITNTDWNALFSMKSGS

SEQ ID NO: 2585 - DNA, 1836 bp, Artificial Sequence
  Description of Artificial Sequence: synthetic nucleic acid sequence
gtgataaaagagttatcacaaaagaaacgagatgcaataaataacaacactgatttaacaccttctcaaaaggcacatgctttagcagatattgataaaacagaaaaagatgcacttcaacatatcgaaaattctaattcaattgatgatatcaataacaataaagagcatgcatttaatactttagctcatatcattatttgggatactgatcagcaaccattagtttttgaactacctgaattgagccttcaaaatgctctagtaacaagtgaggtggttgttcacagagatgaaactatttcattagaatctataattggagctatgactttaactgatgaacttaaagtcaatattgtttcattaccgaacactgataaagtagctgatcacctaaccgctaaagttaaggttattttagctgatggctcatttgtcactgtaaatgttccagtcaaagttgtagaaaaagaattacaaatagctaaaaaggatgctataaaaacaattgatgttctggtaaaacaaaaaatcaaagatatagattctaataacgaattaacgtctactcaacgtgaagatgcaaaagctgaaattgaaagattgaaaaagcaagccatcgataaagtgactcattctaaatcgattaaagatattgaaacagtaaaacgaactgattttgaagaaatagatcagtttgatcctaaacgctttacgctaaataaagctaaaaaggatatcattactgatgttaatactcaaatccaaaatggtttcaaagaaattgaaacaataaaaggtttaacttctaatgaaaaaactcagtttgataaacaattaactgcactacaaaaagaatttttagaaaaagtcgagcatgctcataatttagtagaattaaatcaattacaacaagagtttaataatagatatgaacatattttaaaccaagcacatttactaggtgaaaaacatatagcagaacataaattaggatatgttgtagtaaacaaaactcagcaaatactaaataatcaatctgcttcttactttataaaacaatgggcacttgatagaattaaacaaattcaactagaaacgatgaattcaattcgtggtgcgcataccgtacaagatgtacacaaagcattgttacaaggtatagagcaaatcttgaaagtaaatgtaagtattataaatcaatctttcaacgattccttgcataactttaattatcttcattcaaaatttgatgctagattaagagaaaaggatgttgcaaaccatatcgtacaaactgaaacattcaaagaagttctaaaaggaacgggtgttgaaccaggtaaaatcaacaaagaaacacagcaaccaaaacttcataagaatgataatgatagcctattcaaacatttagttgataatttcggcaaaactgtaggtgttattacattaactggtttactttctagtttctggttagttttggctaaaagacgtaaaaaagaagaagaaaaacaatcgataaaaaattatcacaaagacattcgtctttcagatactgataaaatagatccaattgtaataactaagcgtaaaatagataaagaagaacaaattcaaaacgatgacaaacattcaattccagttgctaaacataagaaatctaaagaaaagcaattgagtgaaggagatattcattcaatccccgtcgttaaacgtaaacaaaacagtgataacaaagatacaaaacagaagaaagttacttctaaaaagaagaaaacgcctcaatcaactaaaaaagttgtaaaaaccaaaaagcgttctaaaaagtaa

SEQ ID NO: 2586 - protein, 611 aa, Artificial Sequence
  Description of Artificial Sequence: synthetic amino acid sequence
VIKELSQKKRDAINNNTDLTPSQKAHALADIDKTEKDALQHIENSNSIDDINNNKEHAFNTLAHIIIWDTDQQPLVFELPELSLQNALVTSEVVVHRDETISLESIIGAMTLTDELKVNIVSLPNTDKVADHLTAKVKVILADGSFVTVNVPVKVVEKELQIAKKDAIKTIDVLVKQKIKDIDSNNELTSTQREDAKAEIERLKKQAIDKVTHSKSIKDIETVKRTDFEEIDQFDPKRFTLNKAKKDIITDVNTQIQNGFKEIETIKGLTSNEKTQFDKQLTALQKEFLEKVEHAHNLVELNQLQQEFNNRYEHILNQAHLLGEKHIAEHKLGYVVVNKTQQILNNQSASYFIKQWALDRIKQIQLETMNSIRGAHTVQDVHKALLQGIEQILKVNVSIINQSFNDSLHNFNYLHSKFDARLREKDVANHIVQTETFKEVLKGTGVEPGKINKETQQPKLHKNDNDSLFKHLVDNFGKTVGVITLTGLLSSFWLVLAKRRKKEEEKQSIKNYHKDIRLSDTDKIDPIVITKRKIDKEEQIQNDDKHSIPVAKHKKSKEKQLSEGDIHSIPVVKRKQNSDNKDTKQKKVTSKKKKTPQSTKKVVKTKKRSKK

SEQ ID NO: 2587 - DNA, 441 bp, Artificial Sequence
  Description of Artificial Sequence: synthetic nucleic acid sequence
atgatgaatggatacgaagcttatatgaaagaacttgcacaacaaatgagagctgaattaacagacaatggattcacaagtcttgaaacgagtgatgacgtcaatcagtatatgcaaaatatagataatgatgatacaacatttgttgtaatcaactcaacatgcggttgcgctgcaggattagcacgtccagcagctgttgcagttgcagagcaaaatgaagtgaaaccagatcataaagtaactgtatttgctggtcaagataaagaagcaacacaaacaatgagagattacatccaacaagttccttcaagtccctcatacgcattatttaaaggtcaacatttagttcattttatacctcgcgaacatattgaagggcgcgacatcaatgatatagctatggatttaaaagatgcttttgatgataattgtcaataa

SEQ ID NO: 2588 - protein, 146 aa, Artificial Sequence
  Description of Artificial Sequence: synthetic amino acid sequence
MMNGYEAYMKELAQQMRAELTDNGFTSLETSDDVNQYMQNIDNDDTTFVVINSTCGCAAGLARPAAVAVAEQNEVKPDHKVTVFAGQDKEATQTMRDYIQQVPSSPSYALFKGQHLVHFIPREHIEGRDINDIAMDLKDAFDDNCQ

SEQ ID NO: 2589 - DNA, 318 bp, Artificial Sequence
  Description of Artificial Sequence: synthetic nucleic acid sequence
atgaggagaatatatatgaaaagattattaggtacattaattgctgctacactagtgttaagtgcttgtagccaaaacgacactaaggaagatgaaaataaaaagtcagaaaatactactgaaaagaaatctgacgataaaaaagacaaaaaaactaatgaggataaaaagtctggagaacaaaagaaatctcaagaaaaaaagaataacaagtcaatgcaagaatctgctacaaatgaacaggttcaatctcaacaacaaacttcacaaggtgtaccatcaaaatgctctttgccgatgactgttttatcaatttga

SEQ ID NO: 2590 - protein, 105 aa, Artificial Sequence
  Description of Artificial Sequence: synthetic amino acid sequence
MRRIYMKRLLGTLIAATLVLSACSQNDTKEDENKKSENTTEKKSDDKKDKKTNEDKKSGEQKKSQEKKNNKSMQESATNEQVQSQQQTSQGVPSKCSLPMTVLSI

SEQ ID NO: 2591 - DNA, 309 bp, Artificial Sequence
  Description of Artificial Sequence: synthetic nucleic acid sequence
atgactgcatttttaattcttaatttattgactatgaaagaggcttcaatatcgtctattattgtacgaactgtcattgcagctattgttttctttgtcatttatatcattgtatttacaattttaagttcgtcagaacgtaaacttatttatggtacaactttgcctattgcgctttttatatgccttatattcggagcaatttttttcactccgcgtataggtatcattgccggactaattataggtgtgtttgctggtgtcatatgggagttcttaaatagaaaaaatggaggtcgctcatcttga

SEQ ID NO: 2592 - protein, 102 aa, Artificial Sequence
  Description of Artificial Sequence: synthetic amino acid sequence
MTAFLILNLLTMKEASISSIIVRTVIAAIVFFVIYIIVFTILSSSERKLIYGTTLPIALFICLIFGAIFFTPRIGIIAGLIIGVFAGVIWEFLNRKNGGRSS

SEQ ID NO: 2593 - DNA, 2970 bp, Artificial Sequence
  Description of Artificial Sequence: synthetic nucleic acid sequence
atgaaaatattcttagaagaactaattcaccaacaacaagcagttaaaaaaataatagatactttcacaggaatcgaaaagtatttaacttcaaaaaattgtgacaatgagttcgctaataatttaataataaatagatattcagaagaagctaacatagatataaaaatggagaccgggacaggtaaaacgtatgtttatactaaaatgatgtatgaattacataaaaaatttgggatttttaaatttatattagtagttccaagtcctgcaattaaagagggagcaaagaattttttaactagtttatcaactaaaagacatttccaagaaacatacggaaatgttgaaatagaaataaatacaataaataaaggcgattttaatactagatcaggcagaaaaatttttccacctcatttgagtaactttattgaaagcagtaatttaaatgctaatcaaattcaagtattacttattaatgcaggtatgttaaattcatcaaatatgacaaaggttgattacgaccaaactttattaagtaattactcaaaccctatagaagctttaaaagctaccaaatctgtagttataatagacgaaccccataggtttcctagggataagaagaactacaaatctatagaaaatcttgaacctcaaatgattgttaggtttggtgctacttttcctgaagtaaaaaaaggaacaggaaaaaaagctgtatatattaaagattattatcgaggtaggcctcaatttgaattgaatgctgttgacagctttaatcagggacttgtaaagggaatagatatttactatccaaatttgactccagaacaagcgaaaaatagatataccattgatagtgtaaaagccaaagagatagttttgaaaaaaggaaaaaataaatggacgctaggtataggcgagaatttagcaaatatagattcgttatttgaaggtgacttaagttattctggtgctaaaactttatctaatgacttagaaattagtaaaggtatggatttattgcctggcacatttacaactaattaccaggaattaattattaatgatgctatcaatcaacattttgagcatgaaatcaataattttatgagagataacctaaaagaaaattttcaaccaaaagtaaaaacactatcattattttttattgattctattaggtcatatagaaacaaagagggctggttgaaacagacttttgagagactcttaaaagttaaacttagaaaattaataaaagaatttgaagttaaaaaattaccacgagagattgaatacttagattttttaagagtgacatatgatagtcttaatagtgagaatcaaatggtccatgcagggtattttggtgaagacagaggttccggtgatgaagcaatacaggctgaagttaatgatatacttaaaaataaagaaaaaatgctgagttttaaagacgagaatggtaactggattacaagaagatttttattttcaaaatggacattaagagaaggttgggataaccctaatgttttcgttattgcgaaattgagaacttctggttctgaaaatagcaagatacaggaagtaggaagaggtttgcgtttacctgttgatgagaatggtcacagattaacacaagatgaatttccaagtagactttcatttttaattggatatgatgaaaaggatttcgcagaaaaattaattggagaaataaattctgatgtagacgttaaattaagtgaagataaattaacagatgaaatgattaataaaatagttgaacatagaaagcaagtggatcctcattataatgatgaagtgttattagaacaattagatgaacgaaatctaattaataggaaaaatgagtttaaaacagatgttgaaattgatggagttaaaaaatcaggatttgaatggctgttagaattatatccagaagttaatgcatctaaattaaatgcagataaagtcagagatatgaaaaaaaatccacccaatttaaaagtgaagttaaataaagagaattggaataaattgagattcttatgggaaaatttatctaaaagatatatgttagaattcaaaaagatgagtgaagatgatctgtatttgtttgttgaaagattgttgaacgacgatgatttatttgttaaacaacaaccagaaagaatacatcaatctttggaaaaagatgatgaaggtaaacaagttatcaaggaatctatttcagaatataattatagaaatgaatttatttatatgaactatggtaagtttttaaaacaaattgtacttaaaactaatgtaccaatatctataatgcataaaaatttactttccgttttaaaagataaatataatagtgatgaacgattcttgagtgaattaagtttaaataatataataagagaatttaacaagcgttttgaagaaaaatatagtcaaagttatgaatataagaaattagatttttctgctactacaaccatttatgattcagaaatatcagagtttaaagattgggtagatgcaaattatttaggtactaacgttgaaaataacattcaaactgaaaaaagatttttatatgaaagaccaccagttagatatgatagtgtaacacctgagttagagttgttaaaaagaaattacgataaaaatgtaactgtatttggtaatttgcctaaaaaagcgatacaagttcctaaatatactggtggcactactacgcctgattttgtctatatgatagaaactgatgaacaagatgcaaaataccttattgttgaaacaaaagcagaaaacatgagactaggagataaaagtattggtgaaatacaaaaaaaattctttaacacattagataatttgaatattaaatatcaattagctactagcgcgcaagatgtttataatgaaattaaaaaattagatgattcaaagtga

SEQ ID NO: 2594 - protein, 989 aa, Artificial Sequence
  Description of Artificial Sequence: synthetic amino acid sequence
MKIFLEELIHQQQAVKKIIDTFTGIEKYLTSKNCDNEFANNLIINRYSEEANIDIKMETGTGKTYVYTKMMYELHKKFGIFKFILVVPSPAIKEGAKNFLTSLSTKRHFQETYGNVEIEINTINKGDFNTRSGRKIFPPHLSNFIESSNLNANQIQVLLINAGMLNSSNMTKVDYDQTLLSNYSNPIEALKATKSVVIIDEPHRFPRDKKNYKSIENLEPQMIVRFGATFPEVKKGTGKKAVYIKDYYRGRPQFELNAVDSFNQGLVKGIDIYYPNLTPEQAKNRYTIDSVKAKEIVLKKGKNKWTLGIGENLANIDSLFEGDLSYSGAKTLSNDLEISKGMDLLPGTFTTNYQELIINDAINQHFEHEINNFMRDNLKENFQPKVKTLSLFFIDSIRSYRNKEGWLKQTFERLLKVKLRKLIKEFEVKKLPREIEYLDFLRVTYDSLNSENQMVHAGYFGEDRGSGDEAIQAEVNDILKNKEKMLSFKDENGNWITRRFLFSKWTLREGWDNPNVFVIAKLRTSGSENSKIQEVGRGLRLPVDENGHRLTQDEFPSRLSFLIGYDEKDFAEKLIGEINSDVDVKLSEDKLTDEMINKIVEHRKQVDPHYNDEVLLEQLDERNLINRKNEFKTDVEIDGVKKSGFEWLLELYPEVNASKLNADKVRDMKKNPPNLKVKLNKENWNKLRFLWENLSKRYMLEFKKMSEDDLYLFVERLLNDDDLFVKQQPERIHQSLEKDDEGKQVIKESISEYNYRNEFIYMNYGKFLKQIVLKTNVPISIMHKNLLSVLKDKYNSDERFLSELSLNNIIREFNKRFEEKYSQSYEYKKLDFSATTTIYDSEISEFKDWVDANYLGTNVENNIQTEKRFLYERPPVRYDSVTPELELLKRNYDKNVTVFGNLPKKAIQVPKYTGGTTTPDFVYMIETDEQDAKYLIVETKAENMRLGDKSIGEIQKKFFNTLDNLNIKYQLATSAQDVYNEIKKLDDSK

SEQ ID NO: 2595 - DNA, 771 bp, Artificial Sequence
  Description of Artificial Sequence: synthetic nucleic acid sequence
atggattatagagtactactttattataaatatgtaactatagatgaccctgaaacttttgcagccgaacatttgaaattttgtaaggaacatcatttaaaaggaagaatactagtttcaacggaaggcattaatggaacattatctggaacaaaagaagatactgataaatatatagagcatatgcatgcagatagtcgttttgctgatttaacttttaaaattgatgaagctgaaagtcatgcgtttaaaaagatgcacgtgcgtccaagacgtgaaattgttgcacttgacttagaagaagatattaatccacgtgaaattaccggtaaatactattctcctaaagaatttaaagccgcactagaagatgaaaatactgttatattagatgctcgaaatgattatgaatacgatttaggacatttccgtggagctattcgtcctgatataacacgattccgtgacttacctgaatgggtgcgtaataataaagaacaactcgacggaaaaaatattgtcacatattgtacaggtggcattcgttgtgaaaaattttctggttggttagtaaaagaaggatttgaaaacgtaggtcagttgcatggtggtattgctacatacggtaaagaccctgaaactaaagggctatattgggatggtaagatgtatgtatttgatgaacgtattagtgtcgatgtgaatcaaattgataaaacagtcatcggcaaagagcattttgatggtacaccttgtgaagtttgttgttga

SEQ ID NO: 2596 - protein, 256 aa, Artificial Sequence
  Description of Artificial Sequence: synthetic amino acid sequence
MDYRVLLYYKYVTIDDPETFAAEHLKFCKEHHLKGRILVSTEGINGTLSGTKEDTDKYIEHMHADSRFADLTFKIDEAESHAFKKMHVRPRREIVALDLEEDINPREITGKYYSPKEFKAALEDENTVILDARNDYEYDLGHFRGAIRPDITRFRDLPEWVRNNKEQLDGKNIVTYCTGGIRCEKFSGWLVKEGFENVGQLHGGIATYGKDPETKGLYWDGKMYVFDERISVDVNQIDKTVIGKEHFDGTPCEVCC

SEQ ID NO: 2597 - DNA, 492 bp, Artificial Sequence
  Description of Artificial Sequence: synthetic nucleic acid sequence
atgaatataaattttaataatattaacttaattataagtgctgtaaaaaaagcacagtatcctgacactggattaacagaagtagcgttaagtggacgctcaaatgtagggaaatctacatttattaatagtatgattgggcgtaaaaatatggcgagaacgtcacaacaacctggtaagacacagacattgaatttctataatatagatgaacaacttatttttgttgatgtaccaggatatggatacgctaaagtaagtaaagttcaacgagaaaaatttggtaaaatgattgaagaatatattacacaacgagagaatttaaaacttgttattcaacttgtcgatttaagacatcaacctactgaagatgatgtgcttatgtacaattatcttaaacattttgatataccaacacttgtaatatgtactaaagaagataaaattgccaaaggaaaagtacgagggtccagagaggctccgaagatatga

SEQ ID NO: 2598 - protein, 163 aa, Artificial Sequence
  Description of Artificial Sequence: synthetic amino acid sequence
MNINFNNINLIISAVKKAQYPDTGLTEVALSGRSNVGKSTFINSMIGRKNMARTSQQPGKTQTLNFYNIDEQLIFVDVPGYGYAKVSKVQREKFGKMIEEYITQRENLKLVIQLVDLRHQPTEDDVLMYNYLKHFDIPTLVICTKEDKIAKGKVRGSREAPKI

SEQ ID NO: 2599 - DNA, 1011 bp, Artificial Sequence; identical to SEQ ID NO: 623
  Description of Artificial Sequence: synthetic nucleic acid sequence

SEQ ID NO: 2600 - protein, 336 aa, Artificial Sequence; identical to SEQ ID NO: 624
  Description of Artificial Sequence: synthetic amino acid sequence

SEQ ID NO: 2601 - DNA, 882 bp, Artificial Sequence; identical to SEQ ID NO: 625
  Description of Artificial Sequence: synthetic nucleic acid sequence

SEQ ID NO: 2602 - protein, 293 aa, Artificial Sequence; identical to SEQ ID NO: 626
  Description of Artificial Sequence: synthetic amino acid sequence

SEQ ID NO: 2603 - DNA, 1278 bp, Artificial Sequence
  Description of Artificial Sequence: synthetic nucleic acid sequence
atgaaattaattaaaaacggaaaaatcttaaaaaacggtatcctaaaagacacagaaattttaatcgacggtaaacgtattaaacaaattagtagtaaaattaatgcttcatcttcaaatattgaagttattgatgcaaaaggaaatttaattgctcccggttttgtagatgttcatgtgcacctacgtgaaccaggtggtgaacataaagaaacaattgaaagtggtacaaaagccgctgcaagaggtggttttactacagtatgtcctatgcctaatacaagacctgtaccagatacagttgaacatgttagagaattaagacaacgaatttctgaaacagcacaagttagggtgttgccttatgctgctattactaagagacaagcaggtactgaacttgttgattttgaaaaattagcactagaaggtgtgtttgcatttactgacgatggtgtgggagttcaaacagcaagtatgatgtatgctgctatgaagcaagctgcaaaagttaaaaaaccgattgtcgcacactgtgaagataatagcttaatctatggtggtgcaatgcataaaggtaaacgtagtgaagaattaggcatacctggtattccaaatattgctgaatctgtacaaattgctagagatgtattattggctgaagcaactggttgtcactatcatgtgtgtcatgtttcaactaaggaaagtgttcgagtaatcagagacgctaaaaaagctggtatccatgtaacagcagaagttacaccacatcatttattattaactgaaaatgatgttcctggcgatgattcaaactacaaaatgaatccaccattaagaagtaatgaagatagagaagcacttttagaaggcttattagatggaacaattgattgtattgcaacggatcatgcacctcacgctaaagaagaaaaagcacaacctatgacaaaagcacctttcggcatcgtaggtagtgaaacagcattcccattactttatacacactttgtaagacgaggtaattggtcactgcaacaattagttgattatttcactattaaaccagctactattttcaacttaaattatggaaaattacacaaagatagttacgctgatttaacaataattgatcttaatactgaaaaagaaatcaaaagtgaagatttcttatctaaagctgataacactccatttattggtgaaaaagtttatggaaatccaacactaacaatgcttaaaggtgaagtagtattcgaggaggaaaagtag

SEQ ID NO: 2604 - protein, 425 aa, Artificial Sequence
  Description of Artificial Sequence: synthetic amino acid sequence
MKLIKNGKILKNGILKDTEILIDGKRIKQISSKINASSSNIEVIDAKGNLIAPGFVDVHVHLREPGGEHKETIESGTKAAARGGFTTVCPMPNTRPVPDTVEHVRELRQRISETAQVRVLPYAAITKRQAGTELVDFEKLALEGVFAFTDDGVGVQTASMMYAAMKQAAKVKKPIVAHCEDNSLIYGGAMHKGKRSEELGIPGIPNIAESVQIARDVLLAEATGCHYHVCHVSTKESVRVIRDAKKAGIHVTAEVTPHHLLLTENDVPGDDSNYKMNPPLRSNEDREALLEGLLDGTIDCIATDHAPHAKEEKAQPMTKAPFGIVGSETAFPLLYTHFVRRGNWSLQQLVDYFTIKPATIFNLNYGKLHKDSYADLTIIDLNTEKEIKSEDFLSKADNTPFIGEKVYGNPTLTMLKGEVVFEEEK

SEQ ID NO: 2605 - DNA, 547 bp, Artificial Sequence
  Description of Artificial Sequence: synthetic nucleic acid sequence
atgcttgaaaaacgttatcttgtactggaagatggctcttattacgaaggatatcgcttagggtcagatgacttatctataggcgaaattgtattcaacactgctatgacggggtaccaagaaacaatctctgacccgtcttacacaggtcaaatcataacttttacgtacccactaattggaaactatggtattaatcgcgatgattttgaatcattaacacctaaattaaatggggtagtagtaaaggaagcaagtacacaccctagtaactttagacaccaaaaaactttacacgaaacacttgctcaatatcatattcctggtatatcgggggtagatactagaagtattactcgtaaaattagaaattatggtgttttaagagctggatttacagataataaagataacattcaggaacttgttgaacagttgaaaactgctgaattacctagagatgaagttcaaacggtttctacaaaaacaccatatgtatcaacaggttccgatttaagcgtcgttttactcgactttggtaaaaagc

SEQ ID NO: 2606 - protein, 183 aa, Artificial Sequence
  Description of Artificial Sequence: synthetic amino acid sequence
  MOD_RES (183): variable amino acid
MLEKRYLVLEDGSYYEGYRLGSDDLSIGEIVFNTAMTGYQETISDPSYTGQIITFTYPLIGNYGINRDDFESLTPKLNGVVVKEASTHPSNFRHQKTLHETLAQYHIPGISGVDTRSITRKIRNYGVLRAGFTDNKDNIQELVEQLKTAELPRDEVQTVSTKTPYVSTGSDLSVVLLDFGKKX

SEQ ID NO: 2607 - DNA, 1698 bp, Artificial Sequence
  Description of Artificial Sequence: synthetic nucleic acid sequence
atggcacaagcattaaaacgtttatacggagacgttaaatttggagttggacctgtaatagaaggcggattctattatgattttgatatggatgataaggtttcatcggatgattttgataaaattgagaaaacaatgaaacaaattgtgaacgaaaatcataaaattgtaagagaagtagttagtaaagaaaaagcaaaagacttcttcaaggatgacccttataaattagaacttattgatgcaattcctgaagatgagagtgtaacactttatactcaaggtgaatttactgatttatgtcgaggtgtacacgtaccttctacttctaaaattaaagagttcaaactattatctacagctggtgcttattggcgtggaaatagtgataataaaatgttacaacgaatttatggtacagcattctttgacaaaaaagatttgaaagcacatctaaaaatgttggaagaacgtcgtgagcgtgatcatcgtaaaattggtaaagatttagaattgtttacaaacaatcaactcgttggtgctggtttaccattatggttaccaaatggtgctacaatacgtagggaaatagaacgttatattgtcgataaagaagtaagtatgggatacgatcatgtttacacaccagtattagccaatgttgatttatataaaacatctggtcactgggatcattatcaagaagatatgttcccagcaatgaagttagatgaagacgaagcaatggtcttaagaccaatgaactgtccacatcatatgatgatttataaaaacaaacctcattcttatcgcgaattacctatacgtattgctgaattgggtactatgcatcgttacgaagcaagtggtgcagtatcaggtttacaacgtgttcgaggaatgacattgaatgattcccatattttcgttagacctgatcaaattaaagaagaatttaaacgtgtagttaatatgattcaagatgtgtacaaagattttggttttgaagattatcgcttcagattgagttatagagatcctgaagataagcataagtactttgatgatgatgaaatgtgggaaaaagctgaatccatgcttaaagaagcatcagatgaattaggtttaacttatgaagaagctattggtgaggcagcattctatggacctaagttagatgttcaagtaaaaacagctatgggaaaagaagaaactctatcaacagcacaacttgattttcttttaccagaacgttttgacttaacgtacattggtcaagatggagaacaacatcgtcctgtagttatacaccgtggtgtagtttctactatggaacgttttgttgcatttttaacagaagaaacaaaaggtgcatttccaacttggttggcgcctatgcaagttgaaattattcctgtaaatatagatttacattatgattatgcaagacttttacaagatgaactaaaatcgcaaggtgtccgcgttgaaattgatgaccgtaatgaaaaaatgggatataaaattcgtgaagctcaaatgaaaaaaataccttatcagattgttgtaggtgaccaagaagtagagaatcaagaagtaaatgtaagaaaatatggttctgaaaaacaagaatcagttgaaaaagatgaatttatttggaatgttattgatgaaatccgtttgaaaaagcatagataa

SEQ ID NO: 2608 - protein, 565 aa, Artificial Sequence
  Description of Artificial Sequence: synthetic amino acid sequence
MAQALKRLYGDVKFGVGPVIEGGFYYDFDMDDKVSSDDFDKIEKTMKQIVNENHKIVREVVSKEKAKDFFKDDPYKLELIDAIPEDESVTLYTQGEFTDLCRGVHVPSTSKIKEFKLLSTAGAYWRGNSDNKMLQRIYGTAFFDKKDLKAHLKMLEERRERDHRKIGKDLELFTNNQLVGAGLPLWLPNGATIRREIERYIVDKEVSMGYDHVYTPVLANVDLYKTSGHWDHYQEDMFPAMKLDEDEAMVLRPMNCPHHMMIYKNKPHSYRELPIRIAELGTMHRYEASGAVSGLQRVRGMTLNDSHIFVRPDQIKEEFKRVVNMIQDVYKDFGFEDYRFRLSYRDPEDKHKYFDDDEMWEKAESMLKEASDELGLTYEEAIGEAAFYGPKLDVQVKTAMGKEETLSTAQLDFLLPERFDLTYIGQDGEQHRPVVIHRGVVSTMERFVAFLTEETKGAFPTWLAPMQVEIIPVNIDLHYDYARLLQDELKSQGVRVEIDDRNEKMGYKIREAQMKKIPYQIVVGDQEVENQEVNVRKYGSEKQESVEKDEFIWNVIDEIRLKKHR

SEQ ID NO: 2609 - DNA, 423 bp, Artificial Sequence
  Description of Artificial Sequence: synthetic nucleic acid sequence
atgtttgctgaatttgaacataaaatacatcaaatagaagaagctggggagccgttaacgccaaatcgtatgaatgaagaatatgctaaactgaacaaactatattttggtgaagcagtagaaactgacgatgatattagtaaagaatggtcacgtattcctcatttctatatgaattattatgtatatcaatacgcaactggttatagtgcagctcaaagtttaagtcatcaaattttaactgagggtcaacctgctgttgaacgatatatcaatgaattcttaaaaaagggtagctcaaactatccgattgaaattttaaaaaatgcaggtgttgacatgacaacacctcaaccaatagaggaagcttgtgaagtattcgaacaaaaattagatgcttttgaaaagttaatgaaagcttag

SEQ ID NO: 2610 - protein, 140 aa, Artificial Sequence
  Description of Artificial Sequence: synthetic amino acid sequence
MFAEFEHKIHQIEEAGEPLTPNRMNEEYAKLNKLYFGEAVETDDDISKEWSRIPHFYMNYYVYQYATGYSAAQSLSHQILTEGQPAVERYINEFLKKGSSNYPIEILKNAGVDMTTPQPIEEACEVFEQKLDAFEKLMKA

SEQ ID NO: 2611 - DNA, 525 bp, Artificial Sequence
  Description of Artificial Sequence: synthetic nucleic acid sequence
atgtatgttggtacgagtaaaagtagtgttttaaatctaactgcagttcttaaaggtaaagatatttatcatgtatatgctgaatataagtctccatattataagcaatatggtaaatcagaagcccctacaatatatgatgataatattacaagtcaatcagagttaaagaagaaattaaaagaaacacttgatgacataccaacaatcgaagtagcaacgaattatttaggattagaaagtattcatgaaaataatactattcgatttatacacaaacctatcggatttaatactgatttaaaagttgtcaaacttactgaatatcacccccttgtttcgcagcctattgaagtggaattcagtaatgcacagaaagatattataaaaatgcaatcacagttcaatcgtaggttaagaaaggttaataatcttatgaaaaaaggattcaaaactagtgactattctttaaatgtgttagaggaatataacgaaacagtaggaagtgtattgattgatgagtaa

SEQ ID NO: 2612 - protein, 174 aa, Artificial Sequence
  Description of Artificial Sequence: synthetic amino acid sequence
MYVGTSKSSVLNLTAVLKGKDIYHVYAEYKSPYYKQYGKSEAPTIYDDNITSQSELKKKLKETLDDIPTIEVATNYLGLESIHENNTIRFIHKPIGFNTDLKVVKLTEYHPLVSQPIEVEFSNAQKDIIKMQSQFNRRLRKVNNLMKKGFKTSDYSLNVLEEYNETVGSVLIDE

SEQ ID NO: 2613 - DNA, 1866 bp, Artificial Sequence
  Description of Artificial Sequence: synthetic nucleic acid sequence
atgttattaactttagactttcctattcaaataggacacacatttagaaccaagatgataaataattttagaacaatacttaattattataatgaattagatcatcagcatcgcgcacacacagaaactaagcatcatgcacatcaagccatgcaggttgattatagaaatacaaacgtttctgcatttttagattatcttaacggtaatattaatgggcttgttttaggagcaaatggagacggtatagctgaaacaaaacaagccagagtatcaatagatggtaccgtacatcccttgttgcaagaaaggctgcttcatgactttttaggaattaacagaaaattagataaagaaatacattctaatggtgcagttgattttatttggaatcctccatatataccaggaaatagattgggagaaaatgggacaccaaataattgggaaccagaagcccatattgaagcgtttttaaaccctttagttgataatcaatacgttacaaaagaagttataggagaagatacatcaggaaaatataatgtgtacaaatttacgtttgaaccacaaaattacaataaaacgttacttattacttcatgtatacacggtaatgaaactactggattttttgatatgtgccatatactcaatctattggtcaatcaatgggaaaagtatcctcaattaacttacttaagaaaaaatgtacgtttaatttatgttcctatggttaacccgtggggattcgcaaatcaagaaagagagaatgtgaacaatgtagatttaaacagaaattttgattataactggaaggcaggtaaagggacagatcctgataaatctaacttcaaaggtaaaagtcctttttctgaaaaagaatcacaaaatatgcgtagcttagttcaaagtatagataatttaactgctcacttagatttgcatgatattatttcagtaaataatgattactgtttattttatccgcgttgggccaatcaaaaaaataataatatgactcatcttattaacaatttaaaaagtaacggagacctcgttgtttggggttccagtacattatcatcttttagtaattgggtaggaatccgaaataaaacaacgtcatatctttcagaaataaatgaaaaacgtgtcggtgaaaagaaaagtcccgaagaaatgagacgttcagtacgctgggtaggtaatgtaatttttagaatggcacaatttgaatcttatcaaaatggtcaaacatcattagatcctttcattaaagtgatggtatatgatgatagatttaacaataaaacatctgaagtcattaccctacgtgcagaaaggaatgaatggcaacgtataatgatgagtcagcagcgtttcaaagttttagcaaatggatttgtagagctctatggatatgtgactataaacgttgatagagatgtcacagtggggattaatcctaatattgttcagaattatcatccattctttggatttaataaaagtagaaaacgtaatttattttcaattgaacatagactcaacaaaggaaatacaactttccctatttacgctgctgctggagttcaaatgtcgacgattactgaaccaggtacaaaacgtactgatacagtaatgccggtactagatgttaagaaaaaaggtgctggtattgtaacaatcaaacaaattaaattatttgcgaagttcactcctacgcattctgctaattccattcagatattaaaatctggagaatattatttttatttttttctaacgctttgcgatattgctcatcattatcccacatttcttgaatttgtggttctttattcggtaagccacctctcatag

SEQ ID NO: 2614 - protein, 621 aa, Artificial Sequence
  Description of Artificial Sequence: synthetic amino acid sequence
MLLTLDFPIQIGHTFRTKMINNFRTILNYYNELDHQHRAHTETKHHAHQAMQVDYRNTNVSAFLDYLNGNINGLVLGANGDGIAETKQARVSIDGTVHPLLQERLLHDFLGINRKLDKEIHSNGAVDFIWNPPYIPGNRLGENGTPNNWEPEAHIEAFLNPLVDNQYVTKEVIGEDTSGKYNVYKFTFEPQNYNKTLLITSCIHGNETTGFFDMCHILNLLVNQWEKYPQLTYLRKNVRLIYVPMVNPWGFANQERENVNNVDLNRNFDYNWKAGKGTDPDKSNFKGKSPFSEKESQNMRSLVQSIDNLTAHLDLHDIISVNNDYCLFYPRWANQKNNNMTHLINNLKSNGDLVVWGSSTLSSFSNWVGIRNKTTSYLSEINEKRVGEKKSPEEMRRSVRWVGNVIFRMAQFESYQNGQTSLDPFIKVMVYDDRFNNKTSEVITLRAERNEWQRIMMSQQRFKVLANGFVELYGYVTINVDRDVTVGINPNIVQNYHPFFGFNKSRKRNLFSIEHRLNKGNTTFPIYAAAGVQMSTITEPGTKRTDTVMPVLDVKKKGAGIVTIKQIKLFAKFTPTHSANSIQILKSGEYYFYFFLTLCDIAHHYPTFLEFVVLYSVSHLS

SEQ ID NO: 2615 - DNA, 309 bp, Artificial Sequence
  Description of Artificial Sequence: synthetic nucleic acid sequence
gtgactaaagcttctaaagattttgtagtaaacattaacatatgtcctccgaatagatcttggatagcatttgtaatcagtactccaggtacaatcggcatgaccgctgcaatgataattgtagctaaatctccgctaggaacaaatgcatgtccaattacagaaataatacctattaccaaagaacctatgaattctggaataaattgtgcgtgtagctttcgatctaatatttctactactaagtatccaatcgttccagctaatacagctgtgatgatatcaaccagacgacctccctgtagatag

SEQ ID NO: 2616 - protein, 102 aa, Artificial Sequence
  Description of Artificial Sequence: synthetic amino acid sequence
VTKASKDFVVNINICPPNRSWIAFVISTPGTIGMTAAMIIVAKSPLGTNACPITEIIPITKEPMNSGINCACSFRSNISTTKYPIVPANTAVMISTRRPPCR

SEQ ID NO: 2617 - DNA, 990 bp, Artificial Sequence
  Description of Artificial Sequence: synthetic nucleic acid sequence
atggctgatttattatctgtattacaagacaaattatccgggaaaaatgtaaaaatagtattacctgaaggtgaagatgaacgagtgctcattgctgcgactcagctacaaaaaactgactatgtttcacctatcgttctaggaaacgaagataatattaaatctcttgcttctaaacacgctttagatttaactcaaattgaaatcatagatccagcaacgagtgaacttaaagatgagcttgtagatgcttttgttgaaagacgtaaaggtaaggcaactaaagaacaagcagttgaattattagataatgtaaattatttcggaacaatgcttgtgtatactggaaaggctgaaggtttagtgagtggtgctgcacattctactggagatacagtcagaccagcattacaaattatcaaaactaaacctggtgtatctagaacatctggtattttctttatgattaaaggcgacgaacaatatatttttggagattgtgcgattaatccagaattagatgctcaaggacttgctgaaattgcagtagagagtgctaaatcagcacaaagctttggaatggaccctaaagtagctatgttaagcttttctacaaaaggttctgctaaatcggatgatgttactaaagtgcaagaagcattgaagttagctcaagaaaaagctgaagcagatcaattagatcatgtagttattgatggagaattccaatttgacgctgctattgttcctagcgtagcagagaagaaagcacctggtgcaaaaattcaaggtgatgcaaatgtattggttttccctagtctagaagcaggtaatattggttataagattgctcaacgtttaggtggatacgatgcagtaggaccagtcctacaaggattaaactctccagtcaatgatttatctcgtggttgctcaactgaagacgtttataacttatctattattacagctgctcaagctttacaataa

SEQ ID NO: 2618 - protein, 329 aa, Artificial Sequence
  Description of Artificial Sequence: synthetic amino acid sequence
MADLLSVLQDKLSGKNVKIVLPEGEDERVLIAATQLQKTDYVSPIVLGNEDNIKSLASKHALDLTQIEIIDPATSELKDELVDAFVERRKGKATKEQAVELLDNVNYFGTMLVYTGKAEGLVSGAAHSTGDTVRPALQIIKTKPGVSRTSGIFFMIKGDEQYIFGDCAINPELDAQGLAEIAVESAKSAQSFGMDPKVAMLSFSTKGSAKSDDVTKVQEALKLAQEKAEADQLDHVVIDGEFQFDAAIVPSVAEKKAPGAKIQGDANVLVFPSLEAGNIGYKIAQRLGGYDAVGPVLQGLNSPVNDLSRGCSTEDVYNLSIITAAQALQ

SEQ ID NO: 2619 - DNA, 768 bp, Artificial Sequence; identical to SEQ ID NO: 913
  Description of Artificial Sequence: synthetic nucleic acid sequence

SEQ ID NO: 2620 - protein, 255 aa, Artificial Sequence; identical to SEQ ID NO: 914
  Description of Artificial Sequence: synthetic amino acid sequence

SEQ ID NO: 2621 - DNA, 789 bp, Artificial Sequence
  Description of Artificial Sequence: synthetic nucleic acid sequence
atgaatccaataaaaattttgaaaaaggagcgaataataatgagtgaagcagcagaaactttagatggttggtatagcttacatttattttatgcagtagactggacaacttttcgtttaattgctgaagatgatcgtgaagcaatgattactgaattggaaacatttattaaagataaaacagttgctagagaatcacatcaaggtgatcatgcaatttataacattacaggtcaaaaagcggaccttttactatggtttttacgtccagaaatgaaagagttaaatcaaattgaaaatgagtttaataaattacgtatcgcagactatctcattccaacttattcctatgtgtcagtgatagaattaagtaattatttagcaggcaaatctgatgaggatccttatgaaaatccccacgttaaggcacgattataccctgaattaccacattctgaatatatatgtttctatccaatggataaacgacgcaatgaaacttataactggtatatgttacctatcgaagaccgtaaaactttaatgtataaccatgggatgataggtcgtaaatatgctggtaaaatcaaacagtttattacaggttcagtaggttttgatgactatgagtggggtgttacattattttcaaatgatgtacttcaattcaaaaaaattgtctatgaaatgcgttttgatgaaacgactgctcgttatggcgaatttggtagtttctatattggtcacattctaaacatcgaagacttcaaacaattttttagtatataa

SEQ ID NO: 2622 - protein, 262 aa, Artificial Sequence
  Description of Artificial Sequence: synthetic amino acid sequence
MNPIKILKKERIIMSEAAETLDGWYSLHLFYAVDWTTFRLIAEDDREAMITELETFIKDKTVARESHQGDHAIYNITGQKADLLLWFLRPEMKELNQIENEFNKLRIADYLIPTYSYVSVIELSNYLAGKSDEDPYENPHVKARLYPELPHSEYICFYPMDKRRNETYNWYMLPIEDRKTLMYNHGMIGRKYAGKIKQFITGSVGFDDYEWGVTLFSNDVLQFKKIVYEMRFDETTARYGEFGSFYIGHILNIEDFKQFFSI

SEQ ID NO: 2623 - DNA, 651 bp, Artificial Sequence
  Description of Artificial Sequence: synthetic nucleic acid sequence
atggcacgtattgctacaaaattgggctatcctgaaagtaatagtttcgtgactaatactgtaattgaatttgttttacataatgaagcatatcctcggttgtatagaattaaaactcgagatacgaacttaataaaaatttctcaagctaatgaaatctcacgtcaaattacaaatggcacaatgacgcttgaagaagctaagtatcaattagaggaaatatatgttgctaaaagagatagcagtctcccttttaaaggaattgccgcagcaattatcgctacgagcttcctctatctacagggaggtcgtctggttgatatcatcacagctgtattagctggaacgattggatacttagtagtagaaatattagatcgaaagctacacgcacaatttattccagaattcataggttctttggtaataggtattatttctgtaattggacatgcatttgttcctagcggagatttagctacaattatcattgcagcggtcatgccgattgtacctggagtactgattacaaatgctatccaagatctattcggaggacatatgttaatgtttactacaaaatctttagaagctttagtcaccgcctttggtataggcgctggtgtaagttcaatattaattttagtctag

SEQ ID NO: 2624 - protein, 216 aa, Artificial Sequence
  Description of Artificial Sequence: synthetic amino acid sequence
MARIATKLGYPESNSFVTNTVIEFVLHNEAYPRLYRIKTRDTNLIKISQANEISRQITNGTMTLEEAKYQLEEIYVAKRDSSLPFKGIAAAIIATSFLYLQGGRLVDIITAVLAGTIGYLVVEILDRKLHAQFIPEFIGSLVIGIISVIGHAFVPSGDLATIIIAAVMPIVPGVLITNAIQDLFGGHMLMFTTKSLEALVTAFGIGAGVSSILILV

SEQ ID NO: 2625 - DNA, 1095 bp, Artificial Sequence
  Description of Artificial Sequence: synthetic nucleic acid sequence
atgggtggcggacaatatagtgcaaatttcagtattagacaaattatttattatattttcggagctattattgcatttttaattatgataatttcaccgaaaaaaattaaaaataatacttatattttatacagtatattttgcgttctattaatagggttacttattttacctgaaacttcaatcaccccaattattaatggtgctaaaagttggtacagtttcggtcctataagcatccaaccttccgaattcatgaaaattatacttatacttgctttggctaaaacgatatctaaacataaccaatttacatttaataagtcttttcagtctgatttaatgttattttttaaaattttaggtgtatccattatacctatggcattaattctattgcaaaatgacctaggtactactttggtgttatgtgcaattatagctggcgtcatgttagtaagtggaataacatggaggatattagcccctctttttattgttgcatttgtaagtggttctagtattatattagctatcatttataaaccatccttaatagaaaacctattaggaataaaaatgtatcaaatgggacgtatcaattcttggttagatccctattcatacagtagtggagatggatatcacttaacagaatctttaaaagctattggttcaggtcaattattaggtaaaggttataaccatggcgaagtttatattcctgagaatcataccgactttattttttcagtgattggagaagaaatgggctttataggttcagtattattgatattacttttcttattcttaatatttcaccttatacggttagctagtaaaattgatagtcagtttaacaaagtatttatcataggatatgtatcgttgattgtttttcacgtgttacaaaatatcggcatgacggttcaattattaccgattacaggtataccacttccgtttattagttacggtggaagttctttatggagtttaatgactggtataggagtagttctttcaatttattatcatgaaccccaaagatatgaaataaccacattatctaaaaaatctaatacaatttaa

SEQ ID NO: 2626 - protein, 364 aa, Artificial Sequence
  Description of Artificial Sequence: synthetic amino acid sequence
MGGGQYSANFSIRQIIYYIFGAIIAFLIMIISPKKIKNNTYILYSIFCVLLIGLLILPETSITPIINGAKSWYSFGPISIQPSEFMKIILILALAKTISKHNQFTFNKSFQSDLMLFFKILGVSIIPMALILLQNDLGTTLVLCAIIAGVMLVSGITWRILAPLFIVAFVSGSSIILAIIYKPSLIENLLGIKMYQMGRINSWLDPYSYSSGDGYHLTESLKAIGSGQLLGKGYNHGEVYIPENHTDFIFSVIGEEMGFIGSVLLILLFLFLIFHLIRLASKIDSQFNKVFIIGYVSLIVFHVLQNIGMTVQLLPITGIPLPFISYGGSSLWSLMTGIGVVLSIYYHEPQRYEITTLSKKSNTI

SEQ ID NO: 2627 - DNA, 327 bp, Artificial Sequence
  Description of Artificial Sequence: synthetic nucleic acid sequence
atgattttctttatcattaactttattcttatttcatatttgtacgataaacaatatgtaccttttcaagcaattaccggtataagcttgttttattgcttagttatatttccaataacactcattttatatgtgcgtattgccaaaaaaaattatctatacagtaataagtatgaaatgagaactggaataatcattggtattattgctttaattctagtaattatgcaagggtttcactttaactgggctatagatttttttaataatgttgtatggtggtcatttaaaagtaccatctcaattgatagacgaatcgcaacatag

SEQ ID NO: 2628 - protein, 108 aa, Artificial Sequence
  Description of Artificial Sequence: synthetic amino acid sequence
MIFFIINFILISYLYDKQYVPFQAITGISLFYCLVIFPITLILYVRIAKKNYLYSNKYEMRTGIIIGIIALILVIMQGFHFNWAIDFFNNVVWWSFKSTISIDRRIAT

SEQ ID NO: 2629 - DNA, 357 bp, Artificial Sequence
  Description of Artificial Sequence: synthetic nucleic acid sequence
atgccagaaaatattgtaagaacaaaagggattgtatggttagcgcagtataatgatgtagcgtgtttgttatcacaggctggttcatcttgtaatattcaccccgttacatactgggtggcaacaatgagtgaaagtcaacagcaagctattttggaggcgcgtcaagatgtagtagaagattgggatatcgaatatggagatcgtcaaacgcaatttgtaattattggtacggatttagatcaagaaaaaatttcccgggaattagatgcatgcttaattcatagtagtgagattgatgaagattggcgattactagatagtccgtatcaatggacttatgatcgacgaatgtaa

SEQ ID NO: 2630 - protein, 118 aa, Artificial Sequence
  Description of Artificial Sequence: synthetic amino acid sequence
MPENIVRTKGIVWLAQYNDVACLLSQAGSSCNIHPVTYWVATMSESQQQAILEARQDVVEDWDIEYGDRQTQFVIIGTDLDQEKISRELDACLIHSSEIDEDWRLLDSPYQWTYDRRM

SEQ ID NO: 2631 - DNA, 1470 bp, Artificial Sequence
  Description of Artificial Sequence: synthetic nucleic acid sequence
atgttttttattacacttgtcattgctatactgagtggattaatatttttgaatcatcgagttcccattcaatatattaaatttcatatatatttacttgttttacctatcattacgggattaagtggattaatatttttcggtgaaagggcgaatgttggaccttttgtagttgatcatcttacttggttaatgatgacatttattttgactttaggctttatcattcaaaagttttctatgcgttatttaattggcgacatgcattaccgtaaatattttccgttttttacattaattactgcatttgcttcattggcatggttaagtggagacttaaggttaatgaccatgttttggggtgcaacattatttgtgttaacacggctcattaaagttaacaaattatggaaggtgcctagggaagcagcaagaatttcagcttggtcatttatattggcatggttgtcgttattgattgctgtcattttattgtatatcgctacaggagattggtatatttattcgaatatgtcagatgataatgcaatcaattatggaatgcgtctctgtatcaatttacttattgttttagctgtgattattccggcggcacaatttccatttcaaggctggcttattgaatctgtagctgcgcctacgccagtttcagctattatgcacgctggtattgttaatgctggtggcgttattcttacacgcttttctccggtatttaatgacgaaatagccatttcactgttattaattattgcaagtatttcagtattgttgggttctggaatcagtcttgtgcatgttgattacaagagacaacttgtaggttctacgataagtcaaatgggttttatgttagtacaatgtgcgcttggggcatattctgcggcgatagtacatttaatattgcatggtgtgtttaaagcgacattatttctacaatcgggttctgttgttaaaagatttaacattcctacgcctccatctgttaaaaaatcatatggctggcttgtatttggtcgtctactagctattcttatagcgataatattttggttgaatagtgatagacatgcatatgatgtattaagcgctcttatattagcttggtcgttaatggtgtcatggaatcaattagttgcttttagtcatggactcatcggaagagtcatcggagtatgtatgattattgttgtagtaattgtttatattattacgcatcattatttcttcacgacattaagtaacgttgatattcatattgtttcaccaccactcataagtattattctatcgattgctattatagttttcggcagtatgttaagcatatgggtatcacggcgaagagaatcaaaggcatttgcgaagttatacttgtggcttattaaagtaggagaggctaaaacccaatctatagaaagtcatccatcatatttaaaacgattttag

SEQ ID NO: 2632 - protein, 489 aa, Artificial Sequence
  Description of Artificial Sequence: synthetic amino acid sequence
MFFITLVIAILSGLIFLNHRVPIQYIKFHIYLLVLPIITGLSGLIFFGERANVGPFVVDHLTWLMMTFILTLGFIIQKFSMRYLIGDMHYRKYFPFFTLITAFASLAWLSGDLRLMTMFWGATLFVLTRLIKVNKLWKVPREAARISAWSFILAWLSLLIAVILLYIATGDWYIYSNMSDDNAINYGMRLCINLLIVLAVIIPAAQFPFQGWLIESVAAPTPVSAIMHAGIVNAGGVILTRFSPVFNDEIAISLLLIIASISVLLGSGISLVHVDYKRQLVGSTISQMGFMLVQCALGAYSAAIVHLILHGVFKATLFLQSGSVVKRFNIPTPPSVKKSYGWLVFGRLLAILIAIIFWLNSDRHAYDVLSALILAWSLMVSWNQLVAFSHGLIGRVIGVCMIIVVVIVYIITHHYFFTTLSNVDIHIVSPPLISIILSIAIIVFGSMLSIWVSRRRESKAFAKLYLWLIKVGEAKTQSIESHPSYLKRF

SEQ ID NO: 2633 - DNA, 894 bp, Artificial Sequence
  Description of Artificial Sequence: synthetic nucleic acid sequence
atgcttcaatcagatatcaatgaattagtcaatcaggctaaacgtgtaattacacctttatcaccgatttcaacatttgctgcccgtaatccgtgggaggggctagaagatgcttcgtttgatcaagtggcacgttggttaaaaagtgtgagggatgttgacatttatcctaatgcgtctactattcacagagcgattagtaataaagaaatagatttaaaagtatttgaagaacggttggatgaaaatcgtgcgcattataataataggtcactatctgacagtgatatcaacacatatattcaaagagcgaaaaatttaaaaacgattgaagaaggttactttaatacaaaagataacgagaaactggaaaaatgggtacaaactaattttaaggattataagaaaaaagaagatgtgatagcgcaaagtgctagtgttttcacaaaggaaggtacacgacttattgatattttaaatgctcatatgattaagtggtctaaattatatgttgatgactttcaatcaagttggactatgccaaaaagagaaaaaggattctatcatgcctggcaacgtttagttaaacatgatccattattcacaaaaaaacaacgacttactttagcacatttgccaaatcaagcaaccgaagcaatagagtacgcctttcaagaattaggagtaaaagaagaacatcgacaatcatatattgagagtcatttattatctttaccaggttgggcaggaatcatgtatcatcggtcacagacacaaagtaatgatgcgtacttattaacagactatgttgcgattcgtctatcaattgagatggtacttttaaatgaccaccatacaacattattaaaaaaatctatagcccagttaaagtga

SEQ ID NO: 2634 - protein, 297 aa, Artificial Sequence
  Description of Artificial Sequence: synthetic amino acid sequence
MLQSDINELVNQAKRVITPLSPISTFAARNPWEGLEDASFDQVARWLKSVRDVDIYPNASTIHRAISNKEIDLKVFEERLDENRAHYNNRSLSDSDINTYIQRAKNLKTIEEGYFNTKDNEKLEKWVQTNFKDYKKKEDVIAQSASVFTKEGTRLIDILNAHMIKWSKLYVDDFQSSWTMPKREKGFYHAWQRLVKHDPLFTKKQRLTLAHLPNQATEAIEYAFQELGVKEEHRQSYIESHLLSLPGWAGIMYHRSQTQSNDAYLLTDYVAIRLSIEMVLLNDHHTTLLKKSIAQLK

SEQ ID NO: 2635 - DNA, 876 bp, Artificial Sequence
  Description of Artificial Sequence: synthetic nucleic acid sequence
gtgatggtgaatacattgtcagatgtaaacaacacagataattatggtgctggacagatacaagttttagaaggtctcgaagcggttcgtaaaagaccgggtatgtatattggttcaacttcagaaagagggttgcaccatttagtatgggaaattgttgataatagtattgacgaggcattagcaggttatgctagtcatattgaagttgtaattgagaaagacaattggattaaagttactgacaatggccgtggtattcctgttgatattcaagaaaagatgggacgccctgctgtcgaagttatcttaactgtacttcacgctggaggtaaattcggaggtggcggatacaaagtatctggcggtcttcacggtgttggatcttcagttgttaatgcactctcacaagatcttgaagtttatgtacatcgtaatggcacgatttatcatcaagcctataaacaaggtgtgccacaatttgatcttaaagaaattggcgatacagataaaacaggtacagctattcgattcaaagccgataaagaaatctttacagagacaacagtttataactatgaaacacttcaaaagcgtatacgtgagcttgctttcttaaataaaggtattcaaattactttaaaagatgaaagagaagaggaagttagagaagactcatatcattatgaaggcgggattaaatcctatgtagatttattaaatgagaataaagaacctcttcacgatgaacctatatatatccatcagtctaaagacgatattgaagtggaaattgcacttcaatataacagtggatatgcaaccaacttattaacgtatgcgaataatattcatacatacgagggtggtattcaa

SEQ ID NO: 2636 - protein, 292 aa, Artificial Sequence
  Description of Artificial Sequence: synthetic amino acid sequence
VMVNTLSDVNNTDNYGAGQIQVLEGLEAVRKRPGMYIGSTSERGLHHLVWEIVDNSIDEALAGYASHIEVVIEKDNWIKVTDNGRGIPVDIQEKMGRPAVEVILTVLHAGGKFGGGGYKVSGGLHGVGSSVVNALSQDLEVYVHRNGTIYHQAYKQGVPQFDLKEIGDTDKTGTAIRFKADKEIFTETTVYNYETLQKRIRELAFLNKGIQITLKDEREEEVREDSYHYEGGIKSYVDLLNENKEPLHDEPIYIHQSKDDIEVEIALQYNSGYATNLLTYANNIHTYEGGIQ

SEQ ID NO: 2637 - DNA, 1215 bp, Artificial Sequence
  Description of Artificial Sequence: synthetic nucleic acid sequence
gtggatgatgtgacaaaatatggtccagttgatggagatccgatcacgtcaacggaagaaattccattcgacaagaaacgtgaattcaatcctgatttaaaaccaggtgaagagcgtgttaaacaaaaaggtgaaccaggaacaaaaacaattacaacaccaacaactaagaacccattaacaggggaaaaagttggcgaaggtgaaccaacagaaaaaataacaaaacaaccagtagatgaaatcacagaatatggtggcgaagaaatcaagccaggccataaggatgaatttgatccaaatgcaccgaaaggtagccaagaggacgttccaggtaaaccaggagttaaaaaccctgatacaggcgaagtagtcacaccaccagtggatgatgtgacaaaatatggtccagttgatggagatccgatcacgtcaacggaagaaattccattcgacaagaaacgtgaattcaatcctgatttaaaaccaggtaaagagcgcgttaaacagaaaggtgaaccaggaacaaaaacaattacaacaccaacaactaagaacccattaacaggggaaaaagttggcgaaggtgaaccaacagaaaaagtaacaaaacaaccagtagatgaaatcacagaatatggtggcgaagaaatcaagccaggccataaggatgaatttgatccaaatgcaccgaaaggtagccaagaggacgttccaggtaaaccaggagttaaaaatcctgatacaggcgaagtagttactccaccagtggatgatgtgacaaaatatggtccagttgatggagatccgattacgtcaacggaagaaattccgtttgataaaaaacgcgaatttgatccaaacttagcgccaggtacagagaaagtcgttcaaaaaggtgaaccaggaacaaaaacaattacaacaccaacaactaagaaccctatggcgaagaaatctaaaatagcaaaagaacaaaaaagacaagaattagtaaataaatattacgagttacgtaaagaattaaaagcaaaaggggactatgaagcattaagaaagttgccaagagattcatctccaactagattaactagaagatgtaaagtaactggtagacctagaggtgtgttacgtaaatttgaaatgtctagaattgcatttagagaacatgcgcataaaggtcaaattccaggtgtaaaaaaatctagttggtaa

SEQ ID NO: 2638 - protein, 404 aa, Artificial Sequence
  Description of Artificial Sequence: synthetic amino acid sequence
VDDVTKYGPVDGDPITSTEEIPFDKKREFNPDLKPGEERVKQKGEPGTKTITTPTTKNPLTGEKVGEGEPTEKITKQPVDEITEYGGEEIKPGHKDEFDPNAPKGSQEDVPGKPGVKNPDTGEVVTPPVDDVTKYGPVDGDPITSTEEIPFDKKREFNPDLKPGKERVKQKGEPGTKTITTPTTKNPLTGEKVGEGEPTEKVTKQPVDEITEYGGEEIKPGHKDEFDPNAPKGSQEDVPGKPGVKNPDTGEVVTPPVDDVTKYGPVDGDPITSTEEIPFDKKREFDPNLAPGTEKVVQKGEPGTKTITTPTTKNPMAKKSKIAKEQKRQELVNKYYELRKELKAKGDYEALRKLPRDSSPTRLTRRCKVTGRPRGVLRKFEMSRIAFREHAHKGQIPGVKKSSW

SEQ ID NO: 2639 - DNA, 921 bp, Artificial Sequence; identical to SEQ ID NO: 573
  Description of Artificial Sequence: synthetic nucleic acid sequence

SEQ ID NO: 2640 - protein, 306 aa, Artificial Sequence; identical to SEQ ID NO: 574
  Description of Artificial Sequence: synthetic amino acid sequence

SEQ ID NO: 2641 - DNA, 684 bp, Artificial Sequence
  Description of Artificial Sequence: synthetic nucleic acid sequence
atgtctcaatcatctaagcgaaaaaacgattctgtggtagaaacttttaaggacatcattcctttaacatttggagaagagattggtaatgcagcatcacatggtgctgctgcattacttacattatttattcttccatatgcagcagtgcatagttttaacaatggtggcacattagagtcaattagtgtgtcagtttatgtgattagtatttttatgatgttcatatcatcaaccatttatcattcaatgcaaaataatacgtctcataaatatatattaaggattattgaccatagtatgatttatgtggctatttcaggaacatacacacctgttttgttaagtgttgtcggcggttggttaggttggctcgtgacaatattattatggggaacgacattatgggggattttgtataaatcaatagcaactaaagtcaatcatagattaagtctcattgtttatttggtgatgggatgggtaggtatcatatttttacctattattattatgcgaacatcatggtggtttattttctttatatttcttggtgggttatcttatactatcggagcatggttttatgcccaaaaaaataaaccttattttcatatgatttggcatatatttattgttcttgcttctttcttacatatgataggcattttttattttatgtga

SEQ ID NO: 2642 - protein, 227 aa, Artificial Sequence
  Description of Artificial Sequence: synthetic amino acid sequence
MSQSSKRKNDSVVETFKDIIPLTFGEEIGNAASHGAAALLTLFILPYAAVHSFNNGGTLESISVSVYVISIFMMFISSTIYHSMQNNTSHKYILRIIDHSMIYVAISGTYTPVLLSVVGGWLGWLVTILLWGTTLWGILYKSIATKVNHRLSLIVYLVMGWVGIIFLPIIIMRTSWWFIFFIFLGGLSYTIGAWFYAQKNKPYFHMIWHIFIVLASFLHMIGIFYFM

SEQ ID NO: 2643 - DNA, 1338 bp, Artificial Sequence
  Description of Artificial Sequence: synthetic nucleic acid sequence
atgaatcttaagtctatcattactgtaatggcactcatactaataatgtttatggcagctatagaaacatctattatttcattagcattaccaacaataaaaaatagtttgaatgccggtaatctagtttcattagtatttaccgtatattttattgctttagtcatagctaaccctatcgttggtgaacttatgtctagatttaaaattatttacattgctgttgtaggggtattattgtttgccttaggtagtttaatgtcgggattaagtcagacgtttacttttttaattatctctcgaacagtacaaggttttggagcaggagttatgatgtcactctcacaaatagttcctaagttggcttttgaaattcctttgagatataaaattatgggtatagttggaagtgtttggggaatttcgagtattattggcccattattaggtggtgcgattttagagtttgcttcatggcattggctattctatatcaatattcctattgctatagtggcaataatacttgtacttatgacttttcattttcctgatgagacacaagtacaacagagtcgttttgatataaaaggattgattatcttttatatctttatagctttattaatgtttggtttactcaaccaacatcatattatttttaacatattctcaattattttagctttagctgttttatggctactatttaaaatagaaaatagtatcgaacaaccatttcttccaacaaaagaatttaacatatcaatagttctagtttttataacggatttacttattgcgataacactgatgggatataatttatatataccagtatatttacaagaaaaacttagtttatcacctttacaaagtggatttgtaatattcccgttgtctgttgcttggattacgcttaatttcaatttagctaaaatagaagcgcattttactagaaaaacattatatatttgctcattttttgttttattagttagtagtctgatgataatgtttggcttaaaactcccattgcttattgcttttgcggttgtttttgcaggtttaagttttggttatatttatacaaaagatagtgttattgtccaagaggaaacttctccaaaaaatatgaaaaagatgatgtcattttatgcattgacaaaaaatttaggttcgtcagtcggatctacgattatgggctatatgtatgcactaaatgttggtttatttggttctaatttacacaatgtattaggattagtcttaataattgcagtatgtttaattgtaatgtggatgacattatataaaagcaatactattcaatcttag

SEQ ID NO: 2644 - protein, 445 aa, Artificial Sequence
  Description of Artificial Sequence: synthetic amino acid sequence
MNLKSIITVMALILIMFMAAIETSIISLALPTIKNSLNAGNLVSLVFTVYFIALVIANPIVGELMSRFKIIYIAVVGVLLFALGSLMSGLSQTFTFLIISRTVQGFGAGVMMSLSQIVPKLAFEIPLRYKIMGIVGSVWGISSIIGPLLGGAILEFASWHWLFYINIPIAIVAIILVLMTFHFPDETQVQQSRFDIKGLIIFYIFIALLMFGLLNQHHIIFNIFSIILALAVLWLLFKIENSIEQPFLPTKEFNISIVLVFITDLLIAITLMGYNLYIPVYLQEKLSLSPLQSGFVIFPLSVAWITLNFNLAKIEAHFTRKTLYICSFFVLLVSSLMIMFGLKLPLLIAFAVVFAGLSFGYIYTKDSVIVQEETSPKNMKKMMSFYALTKNLGSSVGSTIMGYMYALNVGLFGSNLHNVLGLVLIIAVCLIVMWMTLYKSNTIQS

SEQ ID NO: 2645 - DNA, 882 bp, Artificial Sequence
  Description of Artificial Sequence: synthetic nucleic acid sequence
atgccaagttcaatgttgcatgagcatggatggagcggtatcaatttcaattcaccatttgcagatatggcaattttattaggtcttaactggttagcaatattactttatatggaagcagttgtgtcaccgtttggtactggagtttcttttgttgccgttactggacgtgtgttacgcgctatggaagaaaatgggcatattcctaaattcttaggtaaaattaataaaaagtataatatcccacgtgttgccattgcatttaatgcaattatcagcatgattatggtgacattgttccgtgactggggtacactagctgcggttatttctactgcaacattagttgcatatttaactggtccaactacggttatttcattacgtaaaatggcaccaaaaatgactcgtccatttaaagctaatattttaaaatttatggcacctttatcctttgttttagcatcattagctatctattgggcaatgtggccaacaacagcagaagttattttaattattattttaggtttacctatttatttcttctatgaatataaaatgaattggaagaatactaaaaaacaaattggcggaagcttatggattattatctatcttattgttctcgcattcttatcatttattggaagtaaagagttcaaaggcttaaattggattcactatccatgggatttcttagtcattgtaatcgttgctttaatcttctatcaactaggtacgacaagttactttgaaagtatttatttcaagcgtgcgaacaagttgaataagaaaatgggcgataagttgcgtaaaacacgcaaaaaagcgcgtcataaagattggaaagaacgcgatcgacaagagcaaaatcaataa

SEQ ID NO: 2646 - protein, 293 aa, Artificial Sequence
  Description of Artificial Sequence: synthetic amino acid sequence
MPSSMLHEHGWSGINFNSPFADMAILLGLNWLAILLYMEAVVSPFGTGVSFVAVTGRVLRAMEENGHIPKFLGKINKKYNIPRVAIAFNAIISMIMVTLFRDWGTLAAVISTATLVAYLTGPTTVISLRKMAPKMTRPFKANILKFMAPLSFVLASLAIYWAMWPTTAEVILIIILGLPIYFFYEYKMNWKNTKKQIGGSLWIIIYLIVLAFLSFIGSKEFKGLNWIHYPWDFLVIVIVALIFYQLGTTSYFESIYFKRANKLNKKMGDKLRKTRKKARHKDWKERDRQEQNQ

SEQ ID NO: 2647 - DNA, 1368 bp, Artificial Sequence
  Description of Artificial Sequence: synthetic nucleic acid sequence
gtgtgttcaaacatggttcaagtcaagataggtaactgtaccatcaatggcttacacaaaaagaatattgatgtattcttaggtatcccgtatgccaaaccattcaataagatatctcgattccaacattcaaagtttatggaactaagcaaaccaatgattgatgcaactcatattcaatccatcccaccacaaccctacaattcacttgaagactttttttcgatgacagattcatcgtttaattcttttaaacaaaatgattattgcctgtttttaaatatttggaaaccatcgtccaatcaaaatcatttacctgtagtgatttacttttatggtggtagttttcttcaaggacatggcacagctgaactatattgtcctgaacacatagtagaacaagaaaatataatagtagttacttttaattatcgcttaggtgcactcggctacctagattggtcttattttaatcaacatttgaactataataatgggatttctgatcaaattaacgttttaagatgggtacatcaatatatcgaacattttggcggtgattcaaataacgtgacactaatgggtcaatctgcaggtagtatgagtatcatgacattaatgcaaatgcccgaacttgatgattattatcataaagtgatgttattaagtggaacgttaactactgatacaccactcaatgcacatactaaagtacaacatttttcacaactcatgaggcattattttcctaataaaacacttaagacacttaccagtgatgacattttatatctaatggagtctcaaaaaatagagcgtggaagatctcgtggacttgatttgatttatcaacctattaaagatcatcatatgtcacgatccattaaaaaatttcccaaaccgacattcatgagttatacacacgatgaaggtgatatttatattgaagacgcaacacgcaccttaccttctgaacgttttattcacttgatgtctcaatatggtacacacgtcgaaaaaaatgatgccctcacaatgaaacaacaaagaaatttaataacagagtattgttttgttcgtccaatttatctatttttaaatcaaatgaatagttgcgacacttggctagcacgttttgattggcaccaaccccatacctcctactttaaaagtgcatatcatatattggatttagtattttggtttggtcacctctctattttgactaaaaatcattattctataactcaacatgatatgaatttaagtagtaacatgatatctgacttagcttattttgcccgaaaaggtaagatgccatggaaatgttatgaacctcaacatcaagcgttacatatctatggataa

SEQ ID NO: 2648 - protein, 455 aa, Artificial Sequence
  Description of Artificial Sequence: synthetic amino acid sequence
VCSNMVQVKIGNCTINGLHKKNIDVFLGIPYAKPFNKISRFQHSKFMELSKPMIDATHIQSIPPQPYNSLEDFFSMTDSSFNSFKQNDYCLFLNIWKPSSNQNHLPVVIYFYGGSFLQGHGTAELYCPEHIVEQENIIVVTFNYRLGALGYLDWSYFNQHLNYNNGISDQINVLRWVHQYIEHFGGDSNNVTLMGQSAGSMSIMTLMQMPELDDYYHKVMLLSGTLTTDTPLNAHTKVQHFSQLMRHYFPNKTLKTLTSDDILYLMESQKIERGRSRGLDLIYQPIKDHHMSRSIKKFPKPTFMSYTHDEGDIYIEDATRTLPSERFIHLMSQYGTHVEKNDALTMKQQRNLITEYCFVRPIYLFLNQMNSCDTWLARFDWHQPHTSYFKSAYHILDLVFWFGHLSILTKNHYSITQHDMNLSSNMISDLAYFARKGKMPWKCYEPQHQALHIYG

SEQ ID NO: 2649 - DNA, 477 bp, Artificial Sequence
  Description of Artificial Sequence: synthetic nucleic acid sequence
atggaagacgtgacagatattgtctttcggcatgttgtcagtgaagctgcgagaccagatgtattttttactgaatttaccaatactgagagttactgtcaccctgaaggtattcatagtgtgcgcggacgcttaacttttagtgacgacgaacaaccaatggtagcgcacatctggggcgataaaccagaacaattccgagaaatgagtatcggcttagcggatatgggttttaaaggtatagatttaaatatgggttgccctgtcgcaaacgttgcgaaaaaaggtaaaggatccggcttaattctacgacctgaaacggcagccgaaatcattcaagcttctaaagcaggtggtctaccggtcagtgtaaaaacacgtttaggttattacgatatcgatgaatggcgagactggttaaaacacgtcttcgaacaagttaggtgcgcgctctggtttaatggcagagccaaatga

SEQ ID NO: 2650 - protein, 158 aa, Artificial Sequence
  Description of Artificial Sequence: synthetic amino acid sequence
MEDVTDIVFRHVVSEAARPDVFFTEFTNTESYCHPEGIHSVRGRLTFSDDEQPMVAHIWGDKPEQFREMSIGLADMGFKGIDLNMGCPVANVAKKGKGSGLILRPETAAEIIQASKAGGLPVSVKTRLGYYDIDEWRDWLKHVFEQVRCALWFNGRAK

SEQ ID NO: 2651 - DNA, 1404 bp, Artificial Sequence
  Description of Artificial Sequence: synthetic nucleic acid sequence
atgactgcgacgccattatattcagatatcgttttacctgctgcaacttggtatgaaaaacatgatttatcttctacagacatgcatccatttattcatccatttaacccagcgattgacccattatgggaatcgcgttcggactgggatatttataaaactctaagtaaagctgtttcagaaatggcgaaagattatcttccaggtaaatttaaagatgtcgtaactacaccattaggacatgattcaaaacaagaaatttcaactgaatacggtattgtaaaagattggtctaaaggagaaattgaaggtgtgccaggtaaaacaatgcctaatttttctatcgtagagcgagactatacacaaatttacgataaattcgttactgttggtccaaaactagaaaaagggaaaataggtgctcatggtgtgagttatagcgttagtgaagagtacgaagaacttaaaagtatagttggaacttggaatgatgataatactatttcagttaaaaatgatagaccgagaatagatacagcgagaaaagtagcagatgtcattttgaatatatcctctgctacaaacggcaaattatcacaaaagtcatatgaagatttagaaaatcaaacaggtatggaacttaaagatatttctaaagaacgtgcttctgaaaagatatcattcttaaacattacttctcaaccaagagaagtgattccaactgcagtattccctggctctaataaagatggaagacgctactcaccgtttacaactaatgttgaacgtttagtgccatttagaacactaactggacgtcaaagttattatatagatcatgaggtattccaacagtttggcgaaagtttaccggtatataaacctactttacctccaatggtatttggtgctcgtgataaaaaagttaaaggtggacaagatacattagtgcttcgataccttacacctcatggaaaatggaatattcattcaacttatcaagataatgaacgcatgttgacgttgtttagaggtggaccagttgtatggatttcaaatgaagacgcagctgaccatggtattaatgataacgactggttagaagtatacaacagaaacggagttgttactgccagagctgtaacatctcatcgtatgcctagaggcacaatgtttatgtatcatgcacaagataaacatatagagacacctggttctgaaattactgatactcgtggaggttctcataatgcacctactcgtattcacttgaaacctactcaattagtaggaggatatgcacaaattagttatcactttaactattatggaccaattggaaatcaaagagatgagtatgtagctgttagaaaaatgaaggaggtcaattggcttgaagattaa

SEQ ID NO: 2652 - protein, 467 aa, Artificial Sequence
  Description of Artificial Sequence: synthetic amino acid sequence
MTATPLYSDIVLPAATWYEKHDLSSTDMHPFIHPFNPAIDPLWESRSDWDIYKTLSKAVSEMAKDYLPGKFKDVVTTPLGHDSKQEISTEYGIVKDWSKGEIEGVPGKTMPNFSIVERDYTQIYDKFVTVGPKLEKGKIGAHGVSYSVSEEYEELKSIVGTWNDDNTISVKNDRPRIDTARKVADVILNISSATNGKLSQKSYEDLENQTGMELKDISKERASEKISFLNITSQPREVIPTAVFPGSNKDGRRYSPFTTNVERLVPFRTLTGRQSYYIDHEVFQQFGESLPVYKPTLPPMVFGARDKKVKGGQDTLVLRYLTPHGKWNIHSTYQDNERMLTLFRGGPVVWISNEDAADHGINDNDWLEVYNRNGVVTARAVTSHRMPRGTMFMYHAQDKHIETPGSEITDTRGGSHNAPTRIHLKPTQLVGGYAQISYHFNYYGPIGNQRDEYVAVRKMKEVNWLED

SEQ ID NO: 2653 - DNA, 646 bp, Artificial Sequence
  Description of Artificial Sequence: synthetic nucleic acid sequence
atggtattgaatctagacaaatgtattggttgtcatacttgcagtgtgacatgtaaaaacacatggacaaatcgacctggtgcagaatatatgtggtttaataacgtagaaacaaaaccgggtgtaggatatccaaaaagatgggaagaccaaggacaatataaaggtggttgggtgctaaataaaaaaggaaagcttgaattaaaatctggtaacagatggtcaaaaattgctttaggtaaaatcttctataatccagacatgccactcattcaagattattatgaaccgtggacatataactatgaacacttaaccaatgctaaacaaggacagcactctcccgtggcgacagctcactctttaatttcaggtgatagattgaatcttaaatgggggccaaactgggaagatgatttagctggaggtcacattacaggaccagaggatccaaatattcagaaaatagaagaagatattaaattccaattcgatgagacatttatgatgtatttaccaagactatgtgaacactgtttaaatccaagttgcgtagcatcttgtccatcaggagctatgtataaacgagatgaggatggtatcgtactcgtcgatcaagaagcctgtcgaggttggagatactgta

SEQ ID NO: 2654 - protein, 216 aa, Artificial Sequence
  Description of Artificial Sequence: synthetic amino acid sequence
  MOD_RES (216): variable amino acid
MVLNLDKCIGCHTCSVTCKNTWTNRPGAEYMWFNNVETKPGVGYPKRWEDQGQYKGGWVLNKKGKLELKSGNRWSKIALGKIFYNPDMPLIQDYYEPWTYNYEHLTNAKQGQHSPVATAHSLISGDRLNLKWGPNWEDDLAGGHITGPEDPNIQKIEEDIKFQFDETFMMYLPRLCEHCLNPSCVASCPSGAMYKRDEDGIVLVDQEACRGWRYCX

SEQ ID NO: 2655 - DNA, 624 bp, Artificial Sequence
  Description of Artificial Sequence: synthetic nucleic acid sequence
atggattatgtatacacaatttataaaaatcctagatataacatcattcaaaaagataatcgctatttaatggtcgatttagaacaaaattggtattcatatttatgtccaatgctgaattggtttatacctattaaattcacagaattaacttatcaagaattcaataatataaacatatttcataatggaggacaaaagagtcatggtatgatggctgctggcgttggcgtcactatcagtgtgctattaagaagtcttgtgggttatatagatattaatattagtcgaatttggatagtttttatgtttttaattggatttgttgctgtgatcacacttcgtttatctataagaaagaagttaaatcatccagcatttaataaaaagagtaaacaaaaagtaatattgataccatcatttaaaaatatgatattggtggtgttttgctattttatgatgctgtttttctcaattgcaccttttcaaatgatttttgaggaaaagaaaaacatcttaggatatatactttgggtaggtgtattatttatatttactactttgaatatggcttcaatttctgatagaaaagtacatgccaaaattaaaaatataagaagatag

SEQ ID NO: 2656 - protein, 207 aa, Artificial Sequence
  Description of Artificial Sequence: synthetic amino acid sequence
MDYVYTIYKNPRYNIIQKDNRYLMVDLEQNWYSYLCPMLNWFIPIKFTELTYQEFNNINIFHNGGQKSHGMMAAGVGVTISVLLRSLVGYIDINISRIWIVFMFLIGFVAVITLRLSIRKKLNHPAFNKKSKQKVILIPSFKNMILVVFCYFMMLFFSIAPFQMIFEEKKNILGYILWVGVLFIFTTLNMASISDRKVHAKIKNIRR

SEQ ID NO: 2657 - DNA, 378 bp, Artificial Sequence; identical to SEQ ID NO: 1135
  Description of Artificial Sequence: synthetic nucleic acid sequence

SEQ ID NO: 2658 - protein, 125 aa, Artificial Sequence; identical to SEQ ID NO: 1136
  Description of Artificial Sequence: synthetic amino acid sequence

SEQ ID NO: 2659 - DNA, 546 bp, Artificial Sequence
  Description of Artificial Sequence: synthetic nucleic acid sequence
atggattttattaatattacaggtgcttcacaaaataacttgaaaaacatagatgtaaatatcccaaaacacttagtaacggtatttacaggtcgttctggttcagggaaatcatctttagtgtttaatactgttgctgcggagtctgaacagctactaaatgaaagttattctagttatattcaatttcatttaaatcaacaacccagaccgaaagtaaagaaaattaaaaatcttcctgtagcaatgacgattaatcagaaaagattcaatgggaattctcgctccacggtaggaacagtttcagatatatatgcttctgttagattactgtggtctagaataggcgaaccgtttgttggttattcagatgcatattccttcaatagtcctaagggcatgtgtaaaacttgtgagggattaggatatattgaagacattaacttagatgaattgctagattgggataagtctttaaatgaaggtgcaatagactttccttcttttggaccagacaaagagcgtggtaaagcctatcgagatagt

SEQ ID NO: 2660 - protein, 182 aa, Artificial Sequence
  Description of Artificial Sequence: synthetic amino acid sequence
MDFINITGASQNNLKNIDVNIPKHLVTVFTGRSGSGKSSLVFNTVAAESEQLLNESYSSYIQFHLNQQPRPKVKKIKNLPVAMTINQKRFNGNSRSTVGTVSDIYASVRLLWSRIGEPFVGYSDAYSFNSPKGMCKTCEGLGYIEDINLDELLDWDKSLNEGAIDFPSFGPDKERGKAYRDS

SEQ ID NO: 2661 - DNA, 387 bp, Artificial Sequence
  Description of Artificial Sequence: synthetic nucleic acid sequence
atggctattgtaaataaggttattattgttgaaggtaaatcggataagaaaagagtacaacaagtaatcgctgaacctgcaaatatcatttgtacacatggcactatgagtatagataagatagacaacatgatagaaacactttatgacaaacaagtttatgttcttgccgattctgatgatgagggtgaaaaaattagaaaatggtttaaacgttatttaagcgaaagtgaacatatttatgttgataaaacgttttgtgaggttgctaagtgtcctaaaaattatttagcacatgtattaagtagatatggttttaatgtaaaaaaagaaaagaaacttatgaataatttaaaaactgaaaggctagttttagtaaatgaataa

SEQ ID NO: 2662 - protein, 128 aa, Artificial Sequence
  Description of Artificial Sequence: synthetic amino acid sequence
MAIVNKVIIVEGKSDKKRVQQVIAEPANIICTHGTMSIDKIDNMIETLYDKQVYVLADSDDEGEKIRKWFKRYLSESEHIYVDKTFCEVAKCPKNYLAHVLSRYGFNVKKEKKLMNNLKTERLVLVNE

SEQ ID NO: 2663 - DNA, 876 bp, Artificial Sequence
  Description of Artificial Sequence: synthetic nucleic acid sequence
atgatattgaattcaaaagttaaaggtattattgctatattgatttcagctgtgggttttagttttatgtcagtcttttttagattggccggtgatttaccagtctttcaaaaatctctagctagaaattttgtagccatgtttataccattattttttatttataaatataggcaacctatgtttggaaaattaagtagtcaacccctactcatctcacgttcaacacttgggttaattggtgtcttacttaatatctacgcaattgatcacatggtattaagtgatgctgatacattaatgaaattaaatcctttttggacaattgttcttagtttaatttttttacatgaaaaggtacgaaaatatcaaatcacggcgatgattattgctataatagggatgctattaattgttaaaccagaattttcatcatcagttattccttcaatagcaggattactatccggtatttttgcagcttctgcctacacatgtgttagagcactcagcactcgtgaaaaaccttatacgatagtgttttatttttcattattctcagttgtagttcttatacctttttcaatatttacttatacacctatgacaacaattcaaattcttttcttactcggcgctggattatcagcagctgtaggacaaattggtataacattggcttatagttttgctccagcaaaagatatctccatcttcacatatgcgtctataatatttactgcattatttggatttattctgtttggagaatcacctgatatgtttgcaacagtaggatatattgtcattatcggagcaagttactatatgtttgataaagcaagacgtgaaacaactataaatcaaaataattaa

SEQ ID NO: 2664 - protein, 291 aa, Artificial Sequence
  Description of Artificial Sequence: synthetic amino acid sequence
MILNSKVKGIIAILISAVGFSFMSVFFRLAGDLPVFQKSLARNFVAMFIPLFFIYKYRQPMFGKLSSQPLLISRSTLGLIGVLLNIYAIDHMVLSDADTLMKLNPFWTIVLSLIFLHEKVRKYQITAMIIAIIGMLLIVKPEFSSSVIPSIAGLLSGIFAASAYTCVRALSTREKPYTIVFYFSLFSVVVLIPFSIFTYTPMTTIQILFLLGAGLSAAVGQIGITLAYSFAPAKDISIFTYASIIFTALFGFILFGESPDMFATVGYIVIIGASYYMFDKARRETTINQNN

SEQ ID NO: 2665 - DNA, 1380 bp, Artificial Sequence
  Description of Artificial Sequence: synthetic nucleic acid sequence
atgagagcaatgcttattttttatatgtattttgcactccaggaaaacggacttggaatggacaaaacaacagccatgtctatcatgtctgtatatggatcattaatttatatgtcttcaattccaggtggctggatagctgatagaattacaggtacccgaggtgccacattaatcggagctatattaattattataggtcacatatgtttaagccttccttttgcaatggtaggtttattcacttctatgttctttattattgtaggatcaggtttaatgaaaccaaacatttcaaatattgttggtagactctatccagaaaacgacgtacgcatggatgctggatttgttatcttctatatgtcagtgaacatgggtgcactcgtttcaccaattattttacaacactatattgatattagaaatttccatggcggcttcttgattgcagcaatagggatggctcttggattagtttggtacttactatttaaccgaaaaactttgggtagtatcggtatgaaaccgacaaacccattatcttcttctgaaaagaaaaagtacggaacaatcatcggaatcgttgttatagcaatagtattaatccttatgattgcttactttacgcatacgctatcatttaatttaatcagtaatactgttttaattttaggtattgctttaccaatcatttactttacaacaatgattagaagtaaagaagttactgatactgaaagatcaagagtaaaagcatttattccgttattcattttaggcatgttattttggtcaattcaagaacaaggatctaatgtattaaatatctatggtattgaaaactctgatatgaaattaaatttatttggttggaaaacacattttggtgaagctattttccaaaccattaacccattatttattttattatttgcacccgtggttactcttttatggcaaaagctaggaaagaaacaacctagcctacctattaagtttgcaattggtactattttagcaggcgcatcctacatacttatgggagcaatcggtcatatttatggggatacacaattctcagttaactgggttattctttcatacgttatctgtgttattggtgagctttgtctctctccaactggtagtagtgcagcagttaaattagcacctaaggcatttaacgcacaaatgatgagcctttggttattaactaacgcttcagctcaggccattaacggtacattagttaaattaattaaaccacttggtcaaaccaattactttatcttcttaggtgttgttgcaaccgtgattacgttaattatattagcgtttattcctaagatttctaaagcaatgaaaggtattcgttaa

SEQ ID NO: 2666 - protein, 459 aa, Artificial Sequence
  Description of Artificial Sequence: synthetic amino acid sequence
MRAMLIFYMYFALQENGLGMDKTTAMSIMSVYGSLIYMSSIPGGWIADRITGTRGATLIGAILIIIGHICLSLPFAMVGLFTSMFFIIVGSGLMKPNISNIVGRLYPENDVRMDAGFVIFYMSVNMGALVSPIILQHYIDIRNFHGGFLIAAIGMALGLVWYLLFNRKTLGSIGMKPTNPLSSSEKKKYGTIIGIVVIAIVLILMIAYFTHTLSFNLISNTVLILGIALPIIYFTTMIRSKEVTDTERSRVKAFIPLFILGMLFWSIQEQGSNVLNIYGIENSDMKLNLFGWKTHFGEAIFQTINPLFILLFAPVVTLLWQKLGKKQPSLPIKFAIGTILAGASYILMGAIGHIYGDTQFSVNWVILSYVICVIGELCLSPTGSSAAVKLAPKAFNAQMMSLWLLTNASAQAINGTLVKLIKPLGQTNYFIFLGVVATVITLIILAFIPKISKAMKGIR

SEQ ID NO: 2667 - DNA, 924 bp, Artificial Sequence
  Description of Artificial Sequence: synthetic nucleic acid sequence
atgaaacaaccgtataaccatggtgttcttttctatcatgaacatagcggtttgaaagatatacataatggcataggagaagttgcaaaatctcttagttcaatgtgtaaacacctctctcttcaactcagtgaaaataaaggcgatattattaaatattgtaaatctattaaaaatgaaaattatagctctgatgtagacgttttatttattttaggtggagatggtacacttaatgaactagtaaatggcgttatgcagtatcagttaaatttaccaatcggtgtaataccaggtggtacctttaacgattttacaaaaacacttcaactgcaccctaattttaaaacagctagtgagcaattattaacatcacatgctgaatcatatgatgtgttaaaagtgaacgacttatatgtacttaatttcgttggacttggcttaatagtacaaaatgcagagaatgttcaagatggttctaaagatatattcggtaaattcagctatattggatcaaccgttaaaacgttattaaatcctgttaaatttgatttctcattgactgttgatggtgaaacaaaagaaggcaatacttcgatgatgttaatagcaaacggtcccaatataggtggtggacaaattccgctaaccgatttatcgccacaagatggaagagcaaacacatttgtatttaatgatcaaacactaaatatattgaatgatatattaaaaaaacgtgatagtatgaattggaacgaaatcacacaaggtattgatcacatatcaggtaagcacatcacactctcaacaaaccctagtatgaaagtggatattgatggcgaaattaatttagaaacaccaattgagattcaagtattacccaaagcgatacaacttcttactgcaactgaacaaaataattaa

SEQ ID NO: 2668 - protein, 307 aa, Artificial Sequence
  Description of Artificial Sequence: synthetic amino acid sequence
MKQPYNHGVLFYHEHSGLKDIHNGIGEVAKSLSSMCKHLSLQLSENKGDIIKYCKSIKNENYSSDVDVLFILGGDGTLNELVNGVMQYQLNLPIGVIPGGTFNDFTKTLQLHPNFKTASEQLLTSHAESYDVLKVNDLYVLNFVGLGLIVQNAENVQDGSKDIFGKFSYIGSTVKTLLNPVKFDFSLTVDGETKEGNTSMMLIANGPNIGGGQIPLTDLSPQDGRANTFVFNDQTLNILNDILKKRDSMNWNEITQGIDHISGKHITLSTNPSMKVDIDGEINLETPIEIQVLPKAIQLLTATEQNN

SEQ ID NO: 2669 - DNA, 315 bp, Artificial Sequence
  Description of Artificial Sequence: synthetic nucleic acid sequence
atgtttgtgaattatttcacaatatctaaggagtggttgtatatgttatctgtaactaaaaaaaatacatatgaatcaaacaaagatgaagtcacacaaatgattgattcattagcagaaaaaggacaagaagctctaaaagaactatctaaaaaatcacaacatgagattaatgacattgtacatcagatgagcatggctgctgttgatcagcatatgcatttagctaaactagcttacgacgaaacaggtagaggtatttatgaagacaaagctatcaaaaatttatatgcctcagagtacatatggaattca

SEQ ID NO: 2670 - protein, 105 aa, Artificial Sequence
  Description of Artificial Sequence: synthetic amino acid sequence
MFVNYFTISKEWLYMLSVTKKNTYESNKDEVTQMIDSLAEKGQEALKELSKKSQHEINDIVHQMSMAAVDQHMHLAKLAYDETGRGIYEDKAIKNLYASEYIWNS

SEQ ID NO: 2671 - DNA, 432 bp, Artificial Sequence; identical to SEQ ID NO: 53
  Description of Artificial Sequence: synthetic nucleic acid sequence

SEQ ID NO: 2672 - protein, 143 aa, Artificial Sequence; identical to SEQ ID NO: 54
  Description of Artificial Sequence: synthetic amino acid sequence

SEQ ID NO: 2673 - DNA, 975 bp, Artificial Sequence
  Description of Artificial Sequence: synthetic nucleic acid sequence
atggaacgattttgttgtgtaaatcaaattaactatattcaaatgaatccgttagaagccaaatttaaaacgagcgctctaagatcatggaaaactgatcaggcagatgctcataagcttgcttgtttaggaccgacgctcaaacaaacaggcagcttacctatacatgagttaatattctttgaattaagagaacgtgcccgttttcatctagaaatcgagaatgaacaaaatcgacttaaattttctttatgtttttctatttttactgagagaaataaagtggtgacacaagatttatatgactctatttctagagcatattattgtctcgttgatacacaagctaatcaaaatatgattgaacactacgcaggattgaacatgaatgatattaatcttttaagggtaacgccttttgatgcgaagtcattacctaaccaaagtagtcaattgtatgacacttatattggattatggatagatggtttggacgagattgaaatacgagagattgtaaacagcttatttcaatatattcaacataaagatggctataagttgaaaattttaactaagagtagagataatcttacggaaaatcttatagatgaagttgctcatctcaatgatttatatcaccaagagaaaaaggaaataagtgatgtaattgaagacgtgatacagaataaaaaagaaacaatcattgatattgaaacagtaccgtttgaagaagatcttgtaagcgttatttcaaaattaagagttgtagtagatttatctttagagccgaaactttttttacaaatctgttgtattggcgcgggtataccacaaattaataaaaagagaacagattatgttaaacatatgcataatggatatattattgatgacatatcgcaaactgtagaatctttagattattttttggcacatttaaaaaatggaattattcttatgcatattccatga

SEQ ID NO: 2674 - protein, 324 aa, Artificial Sequence
  Description of Artificial Sequence: synthetic amino acid sequence
MERFCCVNQINYIQMNPLEAKFKTSALRSWKTDQADAHKLACLGPTLKQTGSLPIHELIFFELRERARFHLEIENEQNRLKFSLCFSIFTERNKVVTQDLYDSISRAYYCLVDTQANQNMIEHYAGLNMNDINLLRVTPFDAKSLPNQSSQLYDTYIGLWIDGLDEIEIREIVNSLFQYIQHKDGYKLKILTKSRDNLTENLIDEVAHLNDLYHQEKKEISDVIEDVIQNKKETIIDIETVPFEEDLVSVISKLRVVVDLSLEPKLFLQICCIGAGIPQINKKRTDYVKHMHNGYIIDDISQTVESLDYFLAHLKNGIILMHIP

SEQ ID NO: 2675 - DNA, 408 bp, Artificial Sequence
  Description of Artificial Sequence: synthetic nucleic acid sequence
atgttcccaccccgaacacctagtagagatgccactaacccacctcaacaactcttacaattactaggaataccgtcaaatattacccatctcacatacaatttttctgagcatgcattaccttggataagttttatcgtacactatagtttttctatcgctattgcaataatctatatttatatcgcaaagaaatatacaaaaatcacactaggttatggtgctttatttggtatagttatttggattgtttttcatttaatcttaatgccaattatgcatgtcgtaccgaatgcttttgatcaaccattttcagaacacctatcagaattttttggacacattgtttggatgatggttatagaaatggtcagaaggtatttctataatattcaattaaataaataa

SEQ ID NO: 2676 - protein, 135 aa, Artificial Sequence
  Description of Artificial Sequence: synthetic amino acid sequence
MFPPRTPSRDATNPPQQLLQLLGIPSNITHLTYNFSEHALPWISFIVHYSFSIAIAIIYIYIAKKYTKITLGYGALFGIVIWIVFHLILMPIMHVVPNAFDQPFSEHLSEFFGHIVWMMVIEMVRRYFYNIQLNK

SEQ ID NO: 2677 - DNA, 345 bp, Artificial Sequence; identical to SEQ ID NO: 255
  Description of Artificial Sequence: synthetic nucleic acid sequence

SEQ ID NO: 2678 - protein, 114 aa, Artificial Sequence; identical to SEQ ID NO: 256
  Description of Artificial Sequence: synthetic amino acid sequence

SEQ ID NO: 2679 - DNA, 819 bp, Artificial Sequence
  Description of Artificial Sequence: synthetic nucleic acid sequence
atgactagacagtgggaaacacttagagaatatgatgaaattaaatatgaatttttcgaagggattgccaaagtaacgattaatcgtccagaagtaagaaatgcatttactcctaaaacagttgctgaaatgattgatgcattttcacgtgcgcgtgatgatcaaaatgtatcagtaattgtattaactggtgaaggggacaaagcgttttgttcaggtggagatcaaaaaaaacgtggacacggtggttatgtaggtgaagatgatattcctcgtttaaatgtattagatttacaacgtttaattcgtgtgattcctaaaccagtaatagcaatggttagaggctatgcaattggtggaggaaatgtacttaatgttgtttgtgatttaactatcgctgcagacaatgctatttttggacaaactggaccaaaagtaggctcatttgatgctgggtacggttctggctacctagctcgtatagttggccataaaaaagcaagagaaatctggtacttatgccgtcaatataatgcacaggaagctttggatatgggcttagtgaatactgtagttccattagaacaagttgaagacgaaacagttaaatggtgtaaagacatcatgcaacactcaccaactgctttacgtttcttaaaagcagcaatgaatgctgatactgatggtttagctggtttacaacaaatggctggagatgcgactttactttactatactactgatgaagcgaaagaaggacgtgacgcgtttaaagaaaaacgtaatcctgattttgaccaattccctaaattcccataa

SEQ ID NO: 2680 - protein, 272 aa, Artificial Sequence
  Description of Artificial Sequence: synthetic amino acid sequence
MTRQWETLREYDEIKYEFFEGIAKVTINRPEVRNAFTPKTVAEMIDAFSRARDDQNVSVIVLTGEGDKAFCSGGDQKKRGHGGYVGEDDIPRLNVLDLQRLIRVIPKPVIAMVRGYAIGGGNVLNVVCDLTIAADNAIFGQTGPKVGSFDAGYGSGYLARIVGHKKAREIWYLCRQYNAQEALDMGLVNTVVPLEQVEDETVKWCKDIMQHSPTALRFLKAAMNADTDGLAGLQQMAGDATLLYYTTDEAKEGRDAFKEKRNPDFDQFPKFP

SEQ ID NO: 2681 - DNA, 1545 bp, Artificial Sequence
  Description of Artificial Sequence: synthetic nucleic acid sequence
atggtagtacctttcaaaaatgaacctggtattgatttttcagtacagacaaatgttgagcgttttaatgaagaattaaggaaagtaaaagcgcaactaggacaagatataccacttgtgattaacggagaaaaacttactaaaactgatacttttaattcagtgaatcctgcgaatacatcacagctcattgcgaaagtgtctaaagcaacgcaagatgatattgaaaaagctttcgaatcagcaaatcatgcgtatcaatcatggaagaagtggtcgcataaggaccgtgcagaattactgttacgtgtagccgcaattatccgtcgtcgaaaagaggaaatttccgctattatggtttatgaagccggcaagccttgggatgaagcagttggagatgcagctgagggtattgattttatagaatattatgcaagatcaatgatggaacttgcagatggtaagccagtattagacagagaaggtgaacataatcgctatttttataaacctattggtacaggcgtgacaattccaccatggaattttccatttgcaattatggctggtacaaccttagcccctgttgttgcaggtaacactgtattattaaagcctgctgaggatacagttttgactgcttataaattaatggaaatattagaagaagcaggtttaccccaaggtgttgtaaattttgttcctggtgatccaaaagaaattggagattatttagtcgaccataaagatacacattttgtcacatttacaggatcccgagctacaggtacacgtatttatgaacgtagtgctgtagtgcaagaaggacaacagtttttaaaacgtgttattgcagagatgggtggcaaagatgcgatagttgtagataataatgtagatacagatttagcggctgaagcaattgttacatctgcttttggtttctctggtcaaaaatgctctgcgtgttctcgtgtcatagtccatcaagacgtacatgatgaaatattggaaaaagcaattcaattaactcaaaaattaactttaggtaatactgaagagaacacatttatggggccagtaattaatcaaaaacaatttgataaaatcaaaaattatattgaaattggtaaaaaagaaggcaaactagagactggtggtggaacagatgattctaccggttatttcattgaaccaacgattttctccggactacaatctgcggatcgtatcatgcaagaagaaatttttggaccagtcgtaggctttattaaggtcaaggattttgatgaggctattgaagtagctaatgatactgactatggtttgacaggcgctgtaattactaatcatcgtgaacattggattaaggctgtgaatgaatttgatgtaggtaacctttacttgaatagaggttgtacagctgcagtagtgggttatcatccatttggtggattcaagatgtctggtacagatgctaaaacaggaagtccagattacttacttaatttcttagaacaaaaagttgtttctgaaatgttttaa

SEQ ID NO: 2682 - protein, 514 aa, Artificial Sequence
  Description of Artificial Sequence: synthetic amino acid sequence
MVVPFKNEPGIDFSVQTNVERFNEELRKVKAQLGQDIPLVINGEKLTKTDTFNSVNPANTSQLIAKVSKATQDDIEKAFESANHAYQSWKKWSHKDRAELLLRVAAIIRRRKEEISAIMVYEAGKPWDEAVGDAAEGIDFIEYYARSMMELADGKPVLDREGEHNRYFYKPIGTGVTIPPWNFPFAIMAGTTLAPVVAGNTVLLKPAEDTVLTAYKLMEILEEAGLPQGVVNFVPGDPKEIGDYLVDHKDTHFVTFTGSRATGTRIYERSAVVQEGQQFLKRVIAEMGGKDAIVVDNNVDTDLAAEAIVTSAFGFSGQKCSACSRVIVHQDVHDEILEKAIQLTQKLTLGNTEENTFMGPVINQKQFDKIKNYIEIGKKEGKLETGGGTDDSTGYFIEPTIFSGLQSADRIMQEEIFGPVVGFIKVKDFDEAIEVANDTDYGLTGAVITNHREHWIKAVNEFDVGNLYLNRGCTAAVVGYHPFGGFKMSGTDAKTGSPDYLLNFLEQKVVSEMF

SEQ ID NO: 2683 - DNA, 675 bp, Artificial Sequence
  Description of Artificial Sequence: synthetic nucleic acid sequence
atggagagaatcctaatgataagtaagaaaaaagcattacaaatgattgacgttatagcagatatgtttcctaatgcagaatgcgaattaaaccatagaaatgcattcgatcttacaatagctgtattattatcagcacagtgtactgataatctagtcaatcgtgtcactcaatcattatttagaaaatatcgaacacctgaagattatttaaatgtgagtgatgaagaattacaaaatgatatacgctctattggattatatcgcaataaagccaaaaatataaaaaaattatgccactctttaattgaacaatttaatggtcaaatcccacaaacacataaagaattagagagtctagctggagtggggcgtaaaacagcaaatgttgtaatgagtgtcgcatttggagaaccttctttagctgtcgatactcatgttgagagagtttctaaacgtttgggaattaatcgttggaaagatagtgtaagacaagtagaagatcgattatgtgatattatcccaagagatagatggaataaaagccatcatcaattaatattttttgggagatatcattgtcttgctagaaaacctaaatgtgagatatgtccgctgttaaatgattgtagagaaggacaaaaacgacataaagcaaagataaaggaggcgtga

SEQ ID NO: 2684 - protein, 224 aa, Artificial Sequence
  Description of Artificial Sequence: synthetic amino acid sequence
MERILMISKKKALQMIDVIADMFPNAECELNHRNAFDLTIAVLLSAQCTDNLVNRVTQSLFRKYRTPEDYLNVSDEELQNDIRSIGLYRNKAKNIKKLCHSLIEQFNGQIPQTHKELESLAGVGRKTANVVMSVAFGEPSLAVDTHVERVSKRLGINRWKDSVRQVEDRLCDIIPRDRWNKSHHQLIFFGRYHCLARKPKCEICPLLNDCREGQKRHKAKIKEA

SEQ ID NO: 2685 - DNA, 333 bp, Artificial Sequence; identical to SEQ ID NO: 973
  Description of Artificial Sequence: synthetic nucleic acid sequence

SEQ ID NO: 2686 - protein, 110 aa, Artificial Sequence; identical to SEQ ID NO: 974
  Description of Artificial Sequence: synthetic amino acid sequence

SEQ ID NO: 2687 - DNA, 688 bp, Artificial Sequence
  Description of Artificial Sequence: synthetic nucleic acid sequence
atgctcaaacgtacaattaaattcatactttatttaatcgtaagttcgtttattatcttcattttagttgagaagacatctggtaatccagcgattctgtatctacaacgtcatggttatacgtcgattacgcaagacaatattgaagcggcacaacatcaacttggcttaggacaacatgtgttactaagatatatcgattgggttggacatgcactcacgggcaacttaggatacggctttagtacgaacgaagcagttaccgctatgataatggaagccatcgtgccgacgcttgtgctaatcattgtctctagttgtatcatgttgccatttggctatattgttggttacttcgttgggacgcgtccgcatacacgttacgctaatggaattcgtggattcgcccaagtgatgacctcaatgccagaatactggttagctattttattcatttattatttaggcgtacgttggcaattgttaccatttgtaggtagtgattcatggcaacactttgtgctgccaatcttcacaattgttgttatagaagggtgtcatatcttattgatgacagcacatctgattacacaaacgttagatcaagatgcgtatcaactggcgcagttaagacatttttcgttaaaagcgcgtatcatcgtacaaattaaagagatatttgcaccac

SEQ ID NO: 2688 - protein, 230 aa, Artificial Sequence
  Description of Artificial Sequence: synthetic amino acid sequence
  MOD_RES (230): variable amino acid
MLKRTIKFILYLIVSSFIIFILVEKTSGNPAILYLQRHGYTSITQDNIEAAQHQLGLGQHVLLRYIDWVGHALTGNLGYGFSTNEAVTAMIMEAIVPTLVLIIVSSCIMLPFGYIVGYFVGTRPHTRYANGIRGFAQVMTSMPEYWLAILFIYYLGVRWQLLPFVGSDSWQHFVLPIFTIVVIEGCHILLMTAHLITQTLDQDAYQLAQLRHFSLKARIIVQIKEIFAPX

SEQ ID NO: 2689 - DNA, 600 bp, Artificial Sequence
  Description of Artificial Sequence: synthetic nucleic acid sequence
atgataaacgtaacattagagcaaattaaaaactggatagattgtgaaattgatgaaaaacatttaaaaaaaacaataaatggcgtttcaattgattcacgaaaaatcaatgaaggggcgttatttataccttttaaaggtgagaatgttgatggccatcgttttatcacacaagctttgaacgatggtgctggagctgtttttagtgaaaaagagaataaacattctgaagggaaccaaggtcctattatttgggtagaagatactttaatagccttacagcaattggcaaaagcatatctaaatcatgtaaatcctaaggtgatagcggttactggttctaatggaaaaacaacaacaaaagacatgattgaaagtgtattatcaactgaatttaaagttaagaaaacacaaggaaattataataatgaaattggaatgccgttgactttactagaacttgatgaagacacagaaatttctattctagaaatggggatgtcaggttttcatcaaatagagttgttatctcatatcgcacaacctgatatagcggtcatcacaaacattggcgaatcacatatgcaagatttaaaataa

SEQ ID NO: 2690 - protein, 199 aa, Artificial Sequence
  Description of Artificial Sequence: synthetic amino acid sequence
MINVTLEQIKNWIDCEIDEKHLKKTINGVSIDSRKINEGALFIPFKGENVDGHRFITQALNDGAGAVFSEKENKHSEGNQGPIIWVEDTLIALQQLAKAYLNHVNPKVIAVTGSNGKTTTKDMIESVLSTEFKVKKTQGNYNNEIGMPLTLLELDEDTEISILEMGMSGFHQIELLSHIAQPDIAVITNIGESHMQDLK

SEQ ID NO: 2691 - DNA, 570 bp, Artificial Sequence
  Description of Artificial Sequence: synthetic nucleic acid sequence
atggtaggttgtcgcattagatatgaatactatcgttcggcttatggacatggtgtgtcaggcgtaaacatgggtgcgaaaactggtactggtacgtatggacaagaaatatacgaaaagtataatttacctgataatgctgccaaagatgtttggattaatggtttcagtccagaatatactatgtcggtatggatgggcttcaataaggttaaacaatatggaacaaattcatttatcggtcattcagaacaagattatccacaatacttgtatgaagatgtgatgtctagtatctcatctaaagatggtgaagatttcaaaaagcctaatgatgtacaaggaagttcaccggacagtctatctgtatcaggtcattctgataataatactactaaccgtagtgttcatggaagtagcgatacatcttcttcatcaaatggtggctctaactcagcatcaagtggaaacaactcgaatagttcgaatggtaccagtcaaggtaactcaggcaatgcatttacacgtctgttcaatttaaactctatattcgattataaagtttcataa

SEQ ID NO: 2692 - protein, 189 aa, Artificial Sequence
  Description of Artificial Sequence: synthetic amino acid sequence
MVGCRIRYEYYRSAYGHGVSGVNMGAKTGTGTYGQEIYEKYNLPDNAAKDVWINGFSPEYTMSVWMGFNKVKQYGTNSFIGHSEQDYPQYLYEDVMSSISSKDGEDFKKPNDVQGSSPDSLSVSGHSDNNTTNRSVHGSSDTSSSSNGGSNSASSGNNSNSSNGTSQGNSGNAFTRLFNLNSIFDYKVS

SEQ ID NO: 2693 - DNA, 441 bp, Artificial Sequence
  Description of Artificial Sequence: synthetic nucleic acid sequence
atgcttttttcttacttatcattaggattctctccattcaaccagtcaaatttttcagtagctcatttttacaaagatgttcacatgactgtttttcaatggatattctctgcattaactttatggattggggttagtttatttttgactttaggattgattatcgctcaactcaacgatattcaaaaagcaagtagttttgccaatttacttaatattacactagctatattaggaggtctatggtttccagtatacacgtttcctgattggcttcagtcgatttctaaacacatgccaacatataatttaaagctacttgctatagatttagcgcaaaataaaggggtgaatatagaagcgtttggctatctcgtggtctattgtataatctttgtgagtattgctttattcatgaataagaaaggagatgtacactaa

SEQ ID NO: 2694 - protein, 146 aa, Artificial Sequence
  Description of Artificial Sequence: synthetic amino acid sequence
MLFSYLSLGFSPFNQSNFSVAHFYKDVHMTVFQWIFSALTLWIGVSLFLTLGLIIAQLNDIQKASSFANLLNITLAILGGLWFPVYTFPDWLQSISKHMPTYNLKLLAIDLAQNKGVNIEAFGYLVVYCIIFVSIALFMNKKGDVH

SEQ ID NO: 2695 - DNA, 452 bp, Artificial Sequence
  Description of Artificial Sequence: synthetic nucleic acid sequence
gtgagaataggggaattaagtactttaatatatttaatatttccgattttagctatatttgttgacaaacgtggtaatttcttaacttatttaattgtttgtactatttttataatcagctatgtgacgatgattatattttataaataccttagtgatagtattttatattcattactggttattcattatttaggaatcttttattttgtctatagtgtcaatcctatgaatagtttgtttttcttctatagtgctttcgccttaccttttatttttaatgttcgtgttgtatcaaaagaatttataacctttttaatagctatgataagttgtttaatactaacttatatatttaatccaacatttgtggttccattaagtgcattttatttggttatattaattgttgctgtaggtaattttaaaaatagagacgaacgaattatgac

SEQ ID NO: 2696 - protein, 151 aa, Artificial Sequence
  Description of Artificial Sequence: synthetic amino acid sequence
VRIGELSTLIYLIFPILAIFVDKRGNFLTYLIVCTIFIISYVTMIIFYKYLSDSILYSLLVIHYLGIFYFVYSVNPMNSLFFFYSAFALPFIFNVRVVSKEFITFLIAMISCLILTYIFNPTFVVPLSAFYLVILIVAVGNFKNRDERIMT

SEQ ID NO: 2697 - DNA, 567 bp, Artificial Sequence
  Description of Artificial Sequence: synthetic nucleic acid sequence
atgaaaggtttaattattatagggagtgctcaagtagggtctcatacgaacgctttatcaaaatatttaaaaggtcaactcggcgaacatgatgttgaggtggaaatctttgacctagctgagaaacccattcatcaattggattttgctggtacaacacaagcagttgatgaaattaaaaacaatgtcaaatctttacaaaataaagcaatggaagcagatttcttaattttaggaacgccaaattatcatggatcgttttcaggtattcttaaaaatgcacttgaccaccttaatatggaccatttcaaaatgaaacccgtgggactcatttgcaatagtggaggaatagtaagttctgagccattatcacacttgagagtcatcgtacgtagtttacttggtattgctgtaccaacgcaaattgctacacatgattctgattatgctaaattagaagatggtaccttatacttagaagataatgaatttcaactacgttcaaaattgtttgttgatcaaattgtatccttcgtaacaaatagtccatatgaacacttaaaataa

SEQ ID NO: 2698 - protein, 188 aa, Artificial Sequence
  Description of Artificial Sequence: synthetic amino acid sequence
MKGLIIIGSAQVGSHTNALSKYLKGQLGEHDVEVEIFDLAEKPIHQLDFAGTTQAVDEIKNNVKSLQNKAMEADFLILGTPNYHGSFSGILKNALDHLNMDHFKMKPVGLICNSGGIVSSEPLSHLRVIVRSLLGIAVPTQIATHDSDYAKLEDGTLYLEDNEFQLRSKLFVDQIVSFVTNSPYEHLK

SEQ ID NO: 2699 - DNA, 837 bp, Artificial Sequence
  Description of Artificial Sequence: synthetic nucleic acid sequence
atgattaataaaaaaaataatttactaactaaaaagaaacctatagcaaataaatccaataaatatgcaattagaaaattcacagtaggtacagcatctattgtaataggtgcaacattattgtttggtttaggtcataatgaggccaaagctgaggagaattcagtacaagactttaaagattcgaatacggatgatgaattatcagatagtaatgatcagtctagtgatgaagaagagaatgatgtaattaataataatcagtcaataaactctgatgataataaccaaataaataaaaaagaagaaacgaataacaacgatggtatagaaaaaagctcagaagatagaacagagtcaacaacaaatgtagatgaaaacgaagcaacatttttacaaaagtcccctcaagataatactcatcttacagaagaagaggtaaaagaaccctcatcagtcgaatcctcaaattcatcaattgatactgcccaacaaccatctcacacaacaataaatagagaagaatctgttcaaacaagtgataatgtagaagattcacacgtatcagattttgctaactctaaaataaaagagagtaacactgaatctggtaaagaagagaatactatagagcaacctaataaagtaaaagaagattcaacaacaagtcagccgtctggctatacaaatatagatgaaaaaatttcaaatcaagatgagttattaaatttaccaataaatgaatataaagtaacgaaacttagcgtcactttcttcattgaaaagaaccgtgaaatacttttgactttcatatcaattctccttatgaattattaa

SEQ ID NO: 2700 - protein, 278 aa, Artificial Sequence
  Description of Artificial Sequence: synthetic amino acid sequence
MINKKNNLLTKKKPIANKSNKYAIRKFTVGTASIVIGATLLFGLGHNEAKAEENSVQDFKDSNTDDELSDSNDQSSDEEENDVINNNQSINSDDNNQINKKEETNNNDGIEKSSEDRTESTTNVDENEATFLQKSPQDNTHLTEEEVKEPSSVESSNSSIDTAQQPSHTTINREESVQTSDNVEDSHVSDFANSKIKESNTESGKEENTIEQPNKVKEDSTTSQPSGYTNIDEKISNQDELLNLPINEYKVTKLSVTFFIEKNREILLTFISILLMNY

SEQ ID NO: 2701 - DNA, 522 bp, Artificial Sequence; identical to SEQ ID NO: 1069
  Description of Artificial Sequence: synthetic nucleic acid sequence

SEQ ID NO: 2702 - protein, 173 aa, Artificial Sequence; identical to SEQ ID NO: 1070
  Description of Artificial Sequence: synthetic amino acid sequence

SEQ ID NO: 2703 - DNA, 468 bp, Artificial Sequence
  Description of Artificial Sequence: synthetic nucleic acid sequence
atgacaaaaaaagatgtaattcaattattagaaaaaatagctatatatatggagctaaaaggagaaaatacatttaaagtttcagcgtatagaaaagccgcacaaagtctagaggttgatgagcgtacattagaagagattgatgatgtaacagaacttaaaggcattggaaaaggcgtaggagaagttattaatgaatttaaaacacaaggtcaatcatcgacccttcaagcacttcaagatgaagtacctgaagggttagtgccacttttgaaaatacaaggattaggcataccattgataattattatatttttcaacaattggatctatccacatatccatcgctttacaatctggacaccagtcggcttcaaacttgataattactggatcagtactaccaatagtagaattaaattcttcggtttgatgaatatttttcatcactatctactccttttgtaa

SEQ ID NO: 2704 - protein, 155 aa, Artificial Sequence
  Description of Artificial Sequence: synthetic amino acid sequence
MTKKDVIQLLEKIAIYMELKGENTFKVSAYRKAAQSLEVDERTLEEIDDVTELKGIGKGVGEVINEFKTQGQSSTLQALQDEVPEGLVPLLKIQGLGIPLIIIIFFNNWIYPHIHRFTIWTPVGFKLDNYWISTTNSRIKFFGLMNIFHHYLLLL

SEQ ID NO: 2705 - DNA, 927 bp, Artificial Sequence; identical to SEQ ID NO: 1071
  Description of Artificial Sequence: synthetic nucleic acid sequence

SEQ ID NO: 2706 - protein, 308 aa, Artificial Sequence; identical to SEQ ID NO: 1072
  Description of Artificial Sequence: synthetic amino acid sequence

SEQ ID NO: 2707 - DNA, 882 bp, Artificial Sequence
  Description of Artificial Sequence: synthetic nucleic acid sequence
atgacacatgattatatagtgagaggtttagcatacggtggggaaataagagcatatgctgcaatcacaacagagtcagtacaagaagcacaaacacgtcattatacatggcctactgcttctgccgctatgggaagaactatgacagctactgttatgatgggtgcaatgttaaaaggaaaccaaaagttaacagttactgttgatggcaaaggtccaattggcagaattattgctgacgcagatgctcaaggaaatgttcgtgcatatgtagaccatccacaaacgcattttccactcaacgatcaaggtaaattggatgtacggcgagcagttggtactgatggttccattcaggttgttaaagatgttggaatgaaagactacttttctggtgcgagtccaatagtatcaggtgagctaggagatgatttcacatactactatgccacaagtgaacaaacaccatcatcagtaggattgggtgtattagttaatccagacaactcaatcaaagcagcgggaggatttattattcaagttatgccaggtgctactgatgaaacggtgactaaattagaagaagccattagtcaaatgcaacctgtatcgaaattaattgagcaaggacttacacctgaaggaatattaaatgaaattttgggtgaaggtaatgttcaaattttaaattcaacgtcagcgcaatttgaatgtaattgtagtcatgagaaatttttaaatgctattaaaggtttaggagaggcagaaattcatagcatgattaaagaggatcatggagctgaagctgtatgtcacttctgtggtaataaatatcagtatagtgaaagtgaattagaagatttattagaaacaatgaaatag

SEQ ID NO: 2708 - protein, 293 aa, Artificial Sequence
  Description of Artificial Sequence: synthetic amino acid sequence
MTHDYIVRGLAYGGEIRAYAAITTESVQEAQTRHYTWPTASAAMGRTMTATVMMGAMLKGNQKLTVTVDGKGPIGRIIADADAQGNVRAYVDHPQTHFPLNDQGKLDVRRAVGTDGSIQVVKDVGMKDYFSGASPIVSGELGDDFTYYYATSEQTPSSVGLGVLVNPDNSIKAAGGFIIQVMPGATDETVTKLEEAISQMQPVSKLIEQGLTPEGILNEILGEGNVQILNSTSAQFECNCSHEKFLNAIKGLGEAEIHSMIKEDHGAEAVCHFCGNKYQYSESELEDLLETMK

SEQ ID NO: 2709 - DNA, 942 bp, Artificial Sequence
  Description of Artificial Sequence: synthetic nucleic acid sequence
gtgttttggatggcacaaaaacctgtagattatgttacacaaattattgggaatacacctgtagtcaaattaagaaacgttgttgatgatgatgcagctgatatttatgttaagttagaatatcaaaatccaggtggttcggtaaaagatcgtatcgctttagcgatgattgaaaaagctgagcgtgaagggaaaattaaacctggtgatacaatcgttgagcctacgagtggtaacactggtataggtctagcatttgtatgtgctgccaaggggtacaaagcagtttttacaatgcctgaaacaatgagccaagagcgccgtaacttattaaaagcttatggtgctgaactagtattaacaccaggatctgaagctatgaaaggtgcaataaaaaaagctaaagaattaaaagaagagcacggctattttgaaccacaacaattcgaaaatccagcaaatcctgaaattcatgaacttacaactggaccagaattagttgaacaatttgaaggtcgacaaattgatgcatttttagctggtgtaggaactggtggtacgttatctggtgttggtaaagtattgaagaaagaatatccaaatgtggaaatagtagctattgaacctgaagcttctccagtattaagcggtggtgaaccaggccctcataaattacaaggattgggagcaggtttcgtacctgatactttaaatacagaagtttatgacagcatcatcaaagtaggtaatgatactgctatggatatggcacgtcgtgttgctagagaagaaggtatattagcaggtatttcatctggtgctgcaatatatgctgctattcaaaaagcaaaagaattaggtaaaggtaaaacagttgtaacagtattaccaagtaatggggaacgttacttatcaacaccattatattcatttgataattaa

SEQ ID NO: 2710 - protein, 313 aa, Artificial Sequence
  Description of Artificial Sequence: synthetic amino acid sequence
VFWMAQKPVDYVTQIIGNTPVVKLRNVVDDDAADIYVKLEYQNPGGSVKDRIALAMIEKAEREGKIKPGDTIVEPTSGNTGIGLAFVCAAKGYKAVFTMPETMSQERRNLLKAYGAELVLTPGSEAMKGAIKKAKELKEEHGYFEPQQFENPANPEIHELTTGPELVEQFEGRQIDAFLAGVGTGGTLSGVGKVLKKEYPNVEIVAIEPEASPVLSGGEPGPHKLQGLGAGFVPDTLNTEVYDSIIKVGNDTAMDMARRVAREEGILAGISSGAAIYAAIQKAKELGKGKTVVTVLPSNGERYLSTPLYSFDN

SEQ ID NO: 2711 - DNA, 480 bp, Artificial Sequence
  Description of Artificial Sequence: synthetic nucleic acid sequence
gtgaaaacttataacaataatcaatctgtgggtaacttcttaagtgtttcagtacaagatggtcaaacagttaaacaaggtgaacgtatcatcaattatgatacaaatgggaataaacgccaacaactattgaacaaagtgaatcaagcacaatctcaagttaatgatgattatcaaaaagtaaatcaaagtcctaacaatcatcaattacaagttaaattgactcaagatcaaagtgctttaaatgaagctcagcagtcattgtcacaatatgacagacaactcaatgacagcatgaatgcatcatttgatggtaaaattaacattaaaaatgattcagatgtaggcgaagggcaacctattttgcaattaatttcttcaaatcctcaaattaacgcaactatcacagagtttgatattaataaaattaaagaaggcgatgaagtaaatgtcactgtaaatagcaaatgtcccatataa

SEQ ID NO: 2712 - protein, 159 aa, Artificial Sequence
  Description of Artificial Sequence: synthetic amino acid sequence
VKTYNNNQSVGNFLSVSVQDGQTVKQGERIINYDTNGNKRQQLLNKVNQAQSQVNDDYQKVNQSPNNHQLQVKLTQDQSALNEAQQSLSQYDRQLNDSMNASFDGKINIKNDSDVGEGQPILQLISSNPQINATITEFDINKIKEGDEVNVTVNSKCPI

SEQ ID NO: 2713 - DNA, 564 bp, Artificial Sequence
  Description of Artificial Sequence: synthetic nucleic acid sequence
atgagaaaaggaaatcagaatgaagctttagaagaatttatcggaactttattaaaagatgagcaatattattatgagttagcatttttagaaagtgaaacacaaaatcttgaaatcataatggagaagatgattaagcaaggaattacaaaatttcgtattgtacctttactcatttttagtgcaatgcattatatcagtgatattccacaaatacttaaagagatgaaagctcgatatccacaaattgatagtaaaatgagtgcgcctcttggtacacatccatatatgaaaacattagtagaaaatagaattgctgatgaaaaagtcagtgaaggttcaaccaaagcaactatagtaattgcccatggaaatggaagtggacgttttacgaaagcacatgatgaattaaaagcatttgttaaaacgcttgatagtcatcatcctgtttatgcaagagctttatatgggacatttgctatttacagtgacatttacttcatcgccttctttaattttattaatatcaaactctgtgatagttgcgttaatttgaggatttga

SEQ ID NO: 2714 - protein, 187 aa, Artificial Sequence
  Description of Artificial Sequence: synthetic amino acid sequence
MRKGNQNEALEEFIGTLLKDEQYYYELAFLESETQNLEIIMEKMIKQGITKFRIVPLLIFSAMHYISDIPQILKEMKARYPQIDSKMSAPLGTHPYMKTLVENRIADEKVSEGSTKATIVIAHGNGSGRFTKAHDELKAFVKTLDSHHPVYARALYGTFAIYSDIYFIAFFNFINIKLCDSCVNLRI

SEQ ID NO: 2715 - DNA, 543 bp, Artificial Sequence
  Description of Artificial Sequence: synthetic nucleic acid sequence
atgagtacacaggaattaaaagaaaatgatattcaaaactcaagtattccatttgttaatcattttaacaaactaagacatcagccaaaatggatacttaaatcaatcatagtgatagtattagctattattagcgctttcatcacatataatactagtaatgaactattagataaccaatcgatagctaatagccaaatggatgaaaatatgtttcgtatgtctacaactataggcgctttcataggaacaatctttagtgttgttgtagtatttttaatctttctaattatttctaaaatatttaaatctgacgccaaagcgagcagtttattctcagcagcactctcttattcaatcattattttaggatttacaactattatttctttaattcaaatagtttttggactaaagataacagactataagcttgatagcttaaacattttttcaaaggataataaaacactcatggacatctgctacttcatgatatcattcatttcaataagttttgagtatatattatcggcatattaa

SEQ ID NO: 2716 - protein, 180 aa, Artificial Sequence
  Description of Artificial Sequence: synthetic amino acid sequence
MSTQELKENDIQNSSIPFVNHFNKLRHQPKWILKSIIVIVLAIISAFITYNTSNELLDNQSIANSQMDENMFRMSTTIGAFIGTIFSVVVVFLIFLIISKIFKSDAKASSLFSAALSYSIIILGFTTIISLIQIVFGLKITDYKLDSLNIFSKDNKTLMDICYFMISFISISFEYILSAY

SEQ ID NO: 2717 - DNA, 567 bp, Artificial Sequence
  Description of Artificial Sequence: synthetic nucleic acid sequence
atgatacatggggcatttttcttagcattttcaaataaatcacgaacacgactcgcaccaacaccaacaaacatctcaacgaagtcagatccactaattgagaagaatggtgcaccagcttcacctgcaaccgcacgtgctaataatgttttacctgtacctggaggcccaacaagtaagacaccttttggaattcttgaacccatttgtttaaatttcttgttatcttttaagaaatctacaatttctattaattcttgtttctcttcgtcagctcctgctacatctgagaaacgaactcgacgtttattactgtcgtacatcttagctttggattttccaaagttcatcatacgaccaccaccgccgccaccttgggcttggctaaggaagaaaataaataataatgcaatgattaatacaggaatcagtgtcgttaaaatactaacgaatacactttgtttttcttcttctttaactgtaaatttaagattatcttgtttcttagctgtatctgtgattttttgtaaatctttttcattgttatataaaattgtcgatgagtaa

SEQ ID NO: 2718 - protein, 188 aa, Artificial Sequence
  Description of Artificial Sequence: synthetic amino acid sequence
MIHGAFFLAFSNKSRTRLAPTPTNISTKSDPLIEKNGAPASPATARANNVLPVPGGPTSKTPFGILEPICLNFLLSFKKSTISINSCFSSSAPATSEKRTRRLLLSYILALDFPKFIIRPPPPPPWAWLRKKINNNAMINTGISVVKILTNTLCFSSSLTVNLRLSCFLAVSVIFCKSFSLLYKIVDE

SEQ ID NO: 2719 - DNA, 813 bp, Artificial Sequence
  Description of Artificial Sequence: synthetic nucleic acid sequence
atgaaagatcaattgagaggtaatgtcgtgattatacatcaacctgcagaagaaatgccaccgggcggtgcgaaaggtatgatagatgacggcgtattagaaggggtggaccatgttttaggtgcacatgtgatgagtatgatggaaacaggtaaaatatactatcgtgaaggttttgttcaaacgggacgcgcttattttagacttgttgtgaaaggtcagggtggtcacggctcatccccacatacatcgaatgacgctattgtagcaggtgcgcattttgtaacgaccgcacagaccattgtttcaagacgcttaaatccgtttgaaacgggtgtagtcacaataggttccttcgacgggaaaggacaattcaatgtgattaaagatacaataacaatcgaaggtgatgtacgtgcactgactgatgatacaagagacaatattcagaatgaaatgacacgactagtcagaggattagaagagatgttcggagtgatttgtgattttgaatttaaaaaggattatccagctctttacaatgatcctgaatttacttcttatgtagcaacaactttaaaaaatgctaagctggatgacataaaagcaatagatatttgtgagccgcagccaccctcagaagatttcgcgttttatgcgttagaaagaccttcaacatttatttattcgggtgcagcaccagaagatggacctatgtaccctcaccatcatcctaagtttaatatcaatgaaacatctatgcttgtagttgcagaggcagtgggtacaattgtattagattatttgaaataa

SEQ ID NO: 2720 - protein, 270 aa, Artificial Sequence
  Description of Artificial Sequence: synthetic amino acid sequence
MKDQLRGNVVIIHQPAEEMPPGGAKGMIDDGVLEGVDHVLGAHVMSMMETGKIYYREGFVQTGRAYFRLVVKGQGGHGSSPHTSNDAIVAGAHFVTTAQTIVSRRLNPFETGVVTIGSFDGKGQFNVIKDTITIEGDVRALTDDTRDNIQNEMTRLVRGLEEMFGVICDFEFKKDYPALYNDPEFTSYVATTLKNAKLDDIKAIDICEPQPPSEDFAFYALERPSTFIYSGAAPEDGPMYPHHHPKFNINETSMLVVAEAVGTIVLDYLK

SEQ ID NO: 2721 - DNA, 462 bp, Artificial Sequence
  Description of Artificial Sequence: synthetic nucleic acid sequence
atgaagggatgtcttatgttaattagcgatacaaataaaacatatataatagaagaaactagtaattcattcacaattgaaaagaataatgatcagcagcactacgaagtattagaatcaatcaacagcttatctaatgattcattttgtgtgttaaatcacttattcgtcaatggaggtaatgaagaggtttttgagtcacggtttttaaagcgaaatcaacatttgcaagatgtgcctggttttaaagcgttaagatttcttagaccggtagtcaaagggagacattacattatcatcacgctatggaacagtagacaagctttctatgattggcaaaattcacaagcatatgcgcaaactcataaaaaacgtggaactcaaaaaggtgttgatcatcgtatagtcaatagagatttatcctataatataagaatagagttagaaagtcttaataactaa

SEQ ID NO: 2722 - protein, 153 aa, Artificial Sequence
  Description of Artificial Sequence: synthetic amino acid sequence
MKGCLMLISDTNKTYIIEETSNSFTIEKNNDQQHYEVLESINSLSNDSFCVLNHLFVNGGNEEVFESRFLKRNQHLQDVPGFKALRFLRPVVKGRHYIIITLWNSRQAFYDWQNSQAYAQTHKKRGTQKGVDHRIVNRDLSYNIRIELESLNN

SEQ ID NO: 2723 - DNA, 588 bp, Artificial Sequence
  Description of Artificial Sequence: synthetic nucleic acid sequence
gtggaggtaacaataatgaaatgcattgtcggtcttggcaacattggtaaacgttttgaattaacaagacataatattggtttcgaagttgtcgatgatattctagaacgccaccaatttactttagacaaacaaaaatttaaaggtgcatatactattgaacgtttaaacggcgaaaaagtattatttattgagccaatgaccatgatgaacttatctggtcaagctgtagcccctttaatggattattataatgtcgatgttgaagatttgatcgttttatatgacgatttagatttagaacaaggacaagtgcgtctgcgccaaaaggggagtgcaggcggtcataatggtatgaaatcgataattaaaatgcttggtacagatcaatttaaacgtattcgaattggtgttggccgtccaacaaatgggatgtctgttccggactatgttttacaaaaattttcaaaagaagaaatgatcattatggaaaaggtaattgaacattctgcaagagctgtagaatcttttattgaaagttctcgttttgatcatgttatgaatgaatttaatggtgaagtcaagtga

SEQ ID NO: 2724 - protein, 195 aa, Artificial Sequence
  Description of Artificial Sequence: synthetic amino acid sequence
VEVTIMKCIVGLGNIGKRFELTRHNIGFEVVDDILERHQFTLDKQKFKGAYTIERLNGEKVLFIEPMTMMNLSGQAVAPLMDYYNVDVEDLIVLYDDLDLEQGQVRLRQKGSAGGHNGMKSIIKMLGTDQFKRIRIGVGRPTNGMSVPDYVLQKFSKEEMIIMEKVIEHSARAVESFIESSRFDHVMNEFNGEVK

SEQ ID NO: 2725 - DNA, 1393 bp, Artificial Sequence
  Description of Artificial Sequence: synthetic nucleic acid sequence
atgattgcaaattacattagcgaagataatcgttttcaagaattagatgaagtcttcggccaagagaatattttagttacgggattatccccgtcagcgaaggcaacaattattgctgaaaaatatttaaaagatcataaacaaatgctactcgtaactaataatttataccaagcagataaaatcgaaactgacattttacaatatgtagatgactcagaagtttataaatatcctgttcaagatataatgactgaagagttttctactcaaagtccacaattgatgagtgagcgtgttagaacgttgactgcgttagcccaaggcgaaaaagggttatttattgtgcctttaaacggctttaaaaaatggctaacaccggttgatttatggaaagatcatcaaatgacgcttaaagtaggtcaggatattgatgttgatgcattcttaaataaattagttaatatgggttatcgccgagaaagtgtagtgtcacatattggtgagttttcattgcgtggtggaatcatagatatatatccgttgataggaacacctgtgagaatagagctatttgatactgaagttgattccatcagagactttgatgtagaaacacaacgttctaacgataatataaatcaagttgaaatcacaacagctagtgactacattattactgatgaagtgatacaacacttacaaaatgaacttaaaaaagcatatgaatatacacgccctaaaattgaaaagtccgtacgtaatgatttaaaagagacatatgaaagttttaagttgtttgaatctacctttttcgatcatcaattgttacgacgtcttgtttcatttatgtatgaaaaaccatcaacccttattgactattttcaaaaaaacgcgattattgtagttgatgagtttaatcgtattaaggaaacagaagaaacacttacaacagaagttgaagattttatgagtaacttaattgagagtggaaatggatttatcggacaaggatttatgaagtatgaaagttttgacgcattattagagcaacatgccgttgcatatttcacattatttacatcttcgatgcaagtaccattacaacatattattaagttctcttgtaaaccagttcaacaattttatggtcaatatgacattatgcgctcggaatttcaaagatacgtgcatcaagattacactgtcgtagttcttgttgaaactgaaacaaaagttgaacgtattcaatcaatgcttaatgaaatgcatattccaacagtatcaaatattcacgaagatattgatggtggtcaagttgtagtgacggaaggtagtctttctgaaggctttgaattaccttatatgcagttggtagtcatcacagaaagag

SEQ ID NO: 2726 - protein, 465 aa, Artificial Sequence
  Description of Artificial Sequence: synthetic amino acid sequence
  MOD_RES (465): variable amino acid
MIANYISEDNRFQELDEVFGQENILVTGLSPSAKATIIAEKYLKDHKQMLLVTNNLYQADKIETDILQYVDDSEVYKYPVQDIMTEEFSTQSPQLMSERVRTLTALAQGEKGLFIVPLNGFKKWLTPVDLWKDHQMTLKVGQDIDVDAFLNKLVNMGYRRESVVSHIGEFSLRGGIIDIYPLIGTPVRIELFDTEVDSIRDFDVETQRSNDNINQVEITTASDYIITDEVIQHLQNELKKAYEYTRPKIEKSVRNDLKETYESFKLFESTFFDHQLLRRLVSFMYEKPSTLIDYFQKNAIIVVDEFNRIKETEETLTTEVEDFMSNLIESGNGFIGQGFMKYESFDALLEQHAVAYFTLFTSSMQVPLQHIIKFSCKPVQQFYGQYDIMRSEFQRYVHQDYTVVVLVETETKVERIQSMLNEMHIPTVSNIHEDIDGGQVVVTEGSLSEGFELPYMQLVVITERX

SEQ ID NO: 2727 - DNA, 411 bp, Artificial Sequence
  Description of Artificial Sequence: synthetic nucleic acid sequence
atggaaaaacgaatgcgcaaaactgaaagcttggttatcaataatcctgtgttactcaatgaacatgaagacgaagcagatatactgtatataggatttatatctactaaaggtgctattggagaaggtgcagaaagactagaacgacatggtgtaaaagtgaatacgatgcatattcgacaattacatcctttccctaaagatattgttcaacaagctattaataaagcttcgaaagtaatagttgcagaacataattatcaaggacaattatcaagtattttaaaaatgaacacacaagttaatgataaattagttaatcaaacaaaatacgatgggaaacctttcttaccttatgaaattgaagaaaaaggtttggaaattgctaaagagttaaaggagttggtgtaa

SEQ ID NO: 2728 - protein, 136 aa, Artificial Sequence
  Description of Artificial Sequence: synthetic amino acid sequence
MEKRMRKTESLVINNPVLLNEHEDEADILYIGFISTKGAIGEGAERLERHGVKVNTMHIRQLHPFPKDIVQQAINKASKVIVAEHNYQGQLSSILKMNTQVNDKLVNQTKYDGKPFLPYEIEEKGLEIAKELKELV

SEQ ID NO: 2729 - DNA, 1062 bp, Artificial Sequence
  Description of Artificial Sequence: synthetic nucleic acid sequence
atggacaaatttaaatctatgacagaattaaaagaattgactaaagaaggaaaagattgggaaatagagtgtgaaaatcgttctagcatagtcactatattagcattacatggcggtggaattgaacctgccacaactgaattagcctatacaattgcacattgtggcgactataactatttttcctttaaaggtatgagaagtaaggggaataatgagttacatgtgacttccacacattatgatgaccaaattgcattagatttagtgagaggtagccaaagaactgtagccatccatggttgtgaaggtaatgaaagtgtggcttatataggaggtagtgatgacagactaattgagttaatcaccgaatctcttgaagatataggaattagcgtgcgagaagcaccacatcatatttctggaactcaagaaaatactgaaaatggagcagtcatctataaaggtaatcaactttacaattatcgaagttttgatcagtatatttttcaaaaagttgtaaattatttaaatttgaatcaaaagataaacaatttgattatttgtggtgtaaaaagtgcatatattttaaaagaaacaagcgaagcatttaagcaagatgcacgtacatattatcaccaactaatagaggttgactccttacaaacattacctgatgatgattatgtgaaaattgctttcaatataaatcgtcagactcatccagacttagatgagaaattagctcttaagtttaaagacgatattaaactagtatcaagtgggagagatagtatagatgttattatgccaaatatgactaagggtcaagctttgtctagattattaaaagaatggcaaatgcctgcttcacatttaatggcatttggagatgcaaataacgataaagatatgttggagcttgccgaacatagttatgttatggctaatagtgaagatcaatcattatttaatatagcgagtcatgtggcaccttccaatgatgaacaaggcgtactatcaacaatcgaaaatgttgttctcggttattccaataaataa

SEQ ID NO: 2730 - protein, 353 aa, Artificial Sequence
  Description of Artificial Sequence: synthetic amino acid sequence
MDKFKSMTELKELTKEGKDWEIECENRSSIVTILALHGGGIEPATTELAYTIAHCGDYNYFSFKGMRSKGNNELHVTSTHYDDQIALDLVRGSQRTVAIHGCEGNESVAYIGGSDDRLIELITESLEDIGISVREAPHHISGTQENTENGAVIYKGNQLYNYRSFDQYIFQKVVNYLNLNQKINNLIICGVKSAYILKETSEAFKQDARTYYHQLIEVDSLQTLPDDDYVKIAFNINRQTHPDLDEKLALKFKDDIKLVSSGRDSIDVIMPNMTKGQALSRLLKEWQMPASHLMAFGDANNDKDMLELAEHSYVMANSEDQSLFNIASHVAPSNDEQGVLSTIENVVLGYSNK

SEQ ID NO: 2731 - DNA, 669 bp, Artificial Sequence; identical to SEQ ID NO: 2473
  Description of Artificial Sequence: synthetic nucleic acid sequence

SEQ ID NO: 2732 - protein, 222 aa, Artificial Sequence; identical to SEQ ID NO: 2474
  Description of Artificial Sequence: synthetic amino acid sequence

SEQ ID NO: 2733 - DNA, 993 bp, Artificial Sequence; identical to SEQ ID NO: 2475
  Description of Artificial Sequence: synthetic nucleic acid sequence

SEQ ID NO: 2734 - protein, 330 aa, Artificial Sequence; identical to SEQ ID NO: 2476
  Description of Artificial Sequence: synthetic amino acid sequence

SEQ ID NO: 2735 - DNA, 822 bp, Artificial Sequence
  Description of Artificial Sequence: synthetic nucleic acid sequence
atggctggatatttttcacattatgcttcagaccgtattcaattattagggacaacggagttatcattttataatttacttccagatgaagagaagaaaggaagaatgagaaaattatgccgacctgaaactccagcgattattgttacacgtgggttagaaccacccgaagaacttatacaagcatctcaagaaacgcatacaccaattattgttgcgaaagatgccacaacgagtttaatgagtaggttaacgacatttctcgaacatgaactcgcgaaaactacttctttgcacggtgtacttgttgatgtttacggtgtaggtgtactaattacaggagattctggcattgggaaaagtgaaactgcattagaattagtcaaacgaggccatagattagtggctgatgataatgtagaaatcaaagaaattactaaggatgaacttgtagggaaaccgcctaaacttatcgaacatttgctagagattcgtggtctcggaatcattaatgttatgactttgtttggagcaggatcaatattaactgaaaaacaagttcgattaaatattaatttagaaaattggaataagaataaattatacgatcgtgtaggtcttaatgaagaaacattgaaaattcttgatacggaaatcactaaaaaaacgataccagttagaccagggcgtaatgtagcagtaattattgaagtagctgctatgaattatcgtcttaatatcatgggtattaatacagcagttgaatttaatgagagacttaatgaagaaatcgttcgaaatagtcataaaagtgaggagtaa

SEQ ID NO: 2736 - protein, 273 aa, Artificial Sequence
  Description of Artificial Sequence: synthetic amino acid sequence
MAGYFSHYASDRIQLLGTTELSFYNLLPDEEKKGRMRKLCRPETPAIIVTRGLEPPEELIQASQETHTPIIVAKDATTSLMSRLTTFLEHELAKTTSLHGVLVDVYGVGVLITGDSGIGKSETALELVKRGHRLVADDNVEIKEITKDELVGKPPKLIEHLLEIRGLGIINVMTLFGAGSILTEKQVRLNINLENWNKNKLYDRVGLNEETLKILDTEITKKTIPVRPGRNVAVIIEVAAMNYRLNIMGINTAVEFNERLNEEIVRNSHKSEE

SEQ ID NO: 2737 - DNA, 377 bp, Artificial Sequence
  Description of Artificial Sequence: synthetic nucleic acid sequence
atgaatataacattaggatatatcgatcctgttgcctttagcttgggaccaatccaagttcgatggtatggaattattattgcttgtggtatcttacttggatacttcattgcacaagcagcattgaaacaggttggattacataaagacaccttaatcgatattatattttatagcgcgattgttggattcatagttgcgagaatatactttgttacatttcaatggccatattacatgaatcacttgagtgagataccaaaaatttggcatggtggtattgccatacatggtggcttaattggtggacttatctctgggattattgtttgtaaaatcaaaaatctacatccgtttcaaataggagatattgtggc

SEQ ID NO: 2738 - protein, 126 aa, Artificial Sequence
  Description of Artificial Sequence: synthetic amino acid sequence
MNITLGYIDPVAFSLGPIQVRWYGIIIACGILLGYFIAQAALKQVGLHKDTLIDIIFYSAIVGFIVARIYFVTFQWPYYMNHLSEIPKIWHGGIAIHGGLIGGLISGIIVCKIKNLHPFQIGDIVA

SEQ ID NO: 2739 - DNA, 345 bp, Artificial Sequence
  Description of Artificial Sequence: synthetic nucleic acid sequence
gtgatttccgtatcaagaattttcaatgtttcttcattaagacctacacgatcgtataatttattcttattccaattttctaaattaatatttaatcgaacttgtttttcagttaatattgatcctgctccaaacaaagtcataacattaatgattccgagaccacgaatctctagcaaatgttcgataagtttaggcggtttccctacaagttcatccttagtaatttctttgatttctacattatcatcagccactaatctatggcctcgtttgactaattctaatgcagtttcacttttcccaatgccagaatctcctgtaattagtacacctacaccgtaa

SEQ ID NO: 2740 - protein, 114 aa, Artificial Sequence
  Description of Artificial Sequence: synthetic amino acid sequence
VISVSRIFNVSSLRPTRSYNLFLFQFSKLIFNRTCFSVNIDPAPNKVITLMIPRPRISSKCSISLGGFPTSSSLVISLISTLSSATNLWPRLTNSNAVSLFPMPESPVISTPTP

SEQ ID NO: 2741 - DNA, 1080 bp, Artificial Sequence
  Description of Artificial Sequence: synthetic nucleic acid sequence
atgcttgaaaaaacattcgaagtcacgtatacaaatgaacaaaaaattgaattagaagcacaattgttttcaacacaacttttatttcaatttctcttttcgcaaggtaggttagaagaagcccgaacatatattttgaatcaatcttacgagatacaacagcatagggtgattaggaatttacttgcaatgtgttatttgtatctaggtgagtatgatagcgccaaagcaatgtttgaagaacttttaaaggaagataattcagacgtgcatgcactttgtcactacacattattactttataataaaaaagaaacagaaaaatatcaaaaatatcttaaaatacttaataaagtagtaccactaaatgacgacgaaacctttaaattaggaatcgtattgagttatttaaaacagtatcgtgcttctcaaaatttactttatccactttataaaaaaggtaaatttgtctctattcaaatgtataatgcattgagtttcaatttttattacctaggaaataaagacgaaagtattgagatgtggaacaagctcactcaaatttctgaagttgatgttggttatgcaccttgggtaattgaggaaagtaaaacggtatttgaatcacgagtgttaccattattactagatgataataatcattatcgactttacggtatttttttacttcatcaattaaatggaaaagaaatactaatgactgaagatatttggtcaattcttgaatcaatgaatgactatgagaaactttatctcacatatttggtacaaggactcacactcaataaattagattttatacacagaggtatgcaaaggttgtataattttaagaaattcaaatataacacgtctttatttacagattggattaatcaagcagaaatgattatagctgaaaatgtagatttagtagatgtcgatagatatgtagctgcatttgtttacctatcgtatcgtcgttctagccaaccacttaccaagaggcaattgatggacgattttaatgtttctagatacaaactgaataaagcaattgaatttatattgagcatataa

SEQ ID NO: 2742 - protein, 359 aa, Artificial Sequence
  Description of Artificial Sequence: synthetic amino acid sequence
MLEKTFEVTYTNEQKIELEAQLFSTQLLFQFLFSQGRLEEARTYILNQSYEIQQHRVIRNLLAMCYLYLGEYDSAKAMFEELLKEDNSDVHALCHYTLLLYNKKETEKYQKYLKILNKVVPLNDDETFKLGIVLSYLKQYRASQNLLYPLYKKGKFVSIQMYNALSFNFYYLGNKDESIEMWNKLTQISEVDVGYAPWVIEESKTVFESRVLPLLLDDNNHYRLYGIFLLHQLNGKEILMTEDIWSILESMNDYEKLYLTYLVQGLTLNKLDFIHRGMQRLYNFKKFKYNTSLFTDWINQAEMIIAENVDLVDVDRYVAAFVYLSYRRSSQPLTKRQLMDDFNVSRYKLNKAIEFILSI

SEQ ID NO: 2743 - DNA, 336 bp, Artificial Sequence
  Description of Artificial Sequence: synthetic nucleic acid sequence
atgactgaagtagattttgatgtagcaataatcggtgcaggtcctgccggtatgacagcagcagtatatgcatctcgtgccaatttaaaaactgtcatgattgaacgcggtatgccaggcggtcaaatggcaaacactgaagaagtagagaattttccaggatttgagatgatcacaggtcctgacttatctactaaaatgtttgaacatgctaaaaaatttggtgcggaataccaatatggcgatattaaatctgttgaagataaaggcgactataaagttatcaatttagggaatatagttgttgatgtaaatgtgtgtcacagtattgtttaa

SEQ ID NO: 2744 - protein, 111 aa, Artificial Sequence
  Description of Artificial Sequence: synthetic amino acid sequence
MTEVDFDVAIIGAGPAGMTAAVYASRANLKTVMIERGMPGGQMANTEEVENFPGFEMITGPDLSTKMFEHAKKFGAEYQYGDIKSVEDKGDYKVINLGNIVVDVNVCHSIV

SEQ ID NO: 2745 - DNA, 573 bp, Artificial Sequence
  Description of Artificial Sequence: synthetic nucleic acid sequence
atgaaaaaagtattagcactattatttgcgtcaacactcattttaggagcatgtggggacaaaaatgacgaatctaaaaatgattcttcatctaattctacagatagcgtttctgtagacaaaaatgacaatgaagataaaacaacagcgaaattcaaaaatgataaattaacaacagacaattttgatattgaaattttagaagccaaaactgtcaaagcatctgagtacgatgatgacaagaaaccaagtatcgctatcatctatggtgttaaaaataaaaaagacaaagatttaacagcatcttcagcatttatcgaatcatttgatatttatcaaaattctaaagatgttaagagaagattagaaattggcggtggatatgatactgatttaaaggaaaaatatgaagaagatatggataacaaaattaacaaagatggaaaagtaaaaggtgttatgttctttaaattgaaagacactaaaacaccagtaacacttgaagctaaagatccaaatcatagcaataacgaaaaagtgggtactaaagaatttaaaattaaagaaaaataa

SEQ ID NO: 2746 - protein, 190 aa, Artificial Sequence
  Description of Artificial Sequence: synthetic amino acid sequence
MKKVLALLFASTLILGACGDKNDESKNDSSSNSTDSVSVDKNDNEDKTTAKFKNDKLTTDNFDIEILEAKTVKASEYDDDKKPSIAIIYGVKNKKDKDLTASSAFIESFDIYQNSKDVKRRLEIGGGYDTDLKEKYEEDMDNKINKDGKVKGVMFFKLKDTKTPVTLEAKDPNHSNNEKVGTKEFKIKEK

SEQ ID NO: 2747 - DNA, 793 bp, Artificial Sequence
  Description of Artificial Sequence: synthetic nucleic acid sequence
atgtctcaaaaaattaaagttatagtgcctatcgtacttggattaatcattcttttggggattgcttggggtgtatatgcctttgtaacaaatacacctaaaaatgcatatttactgagcgaaaaaaagaccgctataaatgtaaaatcttatgttgatcatcgttttagtaacgaaaagaaattccaaaaaaaattaaaagataattcatatgttaatacgtataatctacatgctaatgcatctaaggaatatctaaaagatcttggtttacctaaaactattttagatagttctaaaataactggaactatcggtcatgatccaaaatcaaataaaggaatcatgagcgtatcacctaaaatattagataaagatattggtaagttccaatggacagcaaatgattcaactcaattcttcgaatcacccttattcaagaaaaagtatagcgtcaaaaactcagaactattagaaacagctgctcaaatctttgatgaagatccttctgactataaagaagagggactttcaaatgcaaactttgatctgaataataaattgggtattgttcattctcaacaagaagatgttaaaaaactgattaagcgatatacagatttagtcatcgatcaattagaagatgatgactttgaaaaaggtaaaaaagaaaaagttaaaattgacggtgaaacaaaaaatttaaaacctatcactttaaatataagtcgtgataaagcaaaaaaaatcactgtcgcagcattaaaaaaagctaaaaatgataaagaattac

SEQ ID NO: 2748 - protein, 265 aa, Artificial Sequence
  Description of Artificial Sequence: synthetic amino acid sequence
  MOD_RES (265): variable amino acid
MSQKIKVIVPIVLGLIILLGIAWGVYAFVTNTPKNAYLLSEKKTAINVKSYVDHRFSNEKKFQKKLKDNSYVNTYNLHANASKEYLKDLGLPKTILDSSKITGTIGHDPKSNKGIMSVSPKILDKDIGKFQWTANDSTQFFESPLFKKKYSVKNSELLETAAQIFDEDPSDYKEEGLSNANFDLNNKLGIVHSQQEDVKKLIKRYTDLVIDQLEDDDFEKGKKEKVKIDGETKNLKPITLNISRDKAKKITVAALKKAKNDKELX

SEQ ID NO: 2749 - DNA, 792 bp, Artificial Sequence
  Description of Artificial Sequence: synthetic nucleic acid sequence
atgacaattcttgttcattcaaagcatcaaccgagcgaatacgcagcgattgcacatcagttgatggcgacaacacatgtgtgttgtgaacaagtagggttcattgaatcagtaaactatgaaaatggggataactatcacttggtaatgagtggaaatgaattttgtggtaatgcgactatgtcttacattcactatttaaaagaacgtttattgatacagcatcaacaatttcaattaagagtttcgggatgttctcatcctgtagagtgtaaagttcattcgcaacattatgaagtgactatgccaaaagtacatcaagttaaggaaagatttgtgaaattaggggaccaacagtttaaagcatttgaaattagatacgatacatacattcattacgtgttgatgtgtgatggtgtagatttagcaatgaaacagcgcgtggaagattttgtcagtgcgcaaacatggcatcaacaatttaaaacgattggcgtcatgctttttcaacaagataaacaattcatatatccactgatacatatacctaaaatagatagcttaatctgggaaaatagctgtggttcaggagcggcttctatcggtgtgttagttaattatctaacagatcatgatattcaagattacctagttaaccaacccggaggcagtattattgtctcatccagaaagtctggacaaaatgaataccaaacaacgattaagtgtcaagtttcaactgtcgcaacaggacaagcatatatagaacaggagacaatgacgcaaatatga

SEQ ID NO: 2750 - protein, 263 aa, Artificial Sequence
  Description of Artificial Sequence: synthetic amino acid sequence
MTILVHSKHQPSEYAAIAHQLMATTHVCCEQVGFIESVNYENGDNYHLVMSGNEFCGNATMSYIHYLKERLLIQHQQFQLRVSGCSHPVECKVHSQHYEVTMPKVHQVKERFVKLGDQQFKAFEIRYDTYIHYVLMCDGVDLAMKQRVEDFVSAQTWHQQFKTIGVMLFQQDKQFIYPLIHIPKIDSLIWENSCGSGAASIGVLVNYLTDHDIQDYLVNQPGGSIIVSSRKSGQNEYQTTIKCQVSTVATGQAYIEQETMTQI

SEQ ID NO: 2751 - DNA, 1218 bp, Artificial Sequence
  Description of Artificial Sequence: synthetic nucleic acid sequence
atggttggtagtggaccggtcgctattcaacttgctcgactatgtcatttacatggagaacatatagttgatatggtgagtcgcgttcatgcatcaaccaaatctaagagagtctttgatgcttatcaacgtgacggctttttttcagtaatgactcaaaatgatgcacatcagtgtttttcaggtaagtttacggttagacatttttttaaagatgttaaagatattactgaatattatgacgtggtgattttagcatgtactgccgatgcgtatcgaccgatattacagcaattatctaagtccacattaaagcgtattaagcaaatcatcttggtctcaccaacattaggatcacatatgcttgttaagcaattactatcagatgttcaatgtgaaggtgaagtgatttcattttccacttatctaggcgatacccgaatatttgataaagcacaaccacattgtgtcctaaccacacgagttaaatcaaaattattcgtaggttcgactcaatctcagtctatgacgttgtgtaagcttaagtctttatttgactatttgaatatagaattaacaacgatggacacaccactacatgcggagatacataatagttcactttatgtacacccaccattgtttatgaatcaattttcattaaaggcggtatttgaagggacgaaagtaccagtatatgtatataagctatttccagagggtccaatcacaatgaccttaatacacgaaatgcgattaatgtggcaagaaatgatgatgatattaaaaaaattaaaggtaccttcggtcaatcttctaaagtttatggtgaaagaaaactaccctatacgttatgagaccatgcgcgaagtagatattgaaaactttaaaaatttaccagctattcatcaagagtatctactttatgtgcgatatacagcaattttaatcgatccgttttctaatccggacgatcaaggtgcatattttgatttttctgccgtaccatacaaacatgttgatactgatgaacaaggagtcatacatataccacgcatgccgagtgaagattattatcgtactttgataattcaagcgattggaagagcattaaacgttgcaacaccgatgattgacacattgttattacgttatgaaaatactgttaaacaatactgtgacacacatttacatcaacaactatattccctaaattga

SEQ ID NO: 2752 - protein, 405 aa, Artificial Sequence
  Description of Artificial Sequence: synthetic amino acid sequence
MVGSGPVAIQLARLCHLHGEHIVDMVSRVHASTKSKRVFDAYQRDGFFSVMTQNDAHQCFSGKFTVRHFFKDVKDITEYYDVVILACTADAYRPILQQLSKSTLKRIKQIILVSPTLGSHMLVKQLLSDVQCEGEVISFSTYLGDTRIFDKAQPHCVLTTRVKSKLFVGSTQSQSMTLCKLKSLFDYLNIELTTMDTPLHAEIHNSSLYVHPPLFMNQFSLKAVFEGTKVPVYVYKLFPEGPITMTLIHEMRLMWQEMMMILKKLKVPSVNLLKFMVKENYPIRYETMREVDIENFKNLPAIHQEYLLYVRYTAILIDPFSNPDDQGAYFDFSAVPYKHVDTDEQGVIHIPRMPSEDYYRTLIIQAIGRALNVATPMIDTLLLRYENTVKQYCDTHLHQQLYSLN

SEQ ID NO: 2753 - DNA, 372 bp, Artificial Sequence
  Description of Artificial Sequence: synthetic nucleic acid sequence
atgactcgttccaatgataaatatgtgtccctagatgatagaaatataaagggtgacgcatttattagtatacataatgatgcgcttgattcttcaaatgccaatggagtgactgtttattggtttaaagacaagcaagaatcacttgcacaaactttaaattctgcaattcaaaagaaggcattattgacaaatcgaggttctagacaacaaaattatcaagtgttgagacagacagatataccagcagtactgttagagttaggctatataagtaatcctactgatgaatcaatgattaatgatcaattacatagacaagtggttgaacaagctattgttgatggtttaaaacaatatttctcgtcctag

SEQ ID NO: 2754 - protein, 123 aa, Artificial Sequence
  Description of Artificial Sequence: synthetic amino acid sequence
MTRSNDKYVSLDDRNIKGDAFISIHNDALDSSNANGVTVYWFKDKQESLAQTLNSAIQKKALLTNRGSRQQNYQVLRQTDIPAVLLELGYISNPTDESMINDQLHRQVVEQAIVDGLKQYFSS

SEQ ID NO: 2755 - DNA, 1275 bp, Artificial Sequence
  Description of Artificial Sequence: synthetic nucleic acid sequence
atgattaagatgccaagaggtacccaagatatcttgccgcaagattctgctaaatggcgttacattgaaaatcgattacacacattaatggaattgtataattataaagaaataagaacgccaatttttgaaagtactgaactttttgcaagaggcgtgggggattctactgacgttgttcaaaaggaaatgtatacatttaaagataaaggggatcgtagtttaacattacgtcctgaaggaactgcagccgttgtacgttcatatattgaacacaaaatgcaaggtgaacccaatcaacctatcaaactttactacaatggtcctatgtttagatacgaacgtaaacaaaaaggaagatatcgccaatttaaccaatttggtgtcgaagcaataggagcggaaaatcctagtattgatgctgaaatactcgctatggttatgcatatatatgagtctttcggattaaagcatttaaagttagttatcaatagtattggtgatagtgaatcacgtaaagaatataacgaagcattagtaaaacattttgaacctgtgattgatacattttgttcagattgtcaatcaagattacacactaatcctatgagaattttagattgtaaaatcgatagagataaagaagcagtaaaaaatgcaccccgtatcacagattatctcaataatgattctaaatcttattatgaacaagttaaattacatcttgataatttgaacatatcttatgttgaagatcctaacttagttcgtgggttagattattatactcatactgcctttgaattaatgattgataatccagagtatgatggagctatcactacattatgtggtggtggtcgatataatgggttgttacaattattagatggtccagatgaaacaggtattgggtttgcactaagtattgaaagattattgatggcacttgatgaagaaggtatttcattagatgtaagtgaagattttgatttatttgttgtgacaatgggagaagatgccgatcgttatgctgttaagttaatcaatgatttaagaagaaatggaataaaagtagataaggattatctaaacagaaaaattaaaggacaaatgaaacaagctgaccgtcttaatgctaaatatacagtagtaattggagatcaagagcttgaaaataatgaaattggtgtgaaaaacatgatttcaggcgaatcagaaaatgtacaattagacgaattggttaattattttaaaagtagaaaggaagtctaa

SEQ ID NO: 2756 - protein, 424 aa, Artificial Sequence
  Description of Artificial Sequence: synthetic amino acid sequence
MIKMPRGTQDILPQDSAKWRYIENRLHTLMELYNYKEIRTPIFESTELFARGVGDSTDVVQKEMYTFKDKGDRSLTLRPEGTAAVVRSYIEHKMQGEPNQPIKLYYNGPMFRYERKQKGRYRQFNQFGVEAIGAENPSIDAEILAMVMHIYESFGLKHLKLVINSIGDSESRKEYNEALVKHFEPVIDTFCSDCQSRLHTNPMRILDCKIDRDKEAVKNAPRITDYLNNDSKSYYEQVKLHLDNLNISYVEDPNLVRGLDYYTHTAFELMIDNPEYDGAITTLCGGGRYNGLLQLLDGPDETGIGFALSIERLLMALDEEGISLDVSEDFDLFVVTMGEDADRYAVKLINDLRRNGIKVDKDYLNRKIKGQMKQADRLNAKYTVVIGDQELENNEIGVKNMISGESENVQLDELVNYFKSRKEV

SEQ ID NO: 2757 - DNA, 1179 bp, Artificial Sequence; identical to SEQ ID NO: 1907
  Description of Artificial Sequence: synthetic nucleic acid sequence

SEQ ID NO: 2758 - protein, 392 aa, Artificial Sequence; identical to SEQ ID NO: 1908
  Description of Artificial Sequence: synthetic amino acid sequence

SEQ ID NO: 2759 - DNA, 960 bp, Artificial Sequence
  Description of Artificial Sequence: synthetic nucleic acid sequence
gtgaataaagttgataatcttgaaatgcgtaatgatatctatgatttctattctttaggctttggagatccatatcctatttctggttcacatggattaggacttggagatttgctagatgcagttgttgaaaactttaataaagaatcagaagatccttatgacgaagatacgatacgtctttctatcatcggtagacctaatgttggtaaatctagcttggtcaatgctattttaggcgaagaacgtgttattgtgtctaatgttgctggtacaactcgagatgccattgataccgagtactcttatgatggacaagattatgtattgattgatactgctggaatgagaaaaaaaggtaaggtgtatgaatcgactgaaaaatattctgtattacgtgcattaaaagcgattgagcgttcagaagtagtattagtagttatcgatgctgaacaaggtataattgaacaagataaacgtgtagctggctatgcacatgaggaaggtaaagctattgtcattgtagtaaataaatgggatacagttgaaaaagatagtaagacaatgaaaaaattcactgatgatgttagaaatgaatttcaatttttagattatgctcaaatcgcgttcgtatcagcaaaagaagggctaagattaaaaacattattcccttatatcaatcaagccagtgaaaatcataaaaagcgtgtccaaagttctacactaaatgaagttgttactgatgccatctctatgaatccaacacctactgacaaaggtagaagacttaatgtattctatacaactcaggttgcaattgaaccaccgacatttgtagtatttgtcaatgatgttgaattaatgcatttttcttataggagatatttagaaaatcaaatacgtaatgcttttggttttgaaggaacacctattcatattattccaagaaaaagaaattaa

SEQ ID NO: 2760 - protein, 319 aa, Artificial Sequence
  Description of Artificial Sequence: synthetic amino acid sequence
VNKVDNLEMRNDIYDFYSLGFGDPYPISGSHGLGLGDLLDAVVENFNKESEDPYDEDTIRLSIIGRPNVGKSSLVNAILGEERVIVSNVAGTTRDAIDTEYSYDGQDYVLIDTAGMRKKGKVYESTEKYSVLRALKAIERSEVVLVVIDAEQGIIEQDKRVAGYAHEEGKAIVIVVNKWDTVEKDSKTMKKFTDDVRNEFQFLDYAQIAFVSAKEGLRLKTLFPYINQASENHKKRVQSSTLNEVVTDAISMNPTPTDKGRRLNVFYTTQVAIEPPTFVVFVNDVELMHFSYRRYLENQIRNAFGFEGTPIHIIPRKRN

SEQ ID NO: 2761 - DNA, 999 bp, Artificial Sequence
  Description of Artificial Sequence: synthetic nucleic acid sequence
atgagaaaaattacagtttttggtatgggtagttttggtactgcattagctaatgtattagctcaaaatggtcatgatgttttaatgtggggcaaaaatgtagagaatgtagatgaacttaacacacatcatatgaacaaaaattatcttaaagatgctaaattagattcatctataaaagcaactgtagatttaaataaggcagtgcaattttcagatatctatcttatggcactacctacaaaagcaattagagaagtatcaaaagatatcgatcaattactcacatctaaaaagacttttattcatgttgctaaaggcattgaaaacgatacatttaagcgcgtatctgaaatgattgaggactctatctcttcagaacataatggaggaatcggcgtcttatcaggtccaagtcatgctgaagaagttgttataaaacaacctacaactgtagctgcatcatctaaagataataatgtgagcaaacttattcaagatttatttatgaacgactatttacgtgtttacacaaataatgatttagtaggtgtagaattaggtggtgctttaaaaaatattatagctatagctagtggtatcgttgccggcatgggttacggtgataatgcaaaagcagctttaatgacacgaggtttagccgaaatcagtcgacttggtgagaaacttggtgcagatccaatgactttcttaggtctaggtggcataggtgacttgatcgtaacttgtacgtccacacattcacgaaattacacacttgggtttaaattagggcaaggcaaaacagcagaagaagctttaaaagagatgaaaatggtggttgaaggtatttatacaactaaatcagtatatcatcttgctcaacaagaaggagtagagatgcctatcactaacgcattatatgaagttttatttgaagatgtccctgtaagtaaaagtgttagaacacttatggaaagagacaaaaaagcagaataa

SEQ ID NO: 2762 - protein, 332 aa, Artificial Sequence
  Description of Artificial Sequence: synthetic amino acid sequence
MRKITVFGMGSFGTALANVLAQNGHDVLMWGKNVENVDELNTHHMNKNYLKDAKLDSSIKATVDLNKAVQFSDIYLMALPTKAIREVSKDIDQLLTSKKTFIHVAKGIENDTFKRVSEMIEDSISSEHNGGIGVLSGPSHAEEVVIKQPTTVAASSKDNNVSKLIQDLFMNDYLRVYTNNDLVGVELGGALKNIIAIASGIVAGMGYGDNAKAALMTRGLAEISRLGEKLGADPMTFLGLGGIGDLIVTCTSTHSRNYTLGFKLGQGKTAEEALKEMKMVVEGIYTTKSVYHLAQQEGVEMPITNALYEVLFEDVPVSKSVRTLMERDKKAE

SEQ ID NO: 2763 - DNA, 368 bp, Artificial Sequence
  Description of Artificial Sequence: synthetic nucleic acid sequence
atgtgcggggtagcgacatttcttcaagcaaataaagtcacagggactggattaccgattgtactaggatgtacgtttactgccgttgcacctatgatactcatcggtcaaacgaaaggacttgatgttttatatggttcgcttttaatatccggtatcttagttgttttaattgcaccttttttctcttatttagttaaattctttccacctgttgtaacaggaagtgttgtgacaattattggaatcaatttaatgccagttgcaatgaattacttggcaggtggtgaaggagcgaaaaactatggcgatactaagaatttaatattaggtggtgttacactactcattattcttatttgatttat

SEQ ID NO: 2764 - protein, 122 aa, Artificial Sequence
  Description of Artificial Sequence: synthetic amino acid sequence
  MOD_RES (122): variable amino acid
MCGVATFLQANKVTGTGLPIVLGCTFTAVAPMILIGQTKGLDVLYGSLLISGILVVLIAPFFSYLVKFFPPVVTGSVVTIIGINLMPVAMNYLAGGEGAKNYGDTKNLILGGVTLLIILIFX

SEQ ID NO: 2765 - DNA, 381 bp, Artificial Sequence
  Description of Artificial Sequence: synthetic nucleic acid sequence
gtgtttattttgttaacatttggattttatgtattttttgctggccataataatccaggtggtggctttattggtggcttgatttttagctcggcatttatcttaatgtttcttgcctttgatgtaaatgaagtgttgaaaagcttgcctattgattttaaaaaattaatgattataggttcactcatatctgttgcaactgcatcagtgcctatgttttttgggaagccatttttatatcaaactgaagcaaatgtaacatttccattactaggacatgttcatgttactactgtgactttatttgagcttggcatcttattaacagtagtaggtgtgattgttacagttatgctatctataagtgggggtagatcatga

SEQ ID NO: 2766 - protein, 126 aa, Artificial Sequence
  Description of Artificial Sequence: synthetic amino acid sequence
VFILLTFGFYVFFAGHNNPGGGFIGGLIFSSAFILMFLAFDVNEVLKSLPIDFKKLMIIGSLISVATASVPMFFGKPFLYQTEANVTFPLLGHVHVTTVTLFELGILLTVVGVIVTVMLSISGGRS

SEQ ID NO: 2767 - DNA, 324 bp, Artificial Sequence
  Description of Artificial Sequence: synthetic nucleic acid sequence
gtgataggatttttagtgtttattggaacttatatgattttatctattaatttaattcgtattgttattggtatttctatttatacacacgccggtaatttaattattatgagtatggggaaatatggacctcatatgtctgaaccgctaattcaaggtcatgctcaaaactttgttgatcctttattacaagctatcgttttaacagctattgtgattggatttggtatgactgcgtttttattggtgttaatatatagaacttacagagtaactaaagaggatgaaataagtgcattgaaaggtgatgaagatgatgagtaa

SEQ ID NO: 2768 - protein, 107 aa, Artificial Sequence
  Description of Artificial Sequence: synthetic amino acid sequence
VIGFLVFIGTYMILSINLIRIVIGISIYTHAGNLIIMSMGKYGPHMSEPLIQGHAQNFVDPLLQAIVLTAIVIGFGMTAFLLVLIYRTYRVTKEDEISALKGDEDDE

SEQ ID NO: 2769 - DNA, 1476 bp, Artificial Sequence
  Description of Artificial Sequence: synthetic nucleic acid sequence
atgttgttgccttttgtatgtgctttaattttagtcttcactaaaaataaaaatcgtatttcgaaaatcctatccattacaactatgattgttaatacaatgatttcaattgctttacttatttatgtcgttaatcataaaccgataacacttgattttgggggatggaaagcacctttcggcattcaatttctaggtgattcactgagtctgcttatggtgtcagtatcatcttttgttgttacgctaataatggcatacggctttggtagaggggagaagcgagtcaatcgatttcaccttcctacatttattcttttattaacagtaggtgttattggttcgtttttaacttctgatttatttaacctatacgtgatgtttgaaattatgcttcttgcttcgtttgtacttgttacattaggacaatctgttgaacaattacgtgcagcgatagtatatgttgttctgaatattttaggttcgtggttgcttttattaggaattggcatgttatataagacagtcggaacacttaatttctcacatttagcgatgcgattgaatcatatggaaaataaccaaacaataacgatgatatctttagtatttctagttgcttttagttcaaaggcagcactagtgattttcatgtggttacctaaagcatatgcagtgcttaatacggaacttgccgcgttatttgcagcattgatgacaaaagttggagcttatgcgcttattcgtttttttactttactattcgaccatcatccaagcgtcacgcatacattgctcgtgtttatggcttgtatcacaatgattatcggtgcatttggtgtcatcgcttacaaagatattaagaaaattgcggcttatcaagttattttgtctattggattcattattttaggtttaggttctcatactatatcaggtgtaaatggtgctatcttctatttagcgaatgatattatcgttaagacattattgttttttgtaattggtagtcttgtttatatgtcaggctatcgaaattatcagtatttaagtggactggcaaaaagagaaccattctttggtgttgcatttgtcgtggtaatttttgctataggtggcgtacctccttttagtggctttccgggtaaagtcttaatattccaaggggctattacaaatggtaattatattggtttagcacttatgattgtgacaagtttaattgctatgtatagtctttttagagtgatgtttataatgtattttggtgatgctgacggagaacaagtacaatttagaccactacctatttatcgtaaaggtttacttagtgttttagttgtagtggtattagcgatgggtattgcagcccctgttgttctgaaagtaacagaggatgcaacaaatcttaatatgaaagaagatgtctttcaaaagaatgtaaatacacatttgaaggaggttaatcataagtga

SEQ ID NO: 2770 - protein, 491 aa, Artificial Sequence
  Description of Artificial Sequence: synthetic amino acid sequence
MLLPFVCALILVFTKNKNRISKILSITTMIVNTMISIALLIYVVNHKPITLDFGGWKAPFGIQFLGDSLSLLMVSVSSFVVTLIMAYGFGRGEKRVNRFHLPTFILLLTVGVIGSFLTSDLFNLYVMFEIMLLASFVLVTLGQSVEQLRAAIVYVVLNILGSWLLLLGIGMLYKTVGTLNFSHLAMRLNHMENNQTITMISLVFLVAFSSKAALVIFMWLPKAYAVLNTELAALFAALMTKVGAYALIRFFTLLFDHHPSVTHTLLVFMACITMIIGAFGVIAYKDIKKIAAYQVILSIGFIILGLGSHTISGVNGAIFYLANDIIVKTLLFFVIGSLVYMSGYRNYQYLSGLAKREPFFGVAFVVVIFAIGGVPPFSGFPGKVLIFQGAITNGNYIGLALMIVTSLIAMYSLFRVMFIMYFGDADGEQVQFRPLPIYRKGLLSVLVVVVLAMGIAAPVVLKVTEDATNLNMKEDVFQKNVNTHLKEVNHK

SEQ ID NO: 2771 - DNA, 372 bp, Artificial Sequence
  Description of Artificial Sequence: synthetic nucleic acid sequence
gtgatttatattctgcatcgcttttttggtgaagaattttatttgaaaaagatatgggtggctattaaatttttagctgtatacctataccagcttattacttctagtataagtaccataaattacatcttatttaagacgaatgaagttaatccaggtttactcacatatgaaacttcattaaaaagtaattgggctattacttttttaacgattttaattattattactccaggatcgacagttattcgaatttctaaaaatactaataaattttttattcacagtattgatgtgtcagaaaaagataaagaaaatcttctaaaaagtattaagcagtatgaggatttaattttggaggtgacacgatga

SEQ ID NO: 2772 - protein, 123 aa, Artificial Sequence
  Description of Artificial Sequence: synthetic amino acid sequence
VIYILHRFFGEEFYLKKIWVAIKFLAVYLYQLITSSISTINYILFKTNEVNPGLLTYETSLKSNWAITFLTILIIITPGSTVIRISKNTNKFFIHSIDVSEKDKENLLKSIKQYEDLILEVTR

SEQ ID NO: 2773 - DNA, 1203 bp, Artificial Sequence
  Description of Artificial Sequence: synthetic nucleic acid sequence
atgataaatacacgtttaacgcgacatgagatgataaatcaaatgaattcagtcgacatagcaacgattgtacacacgttgcctttagaattagaagggtttaatttatatcattttaatgatttaacacaattagataaacatgatgtttcaggttacaaatttaatttagaatcgattgcatcaattatgtttacgtctggaacgacgggacctcaaaaagctgtgcctcaaacgtttaataatcatttagccagtgctaaaggctgtaaacaaagtttaggattcgaacaaaatactgtgtggctttcggtcttacctatatatcatatttctgggctcagtgttattttgcgcgcagtgatagaaggattcactgtcagacttgttaaaaagtttcaaactgatgatatgttaacacaaataaagacttatccaatcacccatatgtcccttgttccacaaacgttaaagtggttaatggatgcaggattgactcaaccattttctttagaaaaaattctgctaggtggtgctaaattatcaccacaattaattgagcaagcattgacttatcgtttacctgtatataattcttttggtatgacagaaacttgctctcagtttctaacagcctcacctcaaatgctcaaagaacgtttcgatactgttggaaaaccaagtgaaaatgtcgaagtgaaaataaaaaatcccaacgcatatggacatggagagttattaattaaaggtgaaaatgtgatgaatggttatttatatcccaaatatttaaaagacacatttgataatgatgggtattttcaaactggagatatagctgaaatagatgatgaaggttacgtcataatatatgatcggcgcaaagatttgattataagtggtggagagaatatttatccttaccaaattgaaacaatcgcaaaagactttgaaggcattgaagatgccgtatgtgtaggaatatcagatgatacttggggtcaagtaccaatattatattatgtgacaaatcaagatattaatcaaactgaattaatagaacattttgagaatcatttagctagatataaaattcctaaaaaatattatcaggtcaaatctttaccttatacatcgacaggtaaattacaacgtaaaaaggtcaaaagtgaagacttgaatgagggaaagaataatgaaagttaa

SEQ ID NO: 2774 - protein, 400 aa, Artificial Sequence
  Description of Artificial Sequence: synthetic amino acid sequence
MINTRLTRHEMINQMNSVDIATIVHTLPLELEGFNLYHFNDLTQLDKHDVSGYKFNLESIASIMFTSGTTGPQKAVPQTFNNHLASAKGCKQSLGFEQNTVWLSVLPIYHISGLSVILRAVIEGFTVRLVKKFQTDDMLTQIKTYPITHMSLVPQTLKWLMDAGLTQPFSLEKILLGGAKLSPQLIEQALTYRLPVYNSFGMTETCSQFLTASPQMLKERFDTVGKPSENVEVKIKNPNAYGHGELLIKGENVMNGYLYPKYLKDTFDNDGYFQTGDIAEIDDEGYVIIYDRRKDLIISGGENIYPYQIETIAKDFEGIEDAVCVGISDDTWGQVPILYYVTNQDINQTELIEHFENHLARYKIPKKYYQVKSLPYTSTGKLQRKKVKSEDLNEGKNNES

SEQ ID NO: 2775 - DNA, 536 bp, Artificial Sequence
  Description of Artificial Sequence: synthetic nucleic acid sequence
gtgaagttaacgcatcgagaaagtttgtttacggaaatagtaacttatagtggagaaacttattatggagaatgtaatgcatttttaactaattggtatgataaagaaacaatactcacagtcgtaaacagattaagacagtggataccgcaagtacttcataaagatatgacatcttttgattcatggttaccttacctaaatcaaatgaatgatgcgccagctgctagatcaatggttgtcatggctgtttatcaaatgtataacgacttgcatgattttgaagtacaatacggtgctacagttagtggcttaactaatagtcaaattgaaacattattagaaacaagaccgaaacgtataaaacttaaatggtcaacatcactcatcaaagatcttgaaactatacgtttattaaattttgattgtgatattgctatagatgcaaatgaatcattaacaaagccatcatttttacaattagccaacgtaaatacatcagatattatatatattgaagaaccttttaaaattct

SEQ ID NO: 2776 - protein, 179 aa, Artificial Sequence
  Description of Artificial Sequence: synthetic amino acid sequence
VKLTHRESLFTEIVTYSGETYYGECNAFLTNWYDKETILTVVNRLRQWIPQVLHKDMTSFDSWLPYLNQMNDAPAARSMVVMAVYQMYNDLHDFEVQYGATVSGLTNSQIETLLETRPKRIKLKWSTSLIKDLETIRLLNFDCDIAIDANESLTKPSFLQLANVNTSDIIYIEEPFKIL

SEQ ID NO: 2777 - DNA, 666 bp, Artificial Sequence
  Description of Artificial Sequence: synthetic nucleic acid sequence
atgcaacaagaaacgacatcatggtacaaacaagaatggtttatagttttatcacttttattcatttttccactaggtttatttctcatgtggaaatttagcaagtggccatctattgcaagaacaatcattactgttgcaatttcagttatcgtattagcaagcattacctattatggtaatctacaaatgattgtaccagcaacatcaaattcaaataacgaaactaaagaaactacagagaataatgtaaatgataaagacgagcgaaatcataaaactgcagtagaagaaacaaaaactaattatgactccaccaaagaaaatactaaagaacctggaaaagaaaatgaatctgcaacacgattggagaactctgcgcttgaaaaggcaaagtcatattatgatgattttcacatgtctaaactaggaatttatgatattttaacatctgaatatggagaaaaatttgataaagaagatgcacaatatgctatagatcatctagaggctgattatgaaaagaatgcacttgagaaagcaaaatcatatgccaaagatatgcatatgtctaatgactcaatttacgatcttttggtgtctaactacggtgaaaaatttacagaatcagaagcaaaatatgctattgagcatttggataattaa

SEQ ID NO: 2778 - protein, 221 aa, Artificial Sequence
  Description of Artificial Sequence: synthetic amino acid sequence
MQQETTSWYKQEWFIVLSLLFIFPLGLFLMWKFSKWPSIARTIITVAISVIVLASITYYGNLQMIVPATSNSNNETKETTENNVNDKDERNHKTAVEETKTNYDSTKENTKEPGKENESATRLENSALEKAKSYYDDFHMSKLGIYDILTSEYGEKFDKEDAQYAIDHLEADYEKNALEKAKSYAKDMHMSNDSIYDLLVSNYGEKFTESEAKYAIEHLDN

SEQ ID NO: 2779 - DNA, 735 bp, Artificial Sequence
  Description of Artificial Sequence: synthetic nucleic acid sequence
atgagaaaattatttctatcaattttatctattataataatttcaagtttttgtgttgcaacagggtttcaaaacgttaatgctgcaaataatgaggtgagcaaacctcaaagtaatgtggatagtaaaactaaacaaaatattattaaaaaaataaaaaaatctaatgcttataaaaagcacgctaattcaacttctattgactcaataaaagatgacgatattattgttcatttggataaaggtaaaaacaccaatgtatattctattaactatgtatttggtaaaaaattagctaaaatgaatgataaccttgcaatgattgaattaaaatataacgaagcaaacaatgaagttttctacaatcatatgatgtattcaaaatttgttaaatataataataaagaatatattaatatgaaaggcattttaaatggcaaaccttattatgaatttaatatagatcagaaaggtcattactacgataaaaactttaaacatacctctaaagatgaaatcgaaaaagattctgctaaaaacttaccacctaaagagcgtggttggtgtgaatgggcagtaggagctttatgtggtaccggtggagctgcaggttgttgggcaactgctacagctttaggtattactactggttggggaggcttttcattagctacaatttgtggtctgataagctctctaggctgtactggtgcaaccaactatatttgtaaataa

SEQ ID NO: 2780 - protein, 244 aa, Artificial Sequence
  Description of Artificial Sequence: synthetic amino acid sequence
MRKLFLSILSIIIISSFCVATGFQNVNAANNEVSKPQSNVDSKTKQNIIKKIKKSNAYKKHANSTSIDSIKDDDIIVHLDKGKNTNVYSINYVFGKKLAKMNDNLAMIELKYNEANNEVFYNHMMYSKFVKYNNKEYINMKGILNGKPYYEFNIDQKGHYYDKNFKHTSKDEIEKDSAKNLPPKERGWCEWAVGALCGTGGAAGCWATATALGITTGWGGFSLATICGLISSLGCTGATNYICK

SEQ ID NO: 2781 - DNA, 855 bp, Artificial Sequence
  Description of Artificial Sequence: synthetic nucleic acid sequence
atgaagtggcttaaacaactacaatcccttcacacgaaactcgttattgtttatgtactactcattattattggtatgcaaatcatcggtttgtattttacgaatagtttagaaaaggaattactcgataacttcaagaagaacataacacaatatgcgaagcaattagacgtcaatattgaaaaggtttataaagataaagataaaggttcagtcaacgctcaaaaggatatccaagaccttttgaatgaatatgcgaatcgccaagaaataggagaaatacgctttattgataaagaccaaattatcatggcaacaaccaagcagtctaaccgtggtcttatcaatcaaaaggttaacgacggttcagttcaaaaggcgctctccttagggcaaacgaatgatcatatggttcttaaggattacggaagtggtaaagagcgtgtttgggtatataatataccggttaaagttgataaacagacaatcggtgatatatacatagaatcgaaaattaatgatgtatacaatcagctgaacaacattaatcagatattcatcgtagggacagcgatatcactattcattacagtaatactaggattcttcattgcacgaacgattactaagccgataaccgatatgcgtaaccaaaccgttgagatgtctaaaggtaactacacgcaacgagtgaagatatacggtaacgatgaaatcggtgagctcgcacttgccttcaataacttatcgaaacgtgtccaagaagcacaagcgaatacagaaagtgagaaacgtcgcctagattctgttatcacacataattacttgttgaatgtattacattttgattgttaa

SEQ ID NO: 2782 - protein, 284 aa, Artificial Sequence
  Description of Artificial Sequence: synthetic amino acid sequence
MKWLKQLQSLHTKLVIVYVLLIIIGMQIIGLYFTNSLEKELLDNFKKNITQYAKQLDVNIEKVYKDKDKGSVNAQKDIQDLLNEYANRQEIGEIRFIDKDQIIMATTKQSNRGLINQKVNDGSVQKALSLGQTNDHMVLKDYGSGKERVWVYNIPVKVDKQTIGDIYIESKINDVYNQLNNINQIFIVGTAISLFITVILGFFIARTITKPITDMRNQTVEMSKGNYTQRVKIYGNDEIGELALAFNNLSKRVQEAQANTESEKRRLDSVITHNYLLNVLHFDC

SEQ ID NO: 2783 - DNA, 312 bp, Artificial Sequence
  Description of Artificial Sequence: synthetic nucleic acid sequence
atgcacataaattcaaaattagctaaaatgccgcgtagaattgatggcaagttattctcggttagtcatacatcagtaagtaaagcgtttagaaaagcaaaagaagtgataggattaaacgataataatataactccctattcactcagacatacgcacacatcttacttactatctaaaggcataccaatcgagtatataagtaaacgtttaggtcacgctactatatcacaaacgttagacacgtattcacatttattagaagaacataaaaaagagcaaggccaacgtgtcagagaaatattctcttga

SEQ ID NO: 2784 - protein, 103 aa, Artificial Sequence
  Description of Artificial Sequence: synthetic amino acid sequence
MHINSKLAKMPRRIDGKLFSVSHTSVSKAFRKAKEVIGLNDNNITPYSLRHTHTSYLLSKGIPIEYISKRLGHATISQTLDTYSHLLEEHKKEQGQRVREIFS

SEQ ID NO: 2785 - DNA, 1014 bp, Artificial Sequence; identical to SEQ ID NO: 1219
  Description of Artificial Sequence: synthetic nucleic acid sequence

SEQ ID NO: 2786 - protein, 337 aa, Artificial Sequence; identical to SEQ ID NO: 156
  Description of Artificial Sequence: synthetic amino acid sequence

SEQ ID NO: 2787 - DNA, 501 bp, Artificial Sequence; identical to SEQ ID NO: 1423
  Description of Artificial Sequence: synthetic nucleic acid sequence

SEQ ID NO: 2788 - protein, 166 aa, Artificial Sequence; identical to SEQ ID NO: 1424
  Description of Artificial Sequence: synthetic amino acid sequence

SEQ ID NO: 2789 - DNA, 855 bp, Artificial Sequence; identical to SEQ ID NO: 1425
  Description of Artificial Sequence: synthetic nucleic acid sequence

SEQ ID NO: 2790 - protein, 284 aa, Artificial Sequence; identical to SEQ ID NO: 1426
  Description of Artificial Sequence: synthetic amino acid sequence

SEQ ID NO: 2791 - DNA, 592 bp, Artificial Sequence
  Description of Artificial Sequence: synthetic nucleic acid sequence
atgctagatttgtatgatgattatctacaaaatccatcatccgtacctgaagatttacaagtcttgttcagtacaattaaaacaggtgaagctcatatcgaagctaaacctaccactgatgggggtggttcacaagcgggagatagcacaattaaacgtgttatgcgcttaatcgataatattcgtcaatacggacatttaaaagcagatatttatccagtaaatcctccagagcgtcaaaatgttcctaaattggaaatcgaagattttgatttagataaagaaactttggaaaaaatatcatctggaattgtctctgaacattttaaagacatttatgacaatgcctatgatgcaattgttcgtatggaaagacgttacaaaggaccgatagcttttgaatacactcacattaataataataaagaacgtgtgtggttaaaaagaagaattgaaacgccttataaagcaagtttaaacgataatcaaaaaaaagaacttttcaaaaaactcgcacacgtagaaggttttgaaaaatatttgcacaaaaattttgttggggctaaacgtttttcaattgaaggcgtcgatc

SEQ ID NO: 2792 - protein, 198 aa, Artificial Sequence
  Description of Artificial Sequence: synthetic amino acid sequence
  MOD_RES (198): variable amino acid
MLDLYDDYLQNPSSVPEDLQVLFSTIKTGEAHIEAKPTTDGGGSQAGDSTIKRVMRLIDNIRQYGHLKADIYPVNPPERQNVPKLEIEDFDLDKETLEKISSGIVSEHFKDIYDNAYDAIVRMERRYKGPIAFEYTHINNNKERVWLKRRIETPYKASLNDNQKKELFKKLAHVEGFEKYLHKNFVGAKRFSIEGVDX

SEQ ID NO: 2793 - DNA, 1179 bp, Artificial Sequence
  Description of Artificial Sequence: synthetic nucleic acid sequence
atgtttaaaataatttttggaaaagagaaaaataaggtggttaagacaatgaaagttttagtagccatggatgaatttaatggaattatttctagttaccaagctaatagatatgttgaagaagcggtagcaagtcaaattgaagatgcagatatcgttcaagttccactatttaacggtcgtcacgaattattagattcagtctttctttggcaatcaggaaataaatatcgtgtgagtgcgcatgatgctgacatgaaagaaaccgaagcaatatatggacaaacggatagtggtatgactattatcgaaggtcacttatttttaaatggcaaaaaacctattcaacatcgatcaagttacggtttgggagaggttataaaagcagcattggacaatcatacagaacatcttgttatttctttaggtggaataggaagttttgatggcggtgcaggcatgttgcaagcattgggtgcaacattttatgatgatgaagcacaaattgtcgatatgaggaaaggtgcatatttaataaaatatattagacgtattgatttatcaggtgttcatccacaattaacaaaggtaaacattcaattaatgtcagatttctcaagtcgattgtatgggaaaaaaagtgaaatcatgcaaacatacgaatcattagatttgtctcaaaatgaagcagccgagatagataatttaatttggtattttagtgaattatttaagaatgaattgaaaatagcaatgggaccaatcgagcgcggtggtgctggaggtggtatagcagctgtattaaatagtctctatcaagctgagattttaacaagccatgaattagtgaatcaaatcacacatttagaaaacttaattcaacaggcagatcttattattttcggagaaggtttgaaagaagaagatcaaattctagagactacaacaatacgtatagcagaacttacccaacaatacagcaagccagctattgcaatttgtgctacaaatgataaatttgatttgtttgaatcattgaatgttacagcaatgtttaatacatttattgatatgcctgattcatatacagattttaagatgggtattcaaatcagacattacacagtacaagcactaaaattattgaaaacgcaaataaacttaccgctttcatcctaa

SEQ ID NO: 2794 - protein, 392 aa, Artificial Sequence
  Description of Artificial Sequence: synthetic amino acid sequence
MFKIIFGKEKNKVVKTMKVLVAMDEFNGIISSYQANRYVEEAVASQIEDADIVQVPLFNGRHELLDSVFLWQSGNKYRVSAHDADMKETEAIYGQTDSGMTIIEGHLFLNGKKPIQHRSSYGLGEVIKAALDNHTEHLVISLGGIGSFDGGAGMLQALGATFYDDEAQIVDMRKGAYLIKYIRRIDLSGVHPQLTKVNIQLMSDFSSRLYGKKSEIMQTYESLDLSQNEAAEIDNLIWYFSELFKNELKIAMGPIERGGAGGGIAAVLNSLYQAEILTSHELVNQITHLENLIQQADLIIFGEGLKEEDQILETTTIRIAELTQQYSKPAIAICATNDKFDLFESLNVTAMFNTFIDMPDSYTDFKMGIQIRHYTVQALKLLKTQINLPLSS

SEQ ID NO: 2795 - DNA, 345 bp, Artificial Sequence
  Description of Artificial Sequence: synthetic nucleic acid sequence
atgcagattgaagaaaccttccgagacttgaaaagtcctgcctacggactaggcctacgccatagccgaacgagcagctcagagcgttttgatatcatgctgctaatcgccctgatgcttcaactaacatgttggcttgcgggcgttcatgctcagaaacaaggttgggacaagcacttccaggctaacacagtcagaaatcgaaacgtactctcaacagttcgcttaggcatggaagttttgcggcattctggctacacaataacaagggaagacttactcgtggctgcaaccctactagctcaaaatttattcacacatggttacgctttggggaaattatga

SEQ ID NO: 2796 - protein, 114 aa, Artificial Sequence
  Description of Artificial Sequence: synthetic amino acid sequence
MQIEETFRDLKSPAYGLGLRHSRTSSSERFDIMLLIALMLQLTCWLAGVHAQKQGWDKHFQANTVRNRNVLSTVRLGMEVLRHSGYTITREDLLVAATLLAQNLFTHGYALGKL

SEQ ID NO: 2797 - DNA, 909 bp, Artificial Sequence
  Description of Artificial Sequence: synthetic nucleic acid sequence
atgaatgaagtcattttagaagtagaaaaagctttgcaagctttttcagagaataagacgataacgccattaagatatgttttgccatttaatgagcaaaatcgttatttagtgatgccagcattatcagatgaattaaatatcgttggacttaaaacagtctcatttgcacctgaaaattcaaaaaaagggaaagcgactattactggatcagttattttaagtgactatgaaacaggagaaacattgtctatattagatggtggttttcttactaaagtaagaactggtgcaatttcaggtgtagctactaaatatctagcaaaagaaaacgctaaaacacttagtgtaataggggcaggtgtacaagctgaaggtttaattgaagcgatacttgctgttagagatattgaaaaaattcacatcgcaagtagaacgttcgaaaaagcagaaaaatttgctcaaaatatacgaaatcgatttaatattaaagtgagtgtatttagatcggcagatgaagcgatagacagtgcagatattgtagttacagcaacaaatgcaaatcagcccgtttatactcattctttacatccaggcgtgcatttaaatgcagtcggatcctttaaaccagatatgcaagaaataccttcagaaacaatgcttgttgctaataaaattgttgttgaatctatggaagcagctttagaagaaacaggtgatttaaaaattcctcaagcagaaggaatattaactaaaaatatgctacatagtgaattaggcgacattatttctggtgaaaaagttggccgcgaaactgaagaagaagtgacagtctttaaatcggtcggtctagcaattgtagatatcattgtggcacaatatttttataaaaaattaatacaatcttag

SEQ ID NO: 2798 - protein, 302 aa, Artificial Sequence
  Description of Artificial Sequence: synthetic amino acid sequence
MNEVILEVEKALQAFSENKTITPLRYVLPFNEQNRYLVMPALSDELNIVGLKTVSFAPENSKKGKATITGSVILSDYETGETLSILDGGFLTKVRTGAISGVATKYLAKENAKTLSVIGAGVQAEGLIEAILAVRDIEKIHIASRTFEKAEKFAQNIRNRFNIKVSVFRSADEAIDSADIVVTATNANQPVYTHSLHPGVHLNAVGSFKPDMQEIPSETMLVANKIVVESMEAALEETGDLKIPQAEGILTKNMLHSELGDIISGEKVGRETEEEVTVFKSVGLAIVDIIVAQYFYKKLIQS

SEQ ID NO: 2799 - DNA, 957 bp, Artificial Sequence
  Description of Artificial Sequence: synthetic nucleic acid sequence
atgaaaaaaataataatcactggagcacttggtcaaattggtactgaattagttattaagtgtagagaaagatatggaactgaaaatgtattagctactgatataagaaagccagaaccacactctccagttaaaaacggtccttttgaaatcttagatgttacagatagaaatcgtttatttgaaacagtgagatatttcaatgctgatacacttatgcatatggctgcactgctttctgctacagcggaaaagaaaccactagttgcctgggatttgaatatggggggacttataaatacactcgaagcagcaagaaggtatcaattaaaatattttacgccaagttcaataggagcttttggtatttcgacacctaaagtaaatacacctcaattaacaatacaacaaccaacgactatgtatggtataaacaaagtaactggggaattattatgtcagtattattatgtcaaatttggagtagatacacgtagcgttagatttcctggtttaatttcacatgttaaagaacctggcggtggcataacagattatgcagttgatatgtattttaaggcagttagaaaaggacattatacaagttatattaatcgttacacttatatggatatgatgtacatggaagatgctattgatgcgattatcaaattaatggaagaagacagtgttaaattaaaaacaagaaatggctataacttaagtgcgatgagtattgaacctgaaatgctaaaacaagctatacaagtatactatccagatttcaccttagattatgacattgatttagagcgtcaagatattgcattaagttggccagatagtatagatacgagctgtgctcaggaagagtggggatttgatcctaaatatgatttaccaactatgactaaagtgatgttagaggcaattgagaaaaaacaaaaagaatgctga

SEQ ID NO: 2800 - protein, 318 aa, Artificial Sequence
  Description of Artificial Sequence: synthetic amino acid sequence
MKKIIITGALGQIGTELVIKCRERYGTENVLATDIRKPEPHSPVKNGPFEILDVTDRNRLFETVRYFNADTLMHMAALLSATAEKKPLVAWDLNMGGLINTLEAARRYQLKYFTPSSIGAFGISTPKVNTPQLTIQQPTTMYGINKVTGELLCQYYYVKFGVDTRSVRFPGLISHVKEPGGGITDYAVDMYFKAVRKGHYTSYINRYTYMDMMYMEDAIDAIIKLMEEDSVKLKTRNGYNLSAMSIEPEMLKQAIQVYYPDFTLDYDIDLERQDIALSWPDSIDTSCAQEEWGFDPKYDLPTMTKVMLEAIEKKQKEC

SEQ ID NO: 2801 - DNA, 834 bp, Artificial Sequence
  Description of Artificial Sequence: synthetic nucleic acid sequence
atgaagagtattttatttttaagtaataatgtgaaaatattcacaaaaaaactaggaggatttgctatgagtaaggaaatattcgatacttttaaatttaaatgtggtgccgaattaaaaaatagagtattaatggcacccatgactatccaagctgggtattttgatggaagtgttacatcagaaatgattgattattatcaatttagagctggtgatgcttcagcaatcattgttgaaagttgttttgttgaaaatcacggacgaggatttccgggagctataggtattgataatgatgacaaaatacctggactcaaacgtttagcagaagcgattcaagctaagggatcaaaagcgattttgcaactttatcatgccggaagaatggcaaatcctaaatttaatgaaggagagcagccgatatctgcgagccccattgcagcattaagacctgatgctgtaccacctagagaaatgacacatgctcaaatcaatcagatgattgatgactttggagaggctacacgtcgcgctatagaagcggggtttgatggtgtcgaaattcatggcgccaacacatacttattacaacaatttttctctccacattctaatcggagacaagattcatggggaggcagtcgtgaaaaacgtacacgatttccaatcgaagttttgacaaaggttcaacacgtcgttgctgaaaaagaggcttctcattttattataggatatcgattctcacctgaagaaattgaagaaccaggcatacgttttgaagataccatgtttttactaaatacattagcagaatgcttgactacaaaatag

SEQ ID NO: 2802 - protein, 277 aa, Artificial Sequence
  Description of Artificial Sequence: synthetic amino acid sequence
MKSILFLSNNVKIFTKKLGGFAMSKEIFDTFKFKCGAELKNRVLMAPMTIQAGYFDGSVTSEMIDYYQFRAGDASAIIVESCFVENHGRGFPGAIGIDNDDKIPGLKRLAEAIQAKGSKAILQLYHAGRMANPKFNEGEQPISASPIAALRPDAVPPREMTHAQINQMIDDFGEATRRAIEAGFDGVEIHGANTYLLQQFFSPHSNRRQDSWGGSREKRTRFPIEVLTKVQHVVAEKEASHFIIGYRFSPEEIEEPGIRFEDTMFLLNTLAECLTTK

SEQ ID NO: 2803 - DNA, 345 bp, Artificial Sequence; identical to SEQ ID NO: 2795
  Description of Artificial Sequence: synthetic nucleic acid sequence

SEQ ID NO: 2804 - protein, 114 aa, Artificial Sequence; identical to SEQ ID NO: 2796
  Description of Artificial Sequence: synthetic amino acid sequence

SEQ ID NO: 2805 - DNA, 322 bp, Artificial Sequence
  Description of Artificial Sequence: synthetic nucleic acid sequence
gtggcaactggaagtgtcatttctcaagctggcccaggaggagctatattagcttatatactaattggtattatgctttattttttaatgtcatcaataggagaattagcaactttctatccggtttctggttcttttagttcatactctaccagatttgttgattcgtcacttggttttacaatgggttggttgtattggggtatgtggtcacttgtaacaagtgtagatatcattgttgcttccaatgtattacaatattgggatgtatttaaagttttaaatccacttacatggagcttaattttcttaactctgttgt

SEQ ID NO: 2806 - protein, 108 aa, Artificial Sequence
  Description of Artificial Sequence: synthetic amino acid sequence
  MOD_RES (108): variable amino acid
VATGSVISQAGPGGAILAYILIGIMLYFLMSSIGELATFYPVSGSFSSYSTRFVDSSLGFTMGWLYWGMWSLVTSVDIIVASNVLQYWDVFKVLNPLTWSLIFLTLLX

SEQ ID NO: 2807 - DNA, 1476 bp, Artificial Sequence
  Description of Artificial Sequence: synthetic nucleic acid sequence
atgaaaaaattgattactcttattgtcatgatatcttttgttttagcgagctgtgggggcacatcaagtacagacaaagacaccctcaatgttgaaatacctttgaaaactaaatcaattgcaccttacgaaactgatatcccagttaaaacaggtgccttggaatcgctttttaaaatgtcgaagaatggtaaagtaaaacctttattagtcaaaaattatcatcaagtatctgacaatcaactagaactcactttaaaagataatattaaatttcaaaacggtcatcatttaacaggcgaagctgtaaaacgtagtctcgaagaaggaatgaaaaaaagtgatttgttaaaaggatcacttcctattaaatcaatcaatgctcatggacaaaaagtcacaatcactactaaagaaccttatccagaattaatgtctgaactcgcaagcccatttgctgctatttacgacacaaaagctaaaaacaaagtaactgatcaacctgttggtacgggtccttataaaattgatcagtataaacgttcgcaaaaaatcgtactaaaacaattcaaagactactggcaaggtacgccaaaattaaaaagaattaatgtcacttatcatgaagatggtaatactcgtgttgatcacttattatcaggcaaatcagatttgactactgatgttccaattgaacgcgttgatgatgtaaaaaaatctaacaaagcaaacattcaaagtacatcaggctttagaacgcatttaatgttatacaatcatgatagtaaaaaagttaataaaaaagtaagagaagcactagatatgattattaatcgaaaagacattgctaaaaatgtttctaaaaattatgctgagccagcatcaggtccttttaaccatcgattaaaatcattagaaaaagaggaaattcaatcacaagacatcaagcgtgcaaaagaacttttagctcaagaaggttattccaaatcgcatcctcttaaattaaacatggtcacatacgatggcagaccagaattgcctaaaattggacaggtgatacaatctgaagctaaaaaggcaaatgttgatatacaattacgcaatgtagatgatatcgaaggatatctcaaaaacaaacagagttgggatgtttcaatgtatagttatttaagtgtgccacgtggtgatacaggttatttctttaacactgcatacttacctgatggagcattaaataaaggtaattatagtaatactaaagtcactcagttaattaaagaattaaatactactttcggtgacaagcaacgtggtcaagtgactaatgaaatactaaatgaatctaaaaaagatattcctaacagctatatcacatacaactctcaaatagatggtgtgaataataaagtaagacattttaatgttacaccagaatctatctatttaattgattataaattaagtaaaaaagaataa

SEQ ID NO: 2808 - protein, 491 aa, Artificial Sequence
  Description of Artificial Sequence: synthetic amino acid sequence
MKKLITLIVMISFVLASCGGTSSTDKDTLNVEIPLKTKSIAPYETDIPVKTGALESLFKMSKNGKVKPLLVKNYHQVSDNQLELTLKDNIKFQNGHHLTGEAVKRSLEEGMKKSDLLKGSLPIKSINAHGQKVTITTKEPYPELMSELASPFAAIYDTKAKNKVTDQPVGTGPYKIDQYKRSQKIVLKQFKDYWQGTPKLKRINVTYHEDGNTRVDHLLSGKSDLTTDVPIERVDDVKKSNKANIQSTSGFRTHLMLYNHDSKKVNKKVREALDMIINRKDIAKNVSKNYAEPASGPFNHRLKSLEKEEIQSQDIKRAKELLAQEGYSKSHPLKLNMVTYDGRPELPKIGQVIQSEAKKANVDIQLRNVDDIEGYLKNKQSWDVSMYSYLSVPRGDTGYFFNTAYLPDGALNKGNYSNTKVTQLIKELNTTFGDKQRGQVTNEILNESKKDIPNSYITYNSQIDGVNNKVRHFNVTPESIYLIDYKLSKKE

SEQ ID NO: 2809 - DNA, 1140 bp, Artificial Sequence
  Description of Artificial Sequence: synthetic nucleic acid sequence
gtgtttggtggtgtatttaaggatatacctgcctatgaactaggtgcaacagttattcgtcaaattttagaacatagtcaaatagatcctaatgaaatcaatgaagttattctaggaaacgtattacaggcaggtcaaggacaaaatcctgctcgtattgctgcgattcatggtggtgtgccagaagcggtaccttcttttactgtaaataaagtttgcggttctggattaaaagcgattcaacttgcctatcaatctattgtagcgggagataatgagattgttatcgctggaggcatggaaagtatgtctcaatctccaatgcttcttaaaaatagtcgtttcggttttaaaatgggaaatcaaactttagaagatagtatgatagctgatggtttaactgataagtttaatgattaccatatgggtatcacagccgaaaatctagttgaacagtatcagattagtcgtaaagaacaagatcaatttgcattcgattctcaacaaaaagcatcacgtgcacaacaagctggtgtatttgatgctgaaattgtacctgtagaggtaccacaacgtaaaggcgaccccctaattatttctcaagatgaaggcattagacctcaaacgacaattgataagttagcacaactccgtccagcatttaaaaaagatggatcagtaactgctggtaatgcatccggtatcaatgacggtgctgctgctatgctcgttatgacggaggacaaagcgaaagcattgggcttacaacctatagctgtattagatagttttggtgcgagtggtgtggcgccttcaattatgggtattggtccagttgaagcgatacataaagctttaaaacgttctaataaagtgataaatgatgttgatatttttgaattaaacgaagcttttgcagcgcaatcaattgctgtaaaccgtgagttgcaattaccgcaagataaagtcaatgttaatggtggtgcgattgcactaggacatccgataggggcttcgggtgcgcgtactttagtttcattattacatcaattaagtgatgctaagccaacaggtgtggcatctttatgtatcggtggcggtcaaggtatcgctacggttgtatctaaatatgaagtttaa

SEQ ID NO: 2810 - protein, 379 aa, Artificial Sequence
  Description of Artificial Sequence: synthetic amino acid sequence
VFGGVFKDIPAYELGATVIRQILEHSQIDPNEINEVILGNVLQAGQGQNPARIAAIHGGVPEAVPSFTVNKVCGSGLKAIQLAYQSIVAGDNEIVIAGGMESMSQSPMLLKNSRFGFKMGNQTLEDSMIADGLTDKFNDYHMGITAENLVEQYQISRKEQDQFAFDSQQKASRAQQAGVFDAEIVPVEVPQRKGDPLIISQDEGIRPQTTIDKLAQLRPAFKKDGSVTAGNASGINDGAAAMLVMTEDKAKALGLQPIAVLDSFGASGVAPSIMGIGPVEAIHKALKRSNKVINDVDIFELNEAFAAQSIAVNRELQLPQDKVNVNGGAIALGHPIGASGARTLVSLLHQLSDAKPTGVASLCIGGGQGIATVVSKYEV

SEQ ID NO: 2811 - DNA, 1494 bp, Artificial Sequence
  Description of Artificial Sequence: synthetic nucleic acid sequence
gtgggcggtttaggattagatttggtacacgataacggctataacttaaaacaaattgaagatggtaatttcgatcaaagtaaagcactttatgcaggaatcattgatggcagaaatgtatgggcggctgatattgaagcaaaaaaacaattaatcgaaacattacaacaacacacacaacagttagtcattcaaccttcatcatcacttctacatgttccagtatcactagatgatgaaacacttgatgaatctattgcagaaggattaagttttgctactgaaaagttagacgaattagatgcattgcgtcgcttattcaatgataatgacctgtcaaaatatgaacattacaaagcacgttatgaacgcttccaaagccaatcatttaaaaatcttgaatacgattttgaaagtgtaccgacacatcgtaaatcaccatttgctaaacgcaagcaattacaaaaccaacgtctaaatttaccagatttacctacgactacgattggttcattccctcaaactcgtgaagtccgtaaatttagagcagattggaaaaataatcgcattacagatgctgagtatcaagaatttttacaaaatgaaatcgctcgttggattaaaatccaagaagatattggtttagacgtacttgtacacggtgagtttgagcgtaacgacatggttgaattttttggggaaaaacttcaaggtttcctagtaacaaaattcggttgggtacagtcttacggttctcgtgcagttaaaccaccagttatatatggagatgtgaagtggactgccccacttactgtaaaagaaacagtatacgcgcaaagcttaactgacaaaccagtaaaaggtatgcttacaggtccagttactattttaaactggtcatttgaacgcgtagacgtacctagaaaggttgttcaagatcaaattgccttagccattgatgaagaagtgttagctttagaagaagcaggtatcaaagtcattcaagttgacgaaccaacgttgcgtgaaggcttacctctacgctctgaatatcacgaacaatatttagaagatgctgtacattcatttaaattagcgacatcatctgtgcatgatgaaacacaaattcatacacatatgtgctattctcaatttggacaaatcattcatgctatccatgatttagatgcagatgttatttctattgaaacttctcgtagtcacggagacttaattcaagatttcgaagatattaattatgatttaggaattggattaggtgtttacgatattcacagtccacgtattccaaccgaagaagagattactactgcaattaatcgttcattacaacaaattgatcgttctctattctgggttaacccagactgtggtctaaaaacacgtaaagaaaatgaagtgaaagatgcattaacagtgttagtcaatgcagttaaaaagaaacgtcaagaatctgaatcaacaacagcataa

SEQ ID NO: 2812 - protein, 497 aa, Artificial Sequence
  Description of Artificial Sequence: synthetic amino acid sequence
VGGLGLDLVHDNGYNLKQIEDGNFDQSKALYAGIIDGRNVWAADIEAKKQLIETLQQHTQQLVIQPSSSLLHVPVSLDDETLDESIAEGLSFATEKLDELDALRRLFNDNDLSKYEHYKARYERFQSQSFKNLEYDFESVPTHRKSPFAKRKQLQNQRLNLPDLPTTTIGSFPQTREVRKFRADWKNNRITDAEYQEFLQNEIARWIKIQEDIGLDVLVHGEFERNDMVEFFGEKLQGFLVTKFGWVQSYGSRAVKPPVIYGDVKWTAPLTVKETVYAQSLTDKPVKGMLTGPVTILNWSFERVDVPRKVVQDQIALAIDEEVLALEEAGIKVIQVDEPTLREGLPLRSEYHEQYLEDAVHSFKLATSSVHDETQIHTHMCYSQFGQIIHAIHDLDADVISIETSRSHGDLIQDFEDINYDLGIGLGVYDIHSPRIPTEEEITTAINRSLQQIDRSLFWVNPDCGLKTRKENEVKDALTVLVNAVKKKRQESESTTA

SEQ ID NO: 2813 - DNA, 879 bp, Artificial Sequence
  Description of Artificial Sequence: synthetic nucleic acid sequence
atgaaagcgccagttctggtatcaggtactgacggtgtgggtacaaagttaaaattagcaattgactatggaaagcatgacacaattggtattgatgctgtcgcaatgtgtgtaaatgatattttaacaacaggtgctgaacctttatactttttagactatattgccacgaataaagtagtgccaagtactatagagcaaatcgttaaaggtataagtgacggttgcgaacaaaccaatacggcacttataggcggtgaaactgctgaaatgggagaaatgtatcatgaaggtgaatatgatattgctggttttgcagtaggagcggtagagaaagaggactatattgatggttcaaatgttgaagaaggacaagcaattattggtttagcttcaagtggtattcattcaaatggctatagtctagttagaaaaatgataaaagaatcaggagttcaattacatgatcaatttaatggtcaaacctttttagaaaccttccttgcaccaacaaaattgtatgtaaagcctattcttgaattaaagaaacatattgatatcaaagcgatgagccatattactggtggaggtttctatgaaaatattccgcgtgcccttcctaaaggtttatcagcaaaaatagatacacaatcattcccaacgttggaagtctttaattggcttcaaaaacagggcaacatttcaacgaatgaaatgtataacatatttaatatgggtattggatatacaattattgttgacaaaaaagatgttcaaacaacattaacaacgttacgtgcaatggatacaactgcatatgaaattggtgagattataaaagatgatgatacacctattcatttattggaggtagaatag

SEQ ID NO: 2814 - protein, 292 aa, Artificial Sequence
  Description of Artificial Sequence: synthetic amino acid sequence
MKAPVLVSGTDGVGTKLKLAIDYGKHDTIGIDAVAMCVNDILTTGAEPLYFLDYIATNKVVPSTIEQIVKGISDGCEQTNTALIGGETAEMGEMYHEGEYDIAGFAVGAVEKEDYIDGSNVEEGQAIIGLASSGIHSNGYSLVRKMIKESGVQLHDQFNGQTFLETFLAPTKLYVKPILELKKHIDIKAMSHITGGGFYENIPRALPKGLSAKIDTQSFPTLEVFNWLQKQGNISTNEMYNIFNMGIGYTIIVDKKDVQTTLTTLRAMDTTAYEIGEIIKDDDTPIHLLEVE

SEQ ID NO: 2815 - DNA, 966 bp, Artificial Sequence
  Description of Artificial Sequence: synthetic nucleic acid sequence
gtgggtaaaggcaacaatcttggcaaaaatgctgctctcaaaacttataatgagaatcaagcgcaacatctgcttaaacagaatcaattacaaggatactttgtcttcgaccgtggtatgaccgatactttttataaagatggtagccttcctataactatttatacatatgatgaacaatcaagtaacagtgtcgtggttaatcaattaacacgctcagtttatgaccgtttaatgttatcaatgggcggtgtgctaagctttaatcaattagctaaagatccttcaaatgaagacgtagcaatgacattgattgatatgttatttaccggtttaaatcgttcaggttcatttaattttgaacccatacatatttatgacaccagtagttattatgtagtcactggatttcttttgtctatctttatattgtgtttatcactttatacagtactaaaaatgaatcaagaaactgcactcaaagaacgcttgcaaatgtttcatttttcctttgaaaagctcacgatagttcgaggtatcattgcatggttttattcactcatatgggcatttattggctttatctggattactcatgctctaaatgccccatttgaaaaatacaattggccaacggtagctttacaactcacttattacgttacgttactcgtcctatgcttattacttatagacttaattactcgttcatggataaactttctactcaaattattacttagctttgttatcgttattttttctgggataattatccctactatcttctttaaacacatgcttaatgatgtaatcattacacaaccatttagtttggttactaatcaaatgttagaaataacactcaataactatattttagacacacatccagcattttatttaagttttattacactattgatactattcatcattgttttagtatggaggtatcgccgatga

SEQ ID NO: 2816 - protein, 321 aa, Artificial Sequence
  Description of Artificial Sequence: synthetic amino acid sequence
VGKGNNLGKNAALKTYNENQAQHLLKQNQLQGYFVFDRGMTDTFYKDGSLPITIYTYDEQSSNSVVVNQLTRSVYDRLMLSMGGVLSFNQLAKDPSNEDVAMTLIDMLFTGLNRSGSFNFEPIHIYDTSSYYVVTGFLLSIFILCLSLYTVLKMNQETALKERLQMFHFSFEKLTIVRGIIAWFYSLIWAFIGFIWITHALNAPFEKYNWPTVALQLTYYVTLLVLCLLLIDLITRSWINFLLKLLLSFVIVIFSGIIIPTIFFKHMLNDVIITQPFSLVTNQMLEITLNNYILDTHPAFYLSFITLLILFIIVLVWRYRR

SEQ ID NO: 2817 - DNA, 690 bp, Artificial Sequence
  Description of Artificial Sequence: synthetic nucleic acid sequence
atgatagatattcaaaatgtttccaaaagctataaaaagaagcatattttcgattccctagatatgcaatttcaaaatcataaaattactattttattaggtgaaaatggtgctggaaaatctacattattgcgtttaattgcaggtattgagaatgcagacgaaggacgtattcaatacttcaatcaatatttgtcaagacgtcgaatacgtcatattgtaggctatgtccctcaagacatcgcactattcgagcatatgactgtcatggagaacattgagtttttcaagtcactttgtgaaaatcctatttcagatgaaacacttcattcttatttatcacaattaaattttactgatacaaaagtgaaagtatctaacctttctgggggaaataaacgtaaagtcaatattatgataggtctacttagtcggcctaaaatacttattctagatgagccaacagaaggcattgatttagaatcaagatatgatattcacaacttattacaacaaatgaccgatcaatgtttaatcatcatgacgacacatcatttagacgaagttgaagcactagcagatgatattaaagttataggtcaaaatcctttttatcatgatattttagaaaataaaggttggtcttttaaaaaatatgcaaatgccttagctgataatacgaaatcttaa

SEQ ID NO: 2818 - protein, 229 aa, Artificial Sequence
  Description of Artificial Sequence: synthetic amino acid sequence
MIDIQNVSKSYKKKHIFDSLDMQFQNHKITILLGENGAGKSTLLRLIAGIENADEGRIQYFNQYLSRRRIRHIVGYVPQDIALFEHMTVMENIEFFKSLCENPISDETLHSYLSQLNFTDTKVKVSNLSGGNKRKVNIMIGLLSRPKILILDEPTEGIDLESRYDIHNLLQQMTDQCLIIMTTHHLDEVEALADDIKVIGQNPFYHDILENKGWSFKKYANALADNTKS

SEQ ID NO: 2819 - DNA, 1443 bp, Artificial Sequence
  Description of Artificial Sequence: synthetic nucleic acid sequence
atgaaaagagcagccaatttttctgtacctggagctggtaaaacggctatgatgtatggcacatttgcttttttgtctagtgaaataaagcggaaagttgataaattaatagttatttctccaattaatgcatttgaagcttggcgttcagaatttattgaagtttttcaagataaaagagaattacactttatgaacctaagagataaaaaatataatgatttaggtaaagtacgaacagattggggaagtgcaaatgtcattgttttgaattttgaagcaatacaaaagtatgtaggggttttaaatgaacttattaatgataagacaatgatagtttatgatgaggttcataggataaaaggtattaatagtagcagagcaagttatgcattaactttaggtcctaaaagttattacagatacgttttaactggtaccccaattccaaatagttatcaagacatatttaacttcttaaatattttatataaagatgagtatgatacttattttggttggaatgttgctgatttacaaaatcctgatcctaatgaaattaatgacaagttgaacccttttttctggcgtacaaataagaacgatttggaagtgcctcaagcagaaaatgatattatattatgtgttaagcctagtaatattcaaattgaattagcaaaagcgatatacgaaaatgaatctgggatactagcgatttatataaggttactacaagcttcaactaacccagaattattgcaaaagaatattaattatagcgaactaggaatgttgaatgatgaattaaatttcgatttggataaagcattaaataaagaagaagaaaatcaagtaaaacaacaaatttataattcttttgatttaaaaaatgtaacttctccaaaattcgaaaaaggtattgaattgattgaaaacttagttagccaaggaaaaaaagttctagtatggggattgtttgtaggtacaatgaataaaatcaataagaggttactagaaagtgatattaattcaatattgatttatggagaaacacctaaagaagatagggtagatatgatcaataattttaggaatggaaatgcacaagttctaatatctaatcctaatacattaggcgagtccatatctttacatcagacagtacatgatgcaatatattttgaatataactttaatttaacgtttatgttgcaatcacgtgatagaatacatcgtttagggttaaataataatcaatatacaaggtattattatttgatgtctgaaggggatagagcccataaaggttttatcgataaagcagtttataacagactgaaggaaaaagaagatgtaatgttaaatgctattgatggaaatactttaaagccaatgattgaagatgattacttagaagatgttaagaaaattattattgaatga

SEQ ID NO: 2820 - protein, 480 aa, Artificial Sequence
  Description of Artificial Sequence: synthetic amino acid sequence
MKRAANFSVPGAGKTAMMYGTFAFLSSEIKRKVDKLIVISPINAFEAWRSEFIEVFQDKRELHFMNLRDKKYNDLGKVRTDWGSANVIVLNFEAIQKYVGVLNELINDKTMIVYDEVHRIKGINSSRASYALTLGPKSYYRYVLTGTPIPNSYQDIFNFLNILYKDEYDTYFGWNVADLQNPDPNEINDKLNPFFWRTNKNDLEVPQAENDIILCVKPSNIQIELAKAIYENESGILAIYIRLLQASTNPELLQKNINYSELGMLNDELNFDLDKALNKEEENQVKQQIYNSFDLKNVTSPKFEKGIELIENLVSQGKKVLVWGLFVGTMNKINKRLLESDINSILIYGETPKEDRVDMINNFRNGNAQVLISNPNTLGESISLHQTVHDAIYFEYNFNLTFMLQSRDRIHRLGLNNNQYTRYYYLMSEGDRAHKGFIDKAVYNRLKEKEDVMLNAIDGNTLKPMIEDDYLEDVKKIIIE

SEQ ID NO: 2821 - DNA, 816 bp, Artificial Sequence
  Description of Artificial Sequence: synthetic nucleic acid sequence
atgcattatataaaatttattgagtcaaaagataatacaaaactttatatgaaagtgaatgatattcaagatgcaaaagcgaatatcattatagctcatggtgtggcagaacatttagatcgttatgatgagataacagcatatttaaatgaagcgggttttagtgttattagatatgatcaaagagggcatggtcgttctgaaggcaagcgtgccttttatagcaatagtaatgaaattgtcgaagatttagatgcgataataaattatgtgaagtcaaactttgaaggtaaagtttacttaatcggtcatagtatgggtggttatacagtcactttatatggaacgaaacatccaaatacagtgaatggtattataacttctggagcattaacacgttataataataaactatttggcaatcctgatagaaacatatcacctgatacttatatagaaaacaatttaagtgagggggtatgttctgatttagaggtaatggaaaaatataaacttgatgatttgaatgcgaaacaaatctctatggggctcgtcttttcaataatggatggtgttaggtatttgaaagacaatgctcaacaatttacagataatattttgatattgcatggcaaggaagatgggctagtaagctatgtagattctttacagctttatcaagaaataggatcagcacataaatcattacacatctatgatcgtttggagcatgaaatatttaatgaaagttcttataatagaactatttttaacgaagttattgaatggcttgaaacggaattaacttataactaa

SEQ ID NO: 2822 - protein, 271 aa, Artificial Sequence
  Description of Artificial Sequence: synthetic amino acid sequence
MHYIKFIESKDNTKLYMKVNDIQDAKANIIIAHGVAEHLDRYDEITAYLNEAGFSVIRYDQRGHGRSEGKRAFYSNSNEIVEDLDAIINYVKSNFEGKVYLIGHSMGGYTVTLYGTKHPNTVNGIITSGALTRYNNKLFGNPDRNISPDTYIENNLSEGVCSDLEVMEKYKLDDLNAKQISMGLVFSIMDGVRYLKDNAQQFTDNILILHGKEDGLVSYVDSLQLYQEIGSAHKSLHIYDRLEHEIFNESSYNRTIFNEVIEWLETELTYN

SEQ ID NO: 2823 - DNA, 672 bp, Artificial Sequence
  Description of Artificial Sequence: synthetic nucleic acid sequence
gtgtatatattcatgagtaaaaaagttttatttgttttaacaagtacaagtcaatttacagacggtacagaaactggattatggttagaagaagctggagcaccatataatatattgactgaagaaggtatcaatgttgatgttatttctattaaaggtggaaaagtaaatcttgatcctaattctgtttctaatgaatcactgaatcagtatgctaaattcgtgtcacacttaaacgatacacctagtatcgaaaatgtaaatgcagatgagtatgacgctatttatctaccaggtggacatggtactgtatacgattttgccaataatgagaaattagctgatattttacttcaatttaaaaatagtaataaaataatctcttcagtatgtcatggacctagtgcgtttgtaggtgtaaaagatgcaaataatcactatctagtagatggtgtcaaaataacttcatttactgatagtgaagaaaaagcaatgggatttgaaaataaagtaccatttttaactcaatctaaattagaagagcaaggtgcaaattttgtagtgaaagatgactttacatctcacgtagaaaaagacggtcaatttatcactggacaaaatccccaatcaagtgaagacattggtaaagcacttgcaaatgaattaaaataa

SEQ ID NO: 2824 - protein, 223 aa, Artificial Sequence
  Description of Artificial Sequence: synthetic amino acid sequence
VYIFMSKKVLFVLTSTSQFTDGTETGLWLEEAGAPYNILTEEGINVDVISIKGGKVNLDPNSVSNESLNQYAKFVSHLNDTPSIENVNADEYDAIYLPGGHGTVYDFANNEKLADILLQFKNSNKIISSVCHGPSAFVGVKDANNHYLVDGVKITSFTDSEEKAMGFENKVPFLTQSKLEEQGANFVVKDDFTSHVEKDGQFITGQNPQSSEDIGKALANELK

SEQ ID NO: 2825 - DNA, 462 bp, Artificial Sequence
  Description of Artificial Sequence: synthetic nucleic acid sequence
gtgttaattgtgccaaaaaagtcagtgagacatataaaaataagagagataatttcaaatgaacaaatagaaacacaagatgaactagttaaacgtttgaatgagtatgatttaaatgttacacaagctactgtttcacgagatattaaagaattgcaattaattaaagttcctgcacctacagggcaatatgtttatagtttaccaaatgatcgtagatatcatccattagagaagttgggtagatatttaatggattcatttgtaaacattgagggtactggtaatctactagttcttaaaacgcttcctggtaatgctcaatccattggtgctatacttgatcaaattgattgggatgaggtacttggtacaatttgtggtgatgatacatgcttacttatttgtcgagacgaagaagcgagtgaagaaatcaaaactcgaattttcaatttattataa

SEQ ID NO: 2826 - protein, 153 aa, Artificial Sequence
  Description of Artificial Sequence: synthetic amino acid sequence
VLIVPKKSVRHIKIREIISNEQIETQDELVKRLNEYDLNVTQATVSRDIKELQLIKVPAPTGQYVYSLPNDRRYHPLEKLGRYLMDSFVNIEGTGNLLVLKTLPGNAQSIGAILDQIDWDEVLGTICGDDTCLLICRDEEASEEIKTRIFNLL

SEQ ID NO: 2827 - DNA, 552 bp, Artificial Sequence
  Description of Artificial Sequence: synthetic nucleic acid sequence
atgtctattgaaggtaaagaagtgcttgtacgaggtgccactggaggcgtcggaacgatttcattactcatgttaaataacttagggtatgatgttattgcaagtacgggtagagatgacgccgaagaaaaacttaaaaagcttggtgctaaagaagtaattggccgtttaccagaagataatagtaaaccattagagaagagaacatggcaggcagccattgatccagttggtggtgaaaacttaccgtacatcgtcaaacgattggataacaacggaagtgttgcattaattggcatgactggtggtaacaattttgaaacaaccgtctttcctttcattttaagaggagcaagtataattggtatcgattcagtatttactccaattaaactaagaaaacgtgtttggagaagacttgcaaaagacttaaaaccacaacaattacatgacatcaaacatgttatttcattcgatgaaatcccaaaagccatcgatcaagtcatcaatcataataatactggacgtattgtcattgatttcaatgtttaa

SEQ ID NO: 2828 - protein, 183 aa, Artificial Sequence
  Description of Artificial Sequence: synthetic amino acid sequence
MSIEGKEVLVRGATGGVGTISLLMLNNLGYDVIASTGRDDAEEKLKKLGAKEVIGRLPEDNSKPLEKRTWQAAIDPVGGENLPYIVKRLDNNGSVALIGMTGGNNFETTVFPFILRGASIIGIDSVFTPIKLRKRVWRRLAKDLKPQQLHDIKHVISFDEIPKAIDQVINHNNTGRIVIDFNV

SEQ ID NO: 2829 - DNA, 387 bp, Artificial Sequence
  Description of Artificial Sequence: synthetic nucleic acid sequence
atgaaaggaaagacggttgtttcaaaattgttaccaccagtcatgccaattaatgcaacacttccgttgttatccaatcgtttgacgatgtacggtaagttttcaccaccaactggatcaatggctgcctgccatgttctcttctctaatggtttactattatcttctggtaaacggccaattacttctttagcaccaagctttttaagtttttcttcggcgtcatctctacccgtacttgcaataacatcataccctaagttatttaacatgagtaatgaaatcgttccgacgcctccagtggcacctcgtacaagcacttctttaccttcaatagacatacctgatttttcaagttgttctatagctaaacctgctgtaaaatag

SEQ ID NO: 2830 - protein, 128 aa, Artificial Sequence
  Description of Artificial Sequence: synthetic amino acid sequence
MKGKTVVSKLLPPVMPINATLPLLSNRLTMYGKFSPPTGSMAACHVLFSNGLLLSSGKRPITSLAPSFLSFSSASSLPVLAITSYPKLFNMSNEIVPTPPVAPRTSTSLPSIDIPDFSSCSIAKPAVK

SEQ ID NO: 2831 - DNA, 1755 bp, Artificial Sequence
  Description of Artificial Sequence: synthetic nucleic acid sequence
atgataataagttatttacacaatataaataaattgaaaaactctaattttttagacttgactcaaaataaaaatggaaacatgatatactttaaaaaagaggtaatactaaaaatgatagataattggatagatgtattagatgaaagtttagtcaaagatttttataataatcaaacttccgaagagcaacaagaaggacttgatactacactgtcttttggcacggctggtattagagggaaattcggtttaggcgaaggccgattaaataagttcaccgtatctaaagtagcgttaggctttgcccattatttaacatcaagtatcgcgcatcctgtcgtcgtcatacattatgacacaagacacttatcacctgattttgctcaaattatcgctaatattctagcaagtcttgatattaaagtttatcttgctgatacatacagaacaacacctgatttatcatttgcagtcagatacttacaggcggatgcgggtattatgattacagctagccataatcctaaagattataatggaatcaaagtgtatggagaagatggtgctcaattatcaaccgacgattccgcacgactaagcacatatatcgataagttaggtcatccgcttcatattaatttacctagtttaactactgaacaacaaacattaattcattcagtcccgagcgaagttagagaagattatttcaaaaacgtacaagacttagttggaactattccacagtctgatttgaaagttgtctttacaagcttgcatggtacgagtgtgccagttgtacctgacatcttatcttctcttaactttaatcaatttgagttagttgcatcacaatgtgaacctgattcagatttcagctctgtagtcagtgcaaatccagaggatcataaagcgtttgatcaatcgatagaacttgctaatcatattgatgctgatttacttattggcacagatcccgatgcagaccgtttaggaatagttgaacgtgatgctgaaggtaacatccactattacaacggaaatcagattggtgcacttttgttaaattatcgtatcaaacaaacagaaggattacctaacagaattatgttccaatcaattgtaagtggtggcttagctaaatctcttgctcaatatcataatgtcaatttcaaagaagttttgacaggttttaaatatatcgcagctgaaataagacatctgtctcctgaacaaaactttatttttggctacgaggaaagttatggcttcttagcccgtcctttcgtgagagataaagatgcgattcaaattgtgccattaatgattaagtatgcagctgaattaaaaaacaaaggacgcatgcttaaagatgaattagaagacattactcgaaatgtcggtaactttaatgacaagcttttctcacatacatttgaaggtactcaaggcaaggcaaaaatcgaaaatattatgactcaattcagaagtgaaacaccttcggaaatgtgtggtcttaaagtcattgcaatcgaagattttgaaacaggtaaaaagactgacttacaaaatgatgaagtcagcgatataactttacctaaagcgaatgtaataaagatatactttaatgaaggatttattgctttgcgtccttctggtacagagcctaaaattaaactttatgtatcactttcttgtgaccattttgacgtagttgcacaaaaaatgaatgatgctatatttaactcttaa

SEQ ID NO: 2832 - protein, 584 aa, Artificial Sequence
  Description of Artificial Sequence: synthetic amino acid sequence
MIISYLHNINKLKNSNFLDLTQNKNGNMIYFKKEVILKMIDNWIDVLDESLVKDFYNNQTSEEQQEGLDTTLSFGTAGIRGKFGLGEGRLNKFTVSKVALGFAHYLTSSIAHPVVVIHYDTRHLSPDFAQIIANILASLDIKVYLADTYRTTPDLSFAVRYLQADAGIMITASHNPKDYNGIKVYGEDGAQLSTDDSARLSTYIDKLGHPLHINLPSLTTEQQTLIHSVPSEVREDYFKNVQDLVGTIPQSDLKVVFTSLHGTSVPVVPDILSSLNFNQFELVASQCEPDSDFSSVVSANPEDHKAFDQSIELANHIDADLLIGTDPDADRLGIVERDAEGNIHYYNGNQIGALLLNYRIKQTEGLPNRIMFQSIVSGGLAKSLAQYHNVNFKEVLTGFKYIAAEIRHLSPEQNFIFGYEESYGFLARPFVRDKDAIQIVPLMIKYAAELKNKGRMLKDELEDITRNVGNFNDKLFSHTFEGTQGKAKIENIMTQFRSETPSEMCGLKVIAIEDFETGKKTDLQNDEVSDITLPKANVIKIYFNEGFIALRPSGTEPKIKLYVSLSCDHFDVVAQKMNDAIFNS

SEQ ID NO: 2833 - DNA, 486 bp, Artificial Sequence
  Description of Artificial Sequence: synthetic nucleic acid sequence
gtgaccactaagcctatagaagtgggtggcggcattcgttcaaaacaaacaattgaaaattatattcattcaggaatagactattgtattgtaggtacaaaaggtatccaagatatagagtggttaacacatatgacacatcaatttccaaataaactctacttatccgtagatgcttttggagagaaaataaagattaatggatggaaagaggatgctaaactcaatttatttgattatgttgccaaaattgagcatttacctttgggtggtgtgatttataccgatatttcgaaagatgggaaactttctggacctaattttgatttgacaggtcgtctcgcactttatacatcgttgcctgtaattgcttcaggaggtattagacatcaagaggacttgtttcgattagaatcgttaaatgttcatgctgctattgtaggaaaagcagcacatctggatgaattctgggagggattatcttga

SEQ ID NO: 2834 - protein, 161 aa, Artificial Sequence
  Description of Artificial Sequence: synthetic amino acid sequence
VTTKPIEVGGGIRSKQTIENYIHSGIDYCIVGTKGIQDIEWLTHMTHQFPNKLYLSVDAFGEKIKINGWKEDAKLNLFDYVAKIEHLPLGGVIYTDISKDGKLSGPNFDLTGRLALYTSLPVIASGGIRHQEDLFRLESLNVHAAIVGKAAHLDEFWEGLS

SEQ ID NO: 2835 - DNA, 549 bp, Artificial Sequence
  Description of Artificial Sequence: synthetic nucleic acid sequence
atgaatgaagaagcttatcaaaaaactctgaaagaaaagaaagtaaccttcttctctagatctaaacaacgtttatggactaaaggtgaaacttctggtcatttccaacacgttgagagtattcatctagattgtgatcaagatgcaatcttaatcaaagtgatgccacaaggtcctacatgtcacactggaagtctgagttgttttaatagtgaaattgaatcgcgctttaaaattcaagcattagcacaaacgattcatcaaagtgctaaaagcaatcaatctaactcttacactcaatatttattaaaggaaggtatcgagaaaatatccaagaaatttggtgaagaggcatttgaagttgtgataggtgcgataaaacataatcgtgaagaagttattaatgaaacagcagatgtcatgtatcacctttttgtgttactacatagtttggatattccattttcagaagtagaacaggtactagcgcatcgccatcaaaaaagaaataattttaaaggcgagcgcaaaaaggttcaagaatggtaa

SEQ ID NO: 2836 - protein, 182 aa, Artificial Sequence
  Description of Artificial Sequence: synthetic amino acid sequence
MNEEAYQKTLKEKKVTFFSRSKQRLWTKGETSGHFQHVESIHLDCDQDAILIKVMPQGPTCHTGSLSCFNSEIESRFKIQALAQTIHQSAKSNQSNSYTQYLLKEGIEKISKKFGEEAFEVVIGAIKHNREEVINETADVMYHLFVLLHSLDIPFSEVEQVLAHRHQKRNNFKGERKKVQEW

SEQ ID NO: 2837 - DNA, 519 bp, Artificial Sequence
  Description of Artificial Sequence: synthetic nucleic acid sequence
gtgagcatatatattatgaatatatgcgagtcattttatactataatcaatcgcgcacgattgaaaagaggtggagatgtgaaacaagaacaaatgaggttagcgaatcagctttgtttttcagcatataatgtaagtcgtttatttgctcaattttatgagaaaaagttaaaacagtttggtataacttattctcagtatttagtattactgacgttatgggaagagaatcctcaaacattaaattcaattggtagacatttggatttatctagtaatactttaacccccttactaaaaagacttgagcaatctggctgggttaaaagagaacgtcaacaatctgataaacgacagttgataattacgttaactgacaatgggcaacaacaacaagaagctgtttttgaagcaatttcaagttgcttaccacaagaatttgatacgactgagtatgatgaaacgaaatatgtgtttgaagaactagagcaaacattaaaacatctcatagaaaaataa

SEQ ID NO: 2838 - protein, 172 aa, Artificial Sequence
  Description of Artificial Sequence: synthetic amino acid sequence
VSIYIMNICESFYTIINRARLKRGGDVKQEQMRLANQLCFSAYNVSRLFAQFYEKKLKQFGITYSQYLVLLTLWEENPQTLNSIGRHLDLSSNTLTPLLKRLEQSGWVKRERQQSDKRQLIITLTDNGQQQQEAVFEAISSCLPQEFDTTEYDETKYVFEELEQTLKHLIEK

SEQ ID NO: 2839 - DNA, 1119 bp, Artificial Sequence
  Description of Artificial Sequence: synthetic nucleic acid sequence
gtgaattggaagaatttaatgcattacaaagaacaagtcattaatcctatgtctgaaaccctcacatcgatgtttgaacaacagggaattgatgtaatcatggggaaaggtaaacttgtagatgctcatacaatagaggtaaataatacaactttacaatcagattatattgttatagcaactggacaacatagtcatcaattagatattgagggtaaagaatatacgcatgatagtcgggaatttttatcaatgcaatctttaccggatagtatcacttttattggagcaggtattatcagtattgaattcgcttctatcatgatcaaatcaggtgtagaggttaatgtggttcatcatacaaatcatgcacttgaagggtttaacgaatcacacgtcaataaattaattcaaaagttaaaagatgaaggtgttaaattttactttagtgagaataccaagtcagttaaaccgaatgcacaacgttttatagtagaaactgagtctggaaagatgattgaaacagattatgtactggatgcaaccggtagaaagcctaatgttcagcaaataggtttggaaaaagtgggtatactatttagtgatagaggtattgaggttgacgattatttaagaacaaatgtgaaaaatatatacgcaagtggggacgttatcaataaaatgattcctaaacttactcctacagctacatttgagtctaattatatcgctgcccatatccttggattgaatacagatgccattcagtatccaccaataccttcagtgctttattcattgcctcgtttatctcaaataggtgtcacagttagcgaggctaagaaagatgatacgtatatgattaaagatataccattcggaagacaaatggtatttgagtatcaaaacgaaacagaggctgaaatgtcaattgtattagatagtcacaaacgtttagtaggagcagagatttatggtaatgacgctggtgatttggttaatctcctagtctttatcattaatcaaaaacttactgcacaagacttaaataaaaatatttttgcatttcctggagcttctagtggcgttatagatttattgaaattggcaatgatgtag

SEQ ID NO: 2840 - protein, 372 aa, Artificial Sequence
  Description of Artificial Sequence: synthetic amino acid sequence
VNWKNLMHYKEQVINPMSETLTSMFEQQGIDVIMGKGKLVDAHTIEVNNTTLQSDYIVIATGQHSHQLDIEGKEYTHDSREFLSMQSLPDSITFIGAGIISIEFASIMIKSGVEVNVVHHTNHALEGFNESHVNKLIQKLKDEGVKFYFSENTKSVKPNAQRFIVETESGKMIETDYVLDATGRKPNVQQIGLEKVGILFSDRGIEVDDYLRTNVKNIYASGDVINKMIPKLTPTATFESNYIAAHILGLNTDAIQYPPIPSVLYSLPRLSQIGVTVSEAKKDDTYMIKDIPFGRQMVFEYQNETEAEMSIVLDSHKRLVGAEIYGNDAGDLVNLLVFIINQKLTAQDLNKNIFAFPGASSGVIDLLKLAMM

SEQ ID NO: 2841 - DNA, 405 bp, Artificial Sequence
  Description of Artificial Sequence: synthetic nucleic acid sequence
gtgctcattatcgtaaatactgcaacgaattgtactctgaatgatcaatttaataaattagaaatgctttataaaaaatatcataagtatggtcttgaaattttgagcttcccttgcaatgattttaataatcaggagccagaattaatcaaagatatttatcgagtatataaatataagtttggtattactttccccatccatgctaagattaatgttaatggagagcatgaacaccctttgtacacattattaaaatgtaaacaaccaggattatttggttcgcaaattaaatggaattttactaaatttgtagtagatcaacagggaaatattgttaaacgatttttaccttgtgataatcctaaccaaatggaaaaattaataagacaattattaaaataa

SEQ ID NO: 2842 - protein, 134 aa, Artificial Sequence
  Description of Artificial Sequence: synthetic amino acid sequence
VLIIVNTATNCTLNDQFNKLEMLYKKYHKYGLEILSFPCNDFNNQEPELIKDIYRVYKYKFGITFPIHAKINVNGEHEHPLYTLLKCKQPGLFGSQIKWNFTKFVVDQQGNIVKRFLPCDNPNQMEKLIRQLLK

SEQ ID NO: 2843 - DNA, 1887 bp, Artificial Sequence
  Description of Artificial Sequence: synthetic nucleic acid sequence
atgacaaatatcggaataacaaagtataagaggtggataagattgaacttaagtgttaccaatagtccttttacggaagggcaagctaaacaaatcaatgaattgcttcacactttatcatctaaccaacaagtatggttaagtggctatctgatggcaaatcaacaatcaaatacatctacagattctgtagaacaacataactcagatgacaatacagaagcgatgctacatgaaaaggaaccttcagttgagccggaagctagatcgataacaattttatatggatctgagtctggtaatgcgcaaggacttgcagaaatatttgaacaacgtttatctgatattggaaatgacgttacgctcaaatcaatggatgactttaaacctaagaatttgaagaaagtagaagatttatttattatcacatctacacatggcgaaggagatccaccagataacgctgttgaattacatgaatacatccacggacgtaaagcgccaaaattggatggggtgagattttcagtattagcattaggagatcaaacctatgaattcttctgtcaaactggtaaagattttgataaccgtttggctgaattaggggcagaaagactttatcatcgtactgattgcgatgttgattatgaagaagacgctgaaaagtggatggccaatgttattaatacgattgattcaacaccggctggtactgaaagtgaacaagttgttagcgaatctataaaatcagcaaaagaaaagaaatatagtaagtctaatccttacgatgctgaagtattgaccaatattaatttgaatggtagaggttcagacaaagagacgagacatattgagttattacttgataattttggtgaggaatatgaaccgggagattgtgtagttgtcttgcctcaaaatgatccagctatcgtagacttacttattagcacattaggttggagtccagaaacacaagttttaattaacgaggatggagatactttaaatcttgaagaggcattaacatcgcattttgaaattactaaattaacaaaaccgttaatagaaaatgctgcgatattttttgataatgaagagctttctgaaaaaattcaagataaagaatggattcaaaactacgttgagggaagggatttgattgacttattaaatgacttcgcaacgacagaactacaacctgaaaatttacatcaattattaagaaagttaccacctagagagtactcaatatctagtagttataaagcaacaccagatgaagttcacattactgttggagcagttagatatcaagcacacggtcgggaacgttcaggtgtttgttcagtacaatttgcagagagaatacaagagggcgatacaattcctatctatttaaaacgaaatccgaattttaagtttccgcaagatgaatcaacacctgtgattatgataggtcctgggacaggtgttgcaccgtttagatcctatatgcaagaacgagaggaactaggttttgaaggaaatacatggttattctttggagatcaacacttcactacagattttctgtatcaaacggaatggcaagaatggcttgaagatggaactttatcaaaattagatgttgctttttctagagatactgataaaaaagtgtatgtgcaacataaaattgcagaaaatagtgaacaatttaatcgatggattgaaaatggcgctactatttatgtatgtggtgatgaaagtaaaatggcaaaggatgttcatcaagcgattaaaaatgtgttaatcaaagagcaaaacctatctgaaacagatgcagaagaatacttaaaacaaatgaaaagagataaaagatatcaaagagacgtgtattaa

SEQ ID NO: 2844 - protein, 628 aa, Artificial Sequence
  Description of Artificial Sequence: synthetic amino acid sequence
MTNIGITKYKRWIRLNLSVTNSPFTEGQAKQINELLHTLSSNQQVWLSGYLMANQQSNTSTDSVEQHNSDDNTEAMLHEKEPSVEPEARSITILYGSESGNAQGLAEIFEQRLSDIGNDVTLKSMDDFKPKNLKKVEDLFIITSTHGEGDPPDNAVELHEYIHGRKAPKLDGVRFSVLALGDQTYEFFCQTGKDFDNRLAELGAERLYHRTDCDVDYEEDAEKWMANVINTIDSTPAGTESEQVVSESIKSAKEKKYSKSNPYDAEVLTNINLNGRGSDKETRHIELLLDNFGEEYEPGDCVVVLPQNDPAIVDLLISTLGWSPETQVLINEDGDTLNLEEALTSHFEITKLTKPLIENAAIFFDNEELSEKIQDKEWIQNYVEGRDLIDLLNDFATTELQPENLHQLLRKLPPREYSISSSYKATPDEVHITVGAVRYQAHGRERSGVCSVQFAERIQEGDTIPIYLKRNPNFKFPQDESTPVIMIGPGTGVAPFRSYMQEREELGFEGNTWLFFGDQHFTTDFLYQTEWQEWLEDGTLSKLDVAFSRDTDKKVYVQHKIAENSEQFNRWIENGATIYVCGDESKMAKDVHQAIKNVLIKEQNLSETDAEEYLKQMKRDKRYQRDVY

SEQ ID NO: 2845 - DNA, 1719 bp, Artificial Sequence
  Description of Artificial Sequence: synthetic nucleic acid sequence
atggttaatacaaataatcatatttcggaagaattagataaaaatcttgatgaaatggaatttttaaaagcaaatagtgactttttgcgtggaactattgaacaaagtttagctaatccaatcactggatccattacacaagatgatgcaaaactgctaaagtttcacggaagttatatgcaagatgacagggatttaagagatgagcgtcgtaaacaaaaacttgagcctgcatatagttttatgattcgagttcgtgtacctggggggaaagcgactcctgaacagtggattgctatggatgatatctctaatcaatatgcaaatcatacgattaaattaacaacacgccaagcatttcaatttcatggaattcttaaacgtaatttgaaacaatcaatgaaaaatattaatcatgcagtacttgattctattgctgcatgtggagatgttaatcgtaatacgatgtgcaatcctaatccttatcaatctcaagtacataaggagattaatgattatgcaacgcgtataagtaatcacttacttccaagaacaaatgcatatcatgaaatttggcttgatggtgaaaaggttttagattcgagtgaggaaaaggaacctatttatgggaatacgtatttaccacgtaaattcaaaataggtattgcagtaccaccatctaatgatattgacgtctattctcaagatattggtttaatcgctatcgttgaacaagatgagttaattggatttaatgtgactatcggtggcggtatgggtatgactcatggtaatactgaaacatatcctcaacttggacgtctcataggttttatacctaaggaaaaggttgtagatgtatgtgagaaaatacttacaatacaacgtgattatggtaatcgtgaaaatcgaaaaaatgcacgttttaaatatacagtggaccgtctaggagaaacttgggtgactgaagaattaaaccgacgattaggttgggaaattaaagcgccacgtgatttcgaatttgaacataatggtgatcgattaggttggattgaaggtattaataattggaatttcactttatttatacaaaatgggcgtgtgaaagatactgaagactatttgttaaaaacaaccttaagagaaatcgcagaaatccatactggagatttcagattatcacctaatcagaacttagttattgcaaatgtttctcctgagaaaaaggaagaaatacaagctattattgataaatataaattaacagatggcaaaaattatacaggacttagaagaaattctatggcttgtgttgctttcccaacgtgtggtttagctatggcagaatctgaaagatatcttccttcactaattacaaaaattgaagatttattagatgagtctggtttaaaagaggaagaaataacgattcgtatgacaggttgtcccaatggatgtgcgagaccagcgctagcagaaatagcctttatcggtaaagcacctggtaaatataatatgtacttaggtggtagttttaaaggcgaacgtctaaataaaatatataaagagaatatcgacgaaaatgagatattagaaagtctacgtccattgttgttgcgttatagtaaagagcgtcttgacggagaacactttggggactttgtaattcgtgacggtgtgatagccaaagttcatgatggtcgcgattttcatagttaa

SEQ ID NO: 2846 - protein, 572 aa, Artificial Sequence
  Description of Artificial Sequence: synthetic amino acid sequence
MVNTNNHISEELDKNLDEMEFLKANSDFLRGTIEQSLANPITGSITQDDAKLLKFHGSYMQDDRDLRDERRKQKLEPAYSFMIRVRVPGGKATPEQWIAMDDISNQYANHTIKLTTRQAFQFHGILKRNLKQSMKNINHAVLDSIAACGDVNRNTMCNPNPYQSQVHKEINDYATRISNHLLPRTNAYHEIWLDGEKVLDSSEEKEPIYGNTYLPRKFKIGIAVPPSNDIDVYSQDIGLIAIVEQDELIGFNVTIGGGMGMTHGNTETYPQLGRLIGFIPKEKVVDVCEKILTIQRDYGNRENRKNARFKYTVDRLGETWVTEELNRRLGWEIKAPRDFEFEHNGDRLGWIEGINNWNFTLFIQNGRVKDTEDYLLKTTLREIAEIHTGDFRLSPNQNLVIANVSPEKKEEIQAIIDKYKLTDGKNYTGLRRNSMACVAFPTCGLAMAESERYLPSLITKIEDLLDESGLKEEEITIRMTGCPNGCARPALAEIAFIGKAPGKYNMYLGGSFKGERLNKIYKENIDENEILESLRPLLLRYSKERLDGEHFGDFVIRDGVIAKVHDGRDFHS

SEQ ID NO: 2847 - DNA, 471 bp, Artificial Sequence
  Description of Artificial Sequence: synthetic nucleic acid sequence
atgaaagtaataggggttagtaagtcaggaaaaaatgttgaacaatttgatgaagtttatacaattgaagagttagatgatgttattgaaaaggcaaatattattgttaatgcattacctgaaacagaagaaacaatttacttattaaaaagaaaagatttcatacaaatggacaataatgccttatttataaatgtaggaagaggaacaattgttgatgaggaagtgctcatcaatgtactcaaagatcgattaatcagacatgcttatttagatgtttttgaaaaagaaccacttagtaaggacaatcctttatatgatttagataatgtgaccataactgctcatattacaggtaatgattctaataataatagagaagctacggacattttcaaaaagaatcttgagcattttctcaataattatgatgtaattgagaataaagtagacttagattatggttactaa

SEQ ID NO: 2848 - protein, 156 aa, Artificial Sequence
  Description of Artificial Sequence: synthetic amino acid sequence
MKVIGVSKSGKNVEQFDEVYTIEELDDVIEKANIIVNALPETEETIYLLKRKDFIQMDNNALFINVGRGTIVDEEVLINVLKDRLIRHAYLDVFEKEPLSKDNPLYDLDNVTITAHITGNDSNNNREATDIFKKNLEHFLNNYDVIENKVDLDYGY

SEQ ID NO: 2849 - DNA, 4506 bp, Artificial Sequence
  Description of Artificial Sequence: synthetic nucleic acid sequence
gtgtgcatcatgtacaatgagaaattaaaaaagggactatacgattatcgtgaagagcatgatgcgtgtggtattggattttatgccaatatggataataaaagatctcacgatattatagaaaaatctttagaaatgttaagacggttagatcatcgtggtggagtaggtgccgatggtattactggtgatggtgcaggaattatgacggagataccataccaattgttcgaacaattaacagaattcaaagttcccggcgaaggatattatgccgtgggattatttttttctaaagagaaagttagagattcaattcacgaagagatgtttaatcaatattttgaaagtgaaggttttaaagtcattggatatagagatgtgccagtagatactcgcgctattgctcaacatgttgcagatactatgccttatattcaacaagtatttgttgacatcacaggtgtaaaagaagttgaaaaacgattgtttttagcaagaaagcaaattgaaaaatatagtgaaacacaatccatagatttatattttacaagtctctctcatagaacgattgtttataaaggttggttacgttcggatcaaattaaaggcttatatttagacctacaaaatgaggcatatcaatcaaaattaggacttgtacactcccgctttagtactaatacatttccaagttggaaacgtgcacatcccaatcgcatgcttatgcacaatggtgaaattaataccattaagggtaacgtaaactggatgcgagcacgccaaaataaactagttgaaacattatttgaagatgagaaagataaggtgcattttattgttgatgaagatggtagtgactcatcaatagttgataatgcgttagagttcttatcattagcaatggagcctgaaaaagcagcgatgttattaattccagagccatggttatacaatgaatctaacgataaaaaagttcgctctttctatgaattttatagttatttaatggagccatgggatggaccaactatgatttccttttgcaatggagataagataggtgcattgactgatagaaatggattaagacctgggcgttatacaataactaaagacaattttattgttttttcttccgaagtaggtgtcattgatgttccagaagaaaatgtagcatttaaaggacaacttaatcctggaaagttattacttgtagactttttgcaaaataaggttgtagaaaataatgagctaaaaactaatattgctaatgagttgccctacgaacaatggctaaaagattataaaaataaaaatgatttagataatatttattaccaatcttccgactgggatgatcaaacactcttccgcttacagaaacaatttgcttacactaaagaagatatcaataaatatatgacagatttagtcatcaataaaaaagatcccatcggagcgatgggatatgatgcacctattgcagttcttaatgataagcctgagtcactatttaattattttaaacaattatttgcacaagttaccaatccacccatcgatgcttatcgagaaaagattgtaactagtgaactttcatatttaggttcagaagggaacctcttatgtcctgatgaatcagttttagaaagaattcaattaaaaaaaccagttttaaatgaagcgcaattatcatcaatcgatcattcgtattttaatgtaacgtatttatctacactttatacaggtgatttggaaagtagcttaaatgaactagggaaccgagcaatacaggctgtacatgaaggtgcgaaaattttggtgttagacgatacgtctttaactcacgaaaatagttatgcaatgccaattttattagcgttaagtcacgtgcatcaattattaattcgagaaggattaagaatggagaccagcctcattgcgcagtccggtgaaacacgagaagttcatcacgttgcatgtttacttggttatggtgcaaacgctgtagttccatatttagcgcaacgaacgattgaacaattaacgcgtcaaggtcaactttcaggaactgtcgctgaaaatgttgctacgtataccaatgtattgtcagaaggcgttattaaagtgatggctaaaatgggcatttctactgtacaaagttatcaaggagcacagatatttgaagcggtaggtttatcgaatagcgtcattgaaaaatattttacaggtacacagtcaaaattatctggtataagtattgaacaaatagacaaagagaataaagcgagacaaagtgatgattctgattatcttgaatccggaagtgtattccaatggagacagcaaggtcagcatcatgcatttaatcctcgtacgatttttttattgcagcatgcatgtagagaaaatgattacgagttatttaaaaaattctccaaaactgtaaatttaaaacgtacggatcatattagacatttattagaattcaagacacgccaatctattgatattagtcgtgttgaaccagcaagtgaaatcgtaaaacgttttaatacaggagcaatgagttacggctctatctcagcagaggcacatgagacgttggctcaagctatgaatcaaattggaggtaaaagtaatagtggagaaggtggagaagattcttcacgttacgaaattcaaaaggatggaagtaataagataagtgcgattaagcaagttgcatcaggtcgttttggggtgacgagtgattacttgcaacatgcaaaagaaattcaaattaaagtcgcacaaggcgctaaaccaggggaaggtggacaactaccaggttcaaaagtatatccatggattgctgagactagaggttcgacaccaggtataggattaatttcaccaccaccacaccatgatatttattcaattgaggacttagcacagctcattcatgatttaaaaaatgcaaatagaagagctgatattgcagttaagcttgtatcaaaaactggcgttggaactatagcttcaggggtagctaaagctttcgccgataaaattgttataagtggttatgatggaggtacaggtgcatcgcctaaaacaagtattcaacatgcaggtttgccatgggagataggccttgccgaaacacatcaaacacttaaattaaatgatttgcgtagtcgcgtaaaattagaaacggatggtaagttactgacgggtaaagatgtagcttatgcttgtgcgcttggtgcagaagaatttggtttcgcaacagcaccacttgttgttttggggtgtattatgatgagggtttgtcataacgatacgtgtccagtaggggttgcaacacaaaacaaagatttaagagctttgtttagaggtaaggcacagcatgtagttaactttatgtattttatagctgaagaattacgtgaaattttggcttcacttggtttagaaacagtagaagagttagtaggaagaacagatcttcttcaacgttcgacgcaattgaaaccaaatagtaaagcagcttcgcttcaaatagaacgtttaatagaacaatttgacggggttaatacgaaagagatatcacaaaaccatcatcttgatgaaggattcgatttgaattatctgtacccagacgcacgctatagtattgaaaacgggcactcttttaccggaaattatgttgttaataatgaacagcgagatgtaggtgtaattacaggtagtgcgatagctaaacaatatggagaagaaggattacctgaagatacgatacttgcttacactgaaggtcatgcaggtcaaagcttagctgcatatgcaccacgcggattaacaatccatcataccggtgatgctaatgactacgtaggtaaaggattgtccggtggaactgtcatcgtaaatgctccaaatagtcaacgtgaaaatgaaattatagcaggaaatataaacttttacggggcttctagaggtaaagcgtttatcaatggtaaagctggtgagcgtttctgtatcagaaatagtggtgcagatgttgtagtagaaggtattggtgatcatggacttgaatatatgacagggggacatgtcattatcttaggagatgttggaaagaactttggccaaggcatgagcgggggcgtaagttatattttctcttctgacgtggagaaatttaaaaaggttaatgcgcttgaaactttagaattcagtagcatacgttttgatgaggaaaaatctcttatcaaagacatgcttgaagcacattttaagcatacacgtagtaacaaagcacgccaattacttgaccaatttgacaatattgaaaagttagcaattaaagttattccgaaagattacaaattaatgatgcaaaaaattgatttgaaaaaacgtcaaatggaacgtgaagatgaagcaacactggcagcgttttatgatgacagagaaacaattgaacaagagctacagccagcagtcatttattaa

SEQ ID NO: 2850 - protein, 1501 aa, Artificial Sequence
  Description of Artificial Sequence: synthetic amino acid sequence
VCIMYNEKLKKGLYDYREEHDACGIGFYANMDNKRSHDIIEKSLEMLRRLDHRGGVGADGITGDGAGIMTEIPYQLFEQLTEFKVPGEGYYAVGLFFSKEKVRDSIHEEMFNQYFESEGFKVIGYRDVPVDTRAIAQHVADTMPYIQQVFVDITGVKEVEKRLFLARKQIEKYSETQSIDLYFTSLSHRTIVYKGWLRSDQIKGLYLDLQNEAYQSKLGLVHSRFSTNTFPSWKRAHPNRMLMHNGEINTIKGNVNWMRARQNKLVETLFEDEKDKVHFIVDEDGSDSSIVDNALEFLSLAMEPEKAAMLLIPEPWLYNESNDKKVRSFYEFYSYLMEPWDGPTMISFCNGDKIGALTDRNGLRPGRYTITKDNFIVFSSEVGVIDVPEENVAFKGQLNPGKLLLVDFLQNKVVENNELKTNIANELPYEQWLKDYKNKNDLDNIYYQSSDWDDQTLFRLQKQFAYTKEDINKYMTDLVINKKDPIGAMGYDAPIAVLNDKPESLFNYFKQLFAQVTNPPIDAYREKIVTSELSYLGSEGNLLCPDESVLERIQLKKPVLNEAQLSSIDHSYFNVTYLSTLYTGDLESSLNELGNRAIQAVHEGAKILVLDDTSLTHENSYAMPILLALSHVHQLLIREGLRMETSLIAQSGETREVHHVACLLGYGANAVVPYLAQRTIEQLTRQGQLSGTVAENVATYTNVLSEGVIKVMAKMGISTVQSYQGAQIFEAVGLSNSVIEKYFTGTQSKLSGISIEQIDKENKARQSDDSDYLESGSVFQWRQQGQHHAFNPRTIFLLQHACRENDYELFKKFSKTVNLKRTDHIRHLLEFKTRQSIDISRVEPASEIVKRFNTGAMSYGSISAEAHETLAQAMNQIGGKSNSGEGGEDSSRYEIQKDGSNKISAIKQVASGRFGVTSDYLQHAKEIQIKVAQGAKPGEGGQLPGSKVYPWIAETRGSTPGIGLISPPPHHDIYSIEDLAQLIHDLKNANRRADIAVKLVSKTGVGTIASGVAKAFADKIVISGYDGGTGASPKTSIQHAGLPWEIGLAETHQTLKLNDLRSRVKLETDGKLLTGKDVAYACALGAEEFGFATAPLVVLGCIMMRVCHNDTCPVGVATQNKDLRALFRGKAQHVVNFMYFIAEELREILASLGLETVEELVGRTDLLQRSTQLKPNSKAASLQIERLIEQFDGVNTKEISQNHHLDEGFDLNYLYPDARYSIENGHSFTGNYVVNNEQRDVGVITGSAIAKQYGEEGLPEDTILAYTEGHAGQSLAAYAPRGLTIHHTGDANDYVGKGLSGGTVIVNAPNSQRENEIIAGNINFYGASRGKAFINGKAGERFCIRNSGADVVVEGIGDHGLEYMTGGHVIILGDVGKNFGQGMSGGVSYIFSSDVEKFKKVNALETLEFSSIRFDEEKSLIKDMLEAHFKHTRSNKARQLLDQFDNIEKLAIKVIPKDYKLMMQKIDLKKRQMEREDEATLAAFYDDRETIEQELQPAVIY

SEQ ID NO: 2851 - DNA, 1443 bp, Artificial Sequence
  Description of Artificial Sequence: synthetic nucleic acid sequence
atgaaatatgataaacagtcgctatcagaattgtctttggtagaccgtctttcgaatcatgaagcgtttcaacaacgcttcactaaagaagatgcttcgattcagggtgcgcgctgtatggattgtggaacacctttttgtcaaactgggcaatcttatggaagagaaacaataggatgccctattggtaattatatacctgagtggaacgacttagtctatcatcaagattttaaagctgcttacgaaagattgagagagacgaataattttcctgaatttacaggaagagtttgtcctgcaccatgtgagcaatcatgtgttatgaaaattaatagagaatccgtggcgattaaaggtattgaacgtacaattattgatgaagcatatgagaatgagtgggttcatcccgcatatcctgaagatcataaagaccaacgagttgctatcgtaggtagtggtccagcgggacttacagcagctgaagaattaaactttaaaggctataaagttactgtttatgaaaaggcgcatgaaccaggcggcttgctaatgtatggtataccaaatatgaaactagataaagacgtaatacgtcgacgtgtatcacttatgaaagatgctggggttttatttaaaacaggcgttgaaattggcgtcgatgtgagccgtgaaacacttgaagaaaattatgatgctattattttatgcacaggtgctcaaaatgcgagagatttaccattggaaggacgaatgggctctggtattcattttgcaatggactatcttactgaacaaacacagtatctaaatggtgagattgaaagtttgagcattactgctaaagataagaatgtaattattataggtgctggtgatactggtgcagactgtgtagcgacagcattacgtgaaaactgtaaatctattgttcaatttaataaatatacgaaacagcctgaagagattacttttgaaagtaatacttcctggccattagcaatgcctgttttcaaaatggattatgcgcataaggaatatgaagctaaatttggtcaagaaccaagagcctatggtgtacaaacaatgcgctatgatgttgacgagttaggaaatgttaaaggcttatatacacaaatattaaaagaaacgcctgatggcatggtgatggaagatggaccagaacgattttggccggctgatttagtcttattatctatagggtttgttggtactgaaaccactgttccgcatgcgtttgatatacacaccgagcgtaataaaattgtagctaatgatacaaattatcaaactaatcacgctaaaatatttgctgcaggagatgcaagacgaggtcagagtttggttgtttgggcaataaaagaaggtcgtgaagtagcacattctgttgatcaatacttaagtaaagaagttctagtgtaa

SEQ ID NO: 2852 - protein, 480 aa, Artificial Sequence
  Description of Artificial Sequence: synthetic amino acid sequence
MKYDKQSLSELSLVDRLSNHEAFQQRFTKEDASIQGARCMDCGTPFCQTGQSYGRETIGCPIGNYIPEWNDLVYHQDFKAAYERLRETNNFPEFTGRVCPAPCEQSCVMKINRESVAIKGIERTIIDEAYENEWVHPAYPEDHKDQRVAIVGSGPAGLTAAEELNFKGYKVTVYEKAHEPGGLLMYGIPNMKLDKDVIRRRVSLMKDAGVLFKTGVEIGVDVSRETLEENYDAIILCTGAQNARDLPLEGRMGSGIHFAMDYLTEQTQYLNGEIESLSITAKDKNVIIIGAGDTGADCVATALRENCKSIVQFNKYTKQPEEITFESNTSWPLAMPVFKMDYAHKEYEAKFGQEPRAYGVQTMRYDVDELGNVKGLYTQILKETPDGMVMEDGPERFWPADLVLLSIGFVGTETTVPHAFDIHTERNKIVANDTNYQTNHAKIFAAGDARRGQSLVVWAIKEGREVAHSVDQYLSKEVLV

SEQ ID NO: 2853 - DNA, 1029 bp, Artificial Sequence
  Description of Artificial Sequence: synthetic nucleic acid sequence
gtgctaagatttcatatcgaggtgaaagtacatatgaaatcaataacgcaggcttcatttatgaaaggtattatgtttacatttacgattgcaataatcagttatatattagctaaatttcctattttacatacgattggggcgttagctattgccatcatttttgcgatgatataccgccaagtcataggttatcctgagcatattcgcccaggtattacgtttgcatcgaaacgtttattaaaatttgcgattatcttatatgggttaaaattaaatatgggagatattctaggtaaaggttggaaattactacttattgatattatcgtaattatcttttcaataagtttaactttacttttgaatcaaattattaaaggaaataaagatatctctatactacttggtattggtacaggagtatgtggagctgcagctattgcagctacagcaccaatcttaaaatctaaagaaaaagacattgcaataagtgtaggtattattgcactagttggaactatatttgcacttatttatacagctatcgaggctatttttaacatacctactataacttatggtgcttggacaggtatcagtctacatgaaatcgctcaagtcgttttagcagcaggtattggcgggtcggaggcaatgacatttgctttacttggaaaattaggccgtgtgtttttacttattccattaagtattgtcttgattttgtatatgcgttataagtcacactcaagtcaagtacaacaaaaaatcgatattccttactttctaattggatttattataatggcttgtatcaatacatttgttcctattccttcattacttatgaatattataaatgttattacaacgttatgtatgttaatggcgatggttgctctaggattgaatatcgttttaaaagaagttatttcaaaagcacttaaaccattcattgtgatctgtataacttcaatttgtctgtctggtgtgactctcttagttacgtctataatgtttaaataa

SEQ ID NO: 2854 - protein, 342 aa, Artificial Sequence
  Description of Artificial Sequence: synthetic amino acid sequence
VLRFHIEVKVHMKSITQASFMKGIMFTFTIAIISYILAKFPILHTIGALAIAIIFAMIYRQVIGYPEHIRPGITFASKRLLKFAIILYGLKLNMGDILGKGWKLLLIDIIVIIFSISLTLLLNQIIKGNKDISILLGIGTGVCGAAAIAATAPILKSKEKDIAISVGIIALVGTIFALIYTAIEAIFNIPTITYGAWTGISLHEIAQVVLAAGIGGSEAMTFALLGKLGRVFLLIPLSIVLILYMRYKSHSSQVQQKIDIPYFLIGFIIMACINTFVPIPSLLMNIINVITTLCMLMAMVALGLNIVLKEVISKALKPFIVICITSICLSGVTLLVTSIMFK

SEQ ID NO: 2855 - DNA, 594 bp, Artificial Sequence
  Description of Artificial Sequence: synthetic nucleic acid sequence
atgttaatcttgagttatctgattggtgcattcccaagcgggttaattattggtaaattattttttaaaaaagatataagacaatacggtagtggaaatactggagcaactaacagttttcgtgttcttggaagaccagctggatttatagttacgtttttagatattttcaagggatttattacagtcttttttccactatggttcccagttcatgcggatggtgttataagcaccttctttacaaatggtttaatagtaggattgtttgcaatactcggtcacgtgtatccaatatatctgaaatttaatggcggaaaagcagtagctaccagtgcaggagttgtattaggtgtcaatcctattttacttcttatcttggcaattatcttttttagtgtattaaaaatctttaaatatgtttctttatcaagtatcattgcagcaattagttgtgtgattggttcaatcatcattcatgattatattttacttgctgttagcggaattgtttcaatcatattaataattcgacacaaatctaatatagttagaatttttaaaggagaagaacctaaaattaaatggatgtaa

SEQ ID NO: 2856 - protein, 197 aa, Artificial Sequence
  Description of Artificial Sequence: synthetic amino acid sequence
MLILSYLIGAFPSGLIIGKLFFKKDIRQYGSGNTGATNSFRVLGRPAGFIVTFLDIFKGFITVFFPLWFPVHADGVISTFFTNGLIVGLFAILGHVYPIYLKFNGGKAVATSAGVVLGVNPILLLILAIIFFSVLKIFKYVSLSSIIAAISCVIGSIIIHDYILLAVSGIVSIILIIRHKSNIVRIFKGEEPKIKWM

SEQ ID NO: 2857 - DNA, 1338 bp, Artificial Sequence
  Description of Artificial Sequence: synthetic nucleic acid sequence
atgagtaaggttaatcatttgatagttgaagatgaacgttattttgcacattctggacggattaaatattatccactagttattgatcatggttatggagccacgttaatcgatgtagacggtaagtcttatattgatttattagcaagtgcaagttcgcaaaatgtgggtcacgctccgaagccagtagtcgaagcaattaagaaccaaactgagaaattcattcattatacaccagcatatatgtatcatgaaccgttagtgcgattatcaaaaaaattatgtgacattgctcctggaaattatgagaagagagttactttcggattaagtggctctgatgctaatgatgggattataaagtttgcacgagcgtatacaggacgtccatacatcataagttttactaatgcataccatggttcaacatttggttcattatcgatgtcttcaattagtttgaatatgcgtaagcattacgggccattacttaatggattttaccatataccttttcccgataagtatagggggatgtttgagcaagctaagcctaacacggttgaggaatatttagctcctttaaaagaaatgtttgcaaaatacgtccctgcggaggaagttgcatgtattgtagttgaaacaattcaaggtgacggtggcttacttgaacccgtaccaggttattttgaagcattacaagagctttgccacgctcacaatattcttattgcagttgatgatatccaacaaggattaggtcgtacaggaaagtggagttccgtagatcattattattttactccagatttaatgacatttggaaagtcattagctggaggtttaccaatgtctgcgattgtaggtcgtaaagaaatcatggaaagtcttgaagcacctgctcatttatttacaactggtgcaaatcctgtaagttgcgaagcagccttagcaacgataaagatgattgaagatgaagatttactaaacgcttcatggaaaaaggggagttacgttagaaaaagaatagacccatggatagaacgttatcaatatgtaggtgatgttcgaggtattggattatcgattggaatagacatagtatcaaataaaattgagaaaactagagattctgaagcagcattaaagatatgtaattactgctttgaaaatggtgtgattatcatagcagttgcgggtaatgttttaagatttcaaccaccacttgtaattacctataagcaacttgataaagcattagatacaatagaacaggcgcttgaaaagttggaaagaggagaattaaatcaatatgacattagtggtcaaggttggtaa

SEQ ID NO: 2858 - protein, 445 aa, Artificial Sequence
  Description of Artificial Sequence: synthetic amino acid sequence
MSKVNHLIVEDERYFAHSGRIKYYPLVIDHGYGATLIDVDGKSYIDLLASASSQNVGHAPKPVVEAIKNQTEKFIHYTPAYMYHEPLVRLSKKLCDIAPGNYEKRVTFGLSGSDANDGIIKFARAYTGRPYIISFTNAYHGSTFGSLSMSSISLNMRKHYGPLLNGFYHIPFPDKYRGMFEQAKPNTVEEYLAPLKEMFAKYVPAEEVACIVVETIQGDGGLLEPVPGYFEALQELCHAHNILIAVDDIQQGLGRTGKWSSVDHYYFTPDLMTFGKSLAGGLPMSAIVGRKEIMESLEAPAHLFTTGANPVSCEAALATIKMIEDEDLLNASWKKGSYVRKRIDPWIERYQYVGDVRGIGLSIGIDIVSNKIEKTRDSEAALKICNYCFENGVIIIAVAGNVLRFQPPLVITYKQLDKALDTIEQALEKLERGELNQYDISGQGW

SEQ ID NO: 2859 - DNA, 1533 bp, Artificial Sequence
  Description of Artificial Sequence: synthetic nucleic acid sequence
atggaagaaagaattggtttgatagacattggttccaacacgattcgacttgttatatttggctacaataaaaaaactgggctcaatgaaatactgaatataaaaacacctgcacgtttaagtcaatatctcactaagtccaatgaaatgaatgatgaaggtattcatgttttaaaagagactttaagcagttttagaaaagttgcggataaatttaacgttgatgcattatatcccatcgcaacagctgctatccgtcaatctaaaaatcgtgaagctatcattaaagaaattaaacaagatattcatatcgaaattcaaattgtacctgaagaagatgaagcattttacggttactatgcgattacacatactactgatattgaaaatggaatttctgtcgatatcggtggcggttctaccgaagttacccttttcaaagacaaacaacttaaagaggctcatagctttccatttggcgtggtatcacttaagcgtcagttttttggtgataaagaacataatgacaaaacagccattaaaaatatggaacagtttttacgtgagcaatttagtcagttagactggctatccaaccaacatattgcgctcgtaggagtaggtggttctgcacgtaatgttgcacgcattcatcaatcagcacatgcataccctatcggtggcgttcataactatacgatgacttcgaaagatattaacaatgtttatgatctaatccgtaaaagttctcgcgatgaactaacaaatttagacggtttaagtcgcgatcgcgtcgatattattctgccggctatctccgtctttaaaacacttttcaaaaaaattgacgccacacaattcaccttctcaagaaaaggaattcgtgaaggatttattatgaaccacatcagcaaacgatatcctgatgagtttaataaaagtaacgtacgtaaagatgcattacgtcatttagcgaacgaatatcatattgaagaaacgagtgctaatcgtcgtgtgaaattagctcaatccttattgaatcaaattataagtgaacgatcacttaatatttcagaaatggaaaaagaattatttattgaaggtgcctacatttattatctaggtagtttcattgattcagactcaagttcaccacatacgtattacttaatcgcaaattcaatgattaacggcttttcacataaagatcgtgtgaaattagctttgttagctagttttaaaaacaaatctttacttaaattttattgcaaagaaacacagtggtttagtaataaagaaatagatacaatacaagctttaggagggattattaaatttgcaaacaccttgaatatctcacatactagttttgtagaggaagttaaactaaaagcaaagaaagatgacaaatacgatttattagtttattacaaaggttcacctattgcagaagaataccaagcaaatcgtcagaaaaagcatattgagaaaattttaaaaggtaaggtttctattatatttacaaaatcttaa

SEQ ID NO: 2860 - protein, 510 aa, Artificial Sequence
  Description of Artificial Sequence: synthetic amino acid sequence
MEERIGLIDIGSNTIRLVIFGYNKKTGLNEILNIKTPARLSQYLTKSNEMNDEGIHVLKETLSSFRKVADKFNVDALYPIATAAIRQSKNREAIIKEIKQDIHIEIQIVPEEDEAFYGYYAITHTTDIENGISVDIGGGSTEVTLFKDKQLKEAHSFPFGVVSLKRQFFGDKEHNDKTAIKNMEQFLREQFSQLDWLSNQHIALVGVGGSARNVARIHQSAHAYPIGGVHNYTMTSKDINNVYDLIRKSSRDELTNLDGLSRDRVDIILPAISVFKTLFKKIDATQFTFSRKGIREGFIMNHISKRYPDEFNKSNVRKDALRHLANEYHIEETSANRRVKLAQSLLNQIISERSLNISEMEKELFIEGAYIYYLGSFIDSDSSSPHTYYLIANSMINGFSHKDRVKLALLASFKNKSLLKFYCKETQWFSNKEIDTIQALGGIIKFANTLNISHTSFVEEVKLKAKKDDKYDLLVYYKGSPIAEEYQANRQKKHIEKILKGKVSIIFTKS

SEQ ID NO: 2861 - DNA, 2184 bp, Artificial Sequence
  Description of Artificial Sequence: synthetic nucleic acid sequence
atgaggtgtatgtatagtatgcaaactcgattgggagaaaaagatattaatttaccgcagtattacaacaatagggagttaagttggctagattttaactacagagtattacaagaatcatatgataaaaataatccgttgcttgaaaaacttaactttatttctatcttcagttcaaatttagatgaattctttatggttcgagtggctgggttaaaagaccaagtcaaaatgggatatgacaaacctgaaaataaagcacagatgacgcctcaagaacaacttgatgctattaaaattaaaaatactgactatgtgaacactcaatatcaacgttataacgaattaattaaagaattagccaattacgatattgagatggtaaaacctgaagacttatcagatgcattgatagaaaaattagaaaaagagttcaagttaagtgtcttgccgacactcactccgttaggtattgatgcgtatcatccatttccaaagttaaataataaaagtttaaatatttttgttgatatcgatacggaagatgccattaattcagctatcgttcaaattccttcattaattccacgctttttaactttaaatgagggtacaaaacaatacgttgtcatggtagaagatgtaattacgtatttcatcaattatctatttacaggatacgaagtactaaatacttttactttccgaataacacgtaatgcagatttaaccattcatgaagatggcgctgaggacttgcttatagaaattgaacgtttcttgaaagaacgtaagagtggttcggctgtacgtttagaattagattgtcgcacttctgaaaaagagaatgtagaatggttaatcgatcaattagaaattgaagataatgatatttattatttagatggtccacttgatttaacattcttatttggattggttgatcatctatctcataagctcaaatatttaacgtatgagaaatatacccctcaaccacctagatcattaggcaacaagaatatctatcaattatcattagaaagagatatattcttccaccatccgtatgaatcatttgaaccaatagttgactttattcgacaagcagcagatgacccaaatacaatcgctatcaaacaaaccttgtatcgagtgagtaaggattcgccgattattaacagcttaaaagaagccgctgaaaacggcaagcaagtaacggtgctcgtagaattaaaagcacgctttgatgaagaaaataacgtacattgggcacgtatgttagaagatgctggctgtcacgttatttatggtatgacacatctaaaaacgcatagtaaaattgcgctagtcgttaaacgcatcaacaataaacttacgtcatttgttcatttaggcacaggtaactataacgataaaactgctaaattatacacagatatgggtatcatcacgacaaataaagatatcgctgaggatgcaattaacttctttaattacttgagtggttactcaacaaaaccagaatacaataaattgattgtagcaccatacgatattcgagacgtcttcattgatcgtatcgataaagaaatacgtagtcatttacaacatggtaacggtaaaattatgatgaaaatgaactctttaaccgataaaacgattatcgaaaagctcttcgaagcatcccaagcaggcgttaaaatacaactcatcattcgtggtatatgttgtcttaaaccaggcattccaggtattagcgaaaatatagaggttgttagtattgtgggtcgtttgcttgaacattcacgtatttactacttccataataatggtgaggcgcatatttatttatcttcagctgacgttatgacacgtaatatgattaaacgtgtcgaaatattattccctgttgaagataaatcaataggacaacgattagttaactatatgaatttacaattatctgacaaccaaaaaggtcgttaccaagatgcacaaggcgtttatcattatgtcgaaaacaattcatctcctttaaactctcaatcttacttgatgcaagaagcaattaagtatggagaagaactaaaaaaacaatcggtacaaccttctggacaacccgttcattctagacgtggtggtagttggatacgaaaattaaaaagtacatttaaaagataa

SEQ ID NO: 2862 - protein, 727 aa, Artificial Sequence
  Description of Artificial Sequence: synthetic amino acid sequence
MRCMYSMQTRLGEKDINLPQYYNNRELSWLDFNYRVLQESYDKNNPLLEKLNFISIFSSNLDEFFMVRVAGLKDQVKMGYDKPENKAQMTPQEQLDAIKIKNTDYVNTQYQRYNELIKELANYDIEMVKPEDLSDALIEKLEKEFKLSVLPTLTPLGIDAYHPFPKLNNKSLNIFVDIDTEDAINSAIVQIPSLIPRFLTLNEGTKQYVVMVEDVITYFINYLFTGYEVLNTFTFRITRNADLTIHEDGAEDLLIEIERFLKERKSGSAVRLELDCRTSEKENVEWLIDQLEIEDNDIYYLDGPLDLTFLFGLVDHLSHKLKYLTYEKYTPQPPRSLGNKNIYQLSLERDIFFHHPYESFEPIVDFIRQAADDPNTIAIKQTLYRVSKDSPIINSLKEAAENGKQVTVLVELKARFDEENNVHWARMLEDAGCHVIYGMTHLKTHSKIALVVKRINNKLTSFVHLGTGNYNDKTAKLYTDMGIITTNKDIAEDAINFFNYLSGYSTKPEYNKLIVAPYDIRDVFIDRIDKEIRSHLQHGNGKIMMKMNSLTDKTIIEKLFEASQAGVKIQLIIRGICCLKPGIPGISENIEVVSIVGRLLEHSRIYYFHNNGEAHIYLSSADVMTRNMIKRVEILFPVEDKSIGQRLVNYMNLQLSDNQKGRYQDAQGVYHYVENNSSPLNSQSYLMQEAIKYGEELKKQSVQPSGQPVHSRRGGSWIRKLKSTFKR

SEQ ID NO: 2863 - DNA, 633 bp, Artificial Sequence
  Description of Artificial Sequence: synthetic nucleic acid sequence
atggcaaacaaagatttaacagttatcgcttctggtggtgatggagacggctatgcaataggaatgggacatactattcatgctcttagacgtaatatgaatatgacgtatattgtcatggacaatcaaatatatggattaactaaaggacaaacatcaccttcctcagctaaaggatttgtaactaaatcaacacctaaaggaaatatagaaaagaatgtagctccattggaattggcactgtcctctggtgcaacttttgtagcacaaggattctcaagtgatataaaggcattaactaaaatgattgaagatgcgattcatcatgatggtttttcttttgttaatgttttctcaccttgtgttacttacaataaagtgaatacttatgactggtttaaagaacatttaacaagtatcgatgatattgagggctatgacatcacagataaacaacttgctatgaaaactgtgctggatcatgagtcactggttaaaggtatcgtttatcaagatacaacaacaccttcttatgaatcgcaaatttcagaactagaacatgaggcgttagctaaaagagatattcatattacagaagaaactttcaacgatttaactgcacaatttttataa

SEQ ID NO: 2864 - protein, 210 aa, Artificial Sequence
  Description of Artificial Sequence: synthetic amino acid sequence
MANKDLTVIASGGDGDGYAIGMGHTIHALRRNMNMTYIVMDNQIYGLTKGQTSPSSAKGFVTKSTPKGNIEKNVAPLELALSSGATFVAQGFSSDIKALTKMIEDAIHHDGFSFVNVFSPCVTYNKVNTYDWFKEHLTSIDDIEGYDITDKQLAMKTVLDHESLVKGIVYQDTTTPSYESQISELEHEALAKRDIHITEETFNDLTAQFL

SEQ ID NO: 2865 - DNA, 1047 bp, Artificial Sequence
  Description of Artificial Sequence: synthetic nucleic acid sequence
atgtataataaagtttttgcaattttaattataattttttccataataattattgcgtctaatgatactttcgcagaaagtaagaatgatatgatgaatatgaaagaagataagaaaaatacaatggatatgacaaatatgaaacatcatgacgaaagaaagaaattaaattcttcacaaggaaaaaatgaaataatatttcctaaagttgcagagtcaaaaaaagataacaatggttataaaaattatacattaaaagctcaggaaggaaagacagagttttacaaaaataatttttctaatactctaggctacaatggaaatttacttggaccaactttaaaattaaaaaaaggagataaagttaaaattaagttaataaataacttagatgaaaatacaacatttcattggcatggattagaagtaaatggaaaagtggatggagggccttctcaggttataaaaccaggaaaagaaaaaactataaaatttgaggttaatcaagattctgctacgttatggtatcacccccacccctctccaaatacagctaaacaagtttataatggcttatcaggattattatatatagaagatagtaaaaagaataattatcctagtgattatggaaaaaatgatttgcctataataatccaagataaaacatttgtatctaaaaaattaaattattcaaaaacgaaagacgaagatggcactcaaggtgatactgttcttgtgaacggaatagtaaaccccaaactgacaacaaaagaagagaaaatacgtttgagacttttaaatggttctaatgctcgagatttaaatcttaagctaagtaataatcaaagttttgagtatattgcttcagatggcggtcaattaaaaaacgctaaaaaattaaaagaaattaatttagctccttcagaaagaaaagaaatagtaatagatttatctaaaatgaaaggcgagaaaatcagtctggttgataatgataaaactgtaattttaccgattagtaaacaactggtaagtgtaagatattag

SEQ ID NO: 2866 - protein, 348 aa, Artificial Sequence
  Description of Artificial Sequence: synthetic amino acid sequence
MYNKVFAILIIIFSIIIIASNDTFAESKNDMMNMKEDKKNTMDMTNMKHHDERKKLNSSQGKNEIIFPKVAESKKDNNGYKNYTLKAQEGKTEFYKNNFSNTLGYNGNLLGPTLKLKKGDKVKIKLINNLDENTTFHWHGLEVNGKVDGGPSQVIKPGKEKTIKFEVNQDSATLWYHPHPSPNTAKQVYNGLSGLLYIEDSKKNNYPSDYGKNDLPIIIQDKTFVSKKLNYSKTKDEDGTQGDTVLVNGIVNPKLTTKEEKIRLRLLNGSNARDLNLKLSNNQSFEYIASDGGQLKNAKKLKEINLAPSERKEIVIDLSKMKGEKISLVDNDKTVILPISKQLVSVRY

SEQ ID NO: 2867 - DNA, 1017 bp, Artificial Sequence
  Description of Artificial Sequence: synthetic nucleic acid sequence
atgtctcttttggatgacgtcattttaggtaatacggtaggtaatggggggaatttagctagaaaatcattacttgaagcgggattagattttaaaatacctggtataacaattgatcgtcaatgtggctcaggtcttgaagccgttatacaagcctgtaggatggtacaaagtggtgctggaacaatatatattgcaggtggtgttgagagtaccagtagagcaccttggaaaatcaaacgtccgcagtcagtttatgaatctgagtttccacaattttttgaacgggcgccttttgcaagagaaggagaagacccttcaatgattgaagcagccgaaaatgtagcgaagaaatatcatatcagtagaaatgaacaagatgactttgcgtatcgcagtcatcagttggcatcaaaaaatatgaataacggtaatatttcccaagaaattttaccgttcaaagtgaaaggtgaatattttaatcaagatgaaagtattaaacctcaacttactctcagaacacttggcagacttaaaccacttttaaatgaaggaacagtcacagtaggaaatagttgtaagaaaaatgatggtgcagtattactgattgttatggaagaaaatcgggcacgtcaattaggattcacagaagggattaagtttgtgaatagtgcaactgtaggtgttcaaccacagtatttaggagtaggtccagtgccagcagtaaatcaattattagctcaagaacgattaactataaatgatataaatgcagtagaattaaatgaagcatttagctctcaagttattgcgagccaacaacagcttaacattcctttgaataagttgaattgttggggaggagcaattgctacagggcatccatatggtgcaagtggagcagcgttagtcacacgtttattttatatgaaacatcaatttagaactatagcaactatgggaataggtggagggataggaaatgcagctttatttgaaagatggtatggaaattag

SEQ ID NO: 2868 - protein, 338 aa, Artificial Sequence
  Description of Artificial Sequence: synthetic amino acid sequence
MSLLDDVILGNTVGNGGNLARKSLLEAGLDFKIPGITIDRQCGSGLEAVIQACRMVQSGAGTIYIAGGVESTSRAPWKIKRPQSVYESEFPQFFERAPFAREGEDPSMIEAAENVAKKYHISRNEQDDFAYRSHQLASKNMNNGNISQEILPFKVKGEYFNQDESIKPQLTLRTLGRLKPLLNEGTVTVGNSCKKNDGAVLLIVMEENRARQLGFTEGIKFVNSATVGVQPQYLGVGPVPAVNQLLAQERLTINDINAVELNEAFSSQVIASQQQLNIPLNKLNCWGGAIATGHPYGASGAALVTRLFYMKHQFRTIATMGIGGGIGNAALFERWYGN

SEQ ID NO: 2869 - DNA, 474 bp, Artificial Sequence
  Description of Artificial Sequence: synthetic nucleic acid sequence
atgaaaaaaatcaaaacaatctcgacattggtagctggacttggtatagcatttctaggtcacacaacacatgcagatgcggctgaaaataacaatcaacaacaaagtacatataactatagtacaactgaagtatcattttctaattcaggaaatttatatacttctggccaatgtacttggtatgtttatgataaaactggtggaaaaatcggatcaacatgggggaatgcaaatagctgggcaactgcagctcaagcagcaggattcactgtaaataatacacctgaagaaggtgcaattatgcaatcatctgaaggtgctttcggacatgttgctttcgttgaaagtgtcaataatgatggttctattactgtatcagaaatgaactatgatggtggtccattcgctataagcacacgaacaatctctgccagtgaagcaagttcatataattacatccacctgaattaa

SEQ ID NO: 2870 - protein, 157 aa, Artificial Sequence
  Description of Artificial Sequence: synthetic amino acid sequence
MKKIKTISTLVAGLGIAFLGHTTHADAAENNNQQQSTYNYSTTEVSFSNSGNLYTSGQCTWYVYDKTGGKIGSTWGNANSWATAAQAAGFTVNNTPEEGAIMQSSEGAFGHVAFVESVNNDGSITVSEMNYDGGPFAISTRTISASEASSYNYIHLN

SEQ ID NO: 2871 - DNA, 345 bp, Artificial Sequence; identical to SEQ ID NO: 2795
  Description of Artificial Sequence: synthetic nucleic acid sequence

SEQ ID NO: 2872 - protein, 114 aa, Artificial Sequence; identical to SEQ ID NO: 2796
  Description of Artificial Sequence: synthetic amino acid sequence

SEQ ID NO: 2873 - DNA, 1179 bp, Artificial Sequence; identical to SEQ ID NO: 2793
  Description of Artificial Sequence: synthetic nucleic acid sequence

SEQ ID NO: 2874 - protein, 392 aa, Artificial Sequence; identical to SEQ ID NO: 2794
  Description of Artificial Sequence: synthetic amino acid sequence

SEQ ID NO: 2875 - DNA, 1104 bp, Artificial Sequence
  Description of Artificial Sequence: synthetic nucleic acid sequence
atgaaggatacagatttagctcaaattgctttaacacaagatcacactggcgcaattgccaatccaatatatttatctactgcatatcagcatcctcacctaggtgaatcaacaggctatgattatacacgaactaaaaatccaacaagaacagcctttgaagaagcttttgcacaacttgaaaaaggcattgcttcatttgctacttccagtggtatggcggcgattcagttaatatgtaatatattcaaaccaggtgatgaaattctcgttgcatttgacctatatggtggaacatttcggttattcgatttttacgaaaaacaatatggtttgaagtttaaatatgtagactttttaaattatgaagaagtggaaaaaaacatcactccacaaactagagcattatttattgaaccaatctcaaatccacaaatgattgaaattgatgtagaaccatattatatccttagcaaaaaacatcaactattaacaattatcgacaacacttttttaacaccttatctttcgacaccactcgaagaaggtgcagatatcgttctgcattcagcaacaaaatatattggcggacataacgatgtgttagctggagttgtaactgttaaggatgctcaattagctgaacaattgaatcaattccataatatgattggagcaactctatcacctcttgatagttatcttttacaaagaggtctaaagacattacatcttcgcatagagcgttcccaagaaaatgctcaaaaacttgcacaacgatgtcgccagtcagattcaattgatgaagttttatatagtggacgaacaggcatgcttagtttaagactgaaccaagcatatagcgtcgctaaatttttagaaaatttagaaatttgtatatttgcagaaagcttaggtggtacagaaacatttatcaccttcccttatacacaaacacacgttgatatgccagatgaggaaaaagacaaacgtggaattgatgaatatctcatcagattgtccgtaggtatagaagactataacgatatagaagctgacataattcaagcattagagaattctaaagtaggagtgatttcatga

SEQ ID NO: 2876 - protein, 367 aa, Artificial Sequence
  Description of Artificial Sequence: synthetic amino acid sequence
MKDTDLAQIALTQDHTGAIANPIYLSTAYQHPHLGESTGYDYTRTKNPTRTAFEEAFAQLEKGIASFATSSGMAAIQLICNIFKPGDEILVAFDLYGGTFRLFDFYEKQYGLKFKYVDFLNYEEVEKNITPQTRALFIEPISNPQMIEIDVEPYYILSKKHQLLTIIDNTFLTPYLSTPLEEGADIVLHSATKYIGGHNDVLAGVVTVKDAQLAEQLNQFHNMIGATLSPLDSYLLQRGLKTLHLRIERSQENAQKLAQRCRQSDSIDEVLYSGRTGMLSLRLNQAYSVAKFLENLEICIFAESLGGTETFITFPYTQTHVDMPDEEKDKRGIDEYLIRLSVGIEDYNDIEADIIQALENSKVGVIS

SEQ ID NO: 2877 - DNA, 417 bp, Artificial Sequence
  Description of Artificial Sequence: synthetic nucleic acid sequence
atgataggtactatgattgaaacgcctagagcatgcttgattgcgaatgaccttgcgaaacattgtgatttcttcagttttggtactaatgatttaacgcaattgacatttggtttctctagagatgatgcaggaaaattcataaatgtgtatactgaaaataacattttacagcttgacccattccaaactttagatagagaaggtgtaggacgactaattcaattagctgttgaacaagctaaaaatacaaatccagagataaaaattggtgtatgtggtgagcttggtggcgatgcaaaatcaattcgtaaatttaaccaatgggaaattgattatgtttcatgttcaccatttagagttccgggtgcaattttagctacagctcagagtcaagcggaggaaagcgagcgataa

SEQ ID NO: 2878 - protein, 138 aa, Artificial Sequence
  Description of Artificial Sequence: synthetic amino acid sequence
MIGTMIETPRACLIANDLAKHCDFFSFGTNDLTQLTFGFSRDDAGKFINVYTENNILQLDPFQTLDREGVGRLIQLAVEQAKNTNPEIKIGVCGELGGDAKSIRKFNQWEIDYVSCSPFRVPGAILATAQSQAEESER

SEQ ID NO: 2879 - DNA, 1530 bp, Artificial Sequence
  Description of Artificial Sequence: synthetic nucleic acid sequence
atgataactactacacaagaggtgaacattatggctatgtctgacaaaaaagacgtcgtgttaatcggtgctggtgtactaagtactacatttggttctatgttgaaaacgattgcacctgattgggacattcatttatatgaacgtctagatcgtcctggtattgaaagttcaaatgaacgtaacaatgcaggaacaggacatgcagctttatgtgaattgaactatactgtacaacaacctgatggttcaattgatattgaaaaagctaaagaaattaatgaacaatttgaaatttctaaacaattctggggtcatttagttaaatcaggagaaattcaaaatcctaaagaatttattaatccattacctcatattagttttgttcgtggtaaaaataacgttaaattcttaaaagatcgttatgaagcgatgaagcaattccctatgttcgataatatcgaatatactgaagatattgaagaaatgagaaaatggattccattaatgatgaaaggccgtgaagataagggctacatggcagcgagtaaaatagacgaaggaactgacgtaaactacggtgaattaactcgtaaaatggctcaaaatcttaaaaactcaccaaacgttgaagtgcaatacaaacatgaagttgttgattttgaacgtttgtctaatggtaaatggtcagttaaaattaaaaatctaaataatggacaagtattcgaacatcaaactgattatgtgtttatcggtgctggtggtggcgcaattccactattacaaaaaactggcattccagaaagtaaacatttaggtggattcccaatcagtggtcaatttattgcttgtacaaatccgcaagttattgaacaacacgatgccaaagtttatggtaaagaaccacctggtacaccaccaatgacggtacctcacttagatacacgttacattgatggtgaaagaacattattatttggaccatttgcaaacgtgggacctaaattcctaaaacatggttctaacttggatttattcaaatcaattaaaccatataacattacgactttacttgcttctgcagttaaaaacttaccattaattaagtattcatttgaccaagtcatcatgacaaaagaaggttgtatgaaccatttacgtacgttctatcctgaagcacgtgatgaagattggcaagtttatacagctggtaaacgtgtacaagttattaaagatactgaagagaatggtaaaggatttatccaatttggtactgaagtggttaattctgaagaccactcagttattgcattactaggcgaatcaccaggagcatcaacttcagtatcagtagcactagaagttttagagaaaaacttccctgaatacgcgaaagactgggaacctaaaatcaagaaaatgattccttcatatggtgaatcacttattgatgatgttcaattaatgagaaaaatacgtaaacaaacatctaaagatcttgaattaggattctataataaagcaaaataa

SEQ ID NO: 2880 - protein, 509 aa, Artificial Sequence
  Description of Artificial Sequence: synthetic amino acid sequence
MITTTQEVNIMAMSDKKDVVLIGAGVLSTTFGSMLKTIAPDWDIHLYERLDRPGIESSNERNNAGTGHAALCELNYTVQQPDGSIDIEKAKEINEQFEISKQFWGHLVKSGEIQNPKEFINPLPHISFVRGKNNVKFLKDRYEAMKQFPMFDNIEYTEDIEEMRKWIPLMMKGREDKGYMAASKIDEGTDVNYGELTRKMAQNLKNSPNVEVQYKHEVVDFERLSNGKWSVKIKNLNNGQVFEHQTDYVFIGAGGGAIPLLQKTGIPESKHLGGFPISGQFIACTNPQVIEQHDAKVYGKEPPGTPPMTVPHLDTRYIDGERTLLFGPFANVGPKFLKHGSNLDLFKSIKPYNITTLLASAVKNLPLIKYSFDQVIMTKEGCMNHLRTFYPEARDEDWQVYTAGKRVQVIKDTEENGKGFIQFGTEVVNSEDHSVIALLGESPGASTSVSVALEVLEKNFPEYAKDWEPKIKKMIPSYGESLIDDVQLMRKIRKQTSKDLELGFYNKAK

SEQ ID NO: 2881 - DNA, 768 bp, Artificial Sequence
  Description of Artificial Sequence: synthetic nucleic acid sequence
atgtttaaaataggaaatttagaattacaatctcgtttacttttaggtactggaaaatttgaaaatgaagaggttcagtcaaaagcaattgaggcatctgaaacaaatgtacttacatttgcagtaagacgtatgaatttatatgatcgtaacctacctaacccacttgcaaacgttaatttaaaagattttatcacttttccaaatactgcaggtgccaaaacagctcaagaagctatcagaattgctgaaattgctaatcacgcaggtgtatgtgacatgattaaagtcgaagtcattggtgatgacgaaacattattacctgatccattcgaaacatacgaggcatgcaaagtattgttagaaaaaggttacactgtttgtccttacatctctaacgatttagttttagctcaacgtttagaagaattgggtgtacacgcagttatgccacttgcatcccctattggtacaggaagaggtattaataacccattaaatttaagttatattatcgaaaatgctagtgtacctgtaatcgtagatgctggtattggttcccctaaagatgcgtgtcatgccatggagcttggcgcagatggtattttactcaacacagccatttcagcggcaaaagatcctgtgaaaatggctgaagcaatgaaattaggtataaatgctggcagactttcatatgaagctggacgcattcctgttaagtatactgcacaagcatctagtccatcagaaggtttagggttcttgtaa

SEQ ID NO: 2882 - protein, 255 aa, Artificial Sequence
  Description of Artificial Sequence: synthetic amino acid sequence
MFKIGNLELQSRLLLGTGKFENEEVQSKAIEASETNVLTFAVRRMNLYDRNLPNPLANVNLKDFITFPNTAGAKTAQEAIRIAEIANHAGVCDMIKVEVIGDDETLLPDPFETYEACKVLLEKGYTVCPYISNDLVLAQRLEELGVHAVMPLASPIGTGRGINNPLNLSYIIENASVPVIVDAGIGSPKDACHAMELGADGILLNTAISAAKDPVKMAEAMKLGINAGRLSYEAGRIPVKYTAQASSPSEGLGFL

SEQ ID NO: 2883 - DNA, 672 bp, Artificial Sequence
  Description of Artificial Sequence: synthetic nucleic acid sequence
atgacgaattatcataataagttaaaacaatatgcagaattattagtaagagtgggaatgaatgtacaaccacagcaacctgtttttatacgttcatctgttgaagcgttagaattaactcatttaatcgtcgaggaagcatataaagcaggggcagaagatgttcgagtgagctacacagacccgaaattaaaaagattaaaatttgaaaacgaatcagttgaacactttgaaaaacaagaactcaaacaatatgatattgaagagcgtctggattatgttaatcgtggcgcagcgaacttggcgctcattgctgaagatccagagctattaaatggaatagatgcgcaaaagttaaaagcgtatcaaactgtatactcaaaaggatttaaaccatatatggaagcaagtcaaaaaaaccaatttccatgggtagtggctgcgttccctactagggattgggcacgtcgtgtctatccagagttggatgttgaatcagcatatattaaattcattgatgaagtatttgatattgttcgtgtagatggacaaaatccaattgaaaattgggaaaaacacattaaagatttaagtgttcatgctaaacgattacaagagaaaaactatcaagctttacattacatatcagaaaattcatacatttggttttga

SEQ ID NO: 2884 - protein, 223 aa, Artificial Sequence
  Description of Artificial Sequence: synthetic amino acid sequence
MTNYHNKLKQYAELLVRVGMNVQPQQPVFIRSSVEALELTHLIVEEAYKAGAEDVRVSYTDPKLKRLKFENESVEHFEKQELKQYDIEERLDYVNRGAANLALIAEDPELLNGIDAQKLKAYQTVYSKGFKPYMEASQKNQFPWVVAAFPTRDWARRVYPELDVESAYIKFIDEVFDIVRVDGQNPIENWEKHIKDLSVHAKRLQEKNYQALHYISENSYIWF

SEQ ID NO: 2885 - DNA, 426 bp, Artificial Sequence
  Description of Artificial Sequence: synthetic nucleic acid sequence
atgacaaatacattagaaattaaattattatcagaaaacgcgactatgccgaagagagcaaattctacagatagtggattggacttatacgtatcagaaacgattaacattcctgcacacgcaactaaagtagttaaaacagatatagcgattaatctgccttatgggtatgaggcgcaagtaagacctagatctggtaaatcacttaaaactaaattgcgtgtagcactaggaacaatagaccaaacataccacaaagaaataggtatcatcacagataacataggtaatgaagatatcacagtagaaaaaggagaaagattagcgcaattagttgtagcgccagttgtatatcctacacccaaacaggttgattggtttgaaaatgaaagcgacagaggtgcatatggaagcacaggagaataa

SEQ ID NO: 2886 - protein, 141 aa, Artificial Sequence
  Description of Artificial Sequence: synthetic amino acid sequence
MTNTLEIKLLSENATMPKRANSTDSGLDLYVSETINIPAHATKVVKTDIAINLPYGYEAQVRPRSGKSLKTKLRVALGTIDQTYHKEIGIITDNIGNEDITVEKGERLAQLVVAPVVYPTPKQVDWFENESDRGAYGSTGE

SEQ ID NO: 2887 - DNA, 474 bp, Artificial Sequence
  Description of Artificial Sequence: synthetic nucleic acid sequence
gtgatactaatgatacatgtagcatttgtatgtctcggtaatatatgtcgttctccaatggctgaggctatcatgagacaaagactacaagaaagaggtatttcagatataaaagttcattctagaggaacaggacgttggaatttaggcgaacctccacataacggaacacaaaaaattctacagaagtaccatattccttatgatggtatggtgagtgaacttttcgaacctgatgatgattttgactatattattgctatggaccaaagtaacgtagacaatatcaaacaaatcaatccaaatttacaaggacaattgttcaaattgctagaatttagtaacatggaagagagtgatgtaccagatccatactacacaaataattttgaaggtgttttcgagatggtgcaatcatcttgtgataatttaatagactacatcgtaaaagatgcaaatttgaaagagaggtaa

SEQ ID NO: 2888 - protein, 157 aa, Artificial Sequence
  Description of Artificial Sequence: synthetic amino acid sequence
VILMIHVAFVCLGNICRSPMAEAIMRQRLQERGISDIKVHSRGTGRWNLGEPPHNGTQKILQKYHIPYDGMVSELFEPDDDFDYIIAMDQSNVDNIKQINPNLQGQLFKLLEFSNMEESDVPDPYYTNNFEGVFEMVQSSCDNLIDYIVKDANLKER

SEQ ID NO: 2889 - DNA, 1002 bp, Artificial Sequence
  Description of Artificial Sequence: synthetic nucleic acid sequence
atgaaaaatttacgtaacagaagctttttaactttattagacttttcacgacaagaggtagaatttttattaacactctccgaagatttgaagcgtgccaaatatatcggcactgaaaagcctatgctaaaaaataaaaatatcgcgcttctttttgaaaaagattccactagaacacgttgcgcattcgaagttgccgcacatgatcaaggtgcacacgtcacttatcttggacctacaggttctcaaatgggtaaaaaagaaactgctaaagatacagcacgtgtacttggtggtatgtatgatggtattgagtaccgaggtttctctcaacgtactgtagaaacattagcgcaatattcaggtgttccggtatggaatggattaaccgatgaagatcaccctacacaagtgcttgctgactttttaactgctaaagaagtattgaaaaaagagtatgctgatatcaactttacttatgttggcgatggacgtaacaatgttgctaacgcattaatgcaaggtgctgccattatgggtatgaatttccatcttgtttgtcctaaagaactcaatccgacagaagaattattaaatcgttgcgaacgtattgcgacggaaaatggcggtaacattttaataacagatgatattgataaaggcgtgaaagattctgatgttatttatacagatgtttgggtatcaatgggcgaacctgatgaagtatggcaagaacgccttaaacttttaaaaccatatcaagttaaccaagcattattagaaaaaacaggcaatccaaatgttatttttgaacattgtttaccttctttccacaatgcagaaactaaaattggtcaacaaatttatgaaaaatatggcattagtgaaatggaagtcactgatgatgtcttcgaaagcaaagcttctgtagtattccaagaagctgagaatagaatgcatacaattaaagcggtcatggtagcaactttaggagaattctaa

SEQ ID NO: 2890 - protein, 333 aa, Artificial Sequence
  Description of Artificial Sequence: synthetic amino acid sequence
MKNLRNRSFLTLLDFSRQEVEFLLTLSEDLKRAKYIGTEKPMLKNKNIALLFEKDSTRTRCAFEVAAHDQGAHVTYLGPTGSQMGKKETAKDTARVLGGMYDGIEYRGFSQRTVETLAQYSGVPVWNGLTDEDHPTQVLADFLTAKEVLKKEYADINFTYVGDGRNNVANALMQGAAIMGMNFHLVCPKELNPTEELLNRCERIATENGGNILITDDIDKGVKDSDVIYTDVWVSMGEPDEVWQERLKLLKPYQVNQALLEKTGNPNVIFEHCLPSFHNAETKIGQQIYEKYGISEMEVTDDVFESKASVVFQEAENRMHTIKAVMVATLGEF

SEQ ID NO: 2891 - DNA, 942 bp, Artificial Sequence
  Description of Artificial Sequence: synthetic nucleic acid sequence
gtgagtgaaatggctaaaattgtagtagctttaggtggaaacgctttaggaaaatcaccacaagaacaacttgaattagtaaaaaatacagctaaatccctagtaggattaattactaaaggtcacgaaattgtgattagtcacggtaatggaccacaagtaggaagtattaaccttggtctgaattatgcagctgaacacgatcaaggtcctgcttttccatttgctgaatgtggcgctatgagtcaagcctacatcggctatcaacttcaagaaagtttacaaaatgaacttcattcaatgggcatagataagcaagttgtcacactagttacccaagtagaagttgatgaaggcgatccagcttttaatagtccaagtaaacccatcggtctgttctacactaaagaagaagcaaatcgtattcaacaggaaaaaggttatcaatttgtagaagatgctggtcgaggttaccgtcgcgttgtaccatcaccacaaccaatatctattatcgaactggaaagtattaaaactctagtagaaaatgacacactcgtcatcgctgcaggtggaggtggtataccagtcattcgcgaacagcatgatagctttaaaggtatagatgccgtcatcgataaagacaaaacaagtgcattattaggtgctgatattcactgtgatcaactcattattttaacagcgattgattatgtttatatcaactatcatactgaccaacaacaagcacttaaaacaacaaatatagatacgcttaaaacatatattgaagaagaacaatttgccaaaggcagcatgctacctaaaatcgaatctgccatctcctttattgaaaataatcctaacggtagcgtgctcatcacatcattaaatcaattagatgcagcactagaaggtaaaattggcacactcattacaaagtaa

SEQ ID NO: 2892 - protein, 313 aa, Artificial Sequence
  Description of Artificial Sequence: synthetic amino acid sequence
VSEMAKIVVALGGNALGKSPQEQLELVKNTAKSLVGLITKGHEIVISHGNGPQVGSINLGLNYAAEHDQGPAFPFAECGAMSQAYIGYQLQESLQNELHSMGIDKQVVTLVTQVEVDEGDPAFNSPSKPIGLFYTKEEANRIQQEKGYQFVEDAGRGYRRVVPSPQPISIIELESIKTLVENDTLVIAAGGGGIPVIREQHDSFKGIDAVIDKDKTSALLGADIHCDQLIILTAIDYVYINYHTDQQQALKTTNIDTLKTYIEEEQFAKGSMLPKIESAISFIENNPNGSVLITSLNQLDAALEGKIGTLITK

SEQ ID NO: 2893 - DNA, 345 bp, Artificial Sequence
  Description of Artificial Sequence: synthetic nucleic acid sequence
gtgaattactgtttacaagctgcagatattttggcaaatgacggcatcgatgttgaagtagtcgacttaagaacagtttatccactagataaagcaactatcattgaacgctctcaacgtactggtaaagttcttcttgttactgaagataatctagagggaagcattatgtctgaagtatctgcaattatagctgaaaactgtctgttcgatttagatgcgccaatcatgcgattagctgcaccggatgtcccatctatgccattttcaccaacattagaaaatgaaattatgatgaacccagaaaagatacaggacaaaatgcgtgaactcgcacaattttaa

SEQ ID NO: 2894 - protein, 114 aa, Artificial Sequence
  Description of Artificial Sequence: synthetic amino acid sequence
VNYCLQAADILANDGIDVEVVDLRTVYPLDKATIIERSQRTGKVLLVTEDNLEGSIMSEVSAIIAENCLFDLDAPIMRLAAPDVPSMPFSPTLENEIMMNPEKIQDKMRELAQF

SEQ ID NO: 2895 - DNA, 1491 bp, Artificial Sequence
  Description of Artificial Sequence: synthetic nucleic acid sequence
atgcacatgagtgaagcaaatcataaaaacatcgttgttgtaggtgcaggaattattggtacgtcagtagcgacaatgctttcaaaagtaagtcctaactggcatatcgatatgtttgaaagactagaaggcgctggtattgaaagttcaaatgaaaataataatgctgggacaggtcatgcggcattatgtgaattaaactatacagttgaacaagatgatggttcaattgatgcatctaaagcgcaagaaattaatgaacaattcgaattatctagacaattctggggtaatttagttaaaaatggtgatatttctaatcctgaagaatttattcaaccattacctcatatcagtttcgttatgggaccaacaaacgttaactttttaagaaaacgttatgaaacactaagaactcttccaatgttcgatacaatcgaatatacagaagacatggaaacaatgagaaaatggatgccattaatgatggaaaatcgtgaaccaggtcatcaaatggcagcaagtaaaattgatgaaggtacagatgtgaactatggtgcgttaacacgtaagttagcacattacttagaacaaaaatctaatgtttcattaaaatacaatcatgatgttgtagatttaacacaaagagaagatggcaaatgggaagttgtcgttgaaaatagagaaactaaagaaaaagtaactaaaatagcagataaagtgtttattggtgctggcggtcactctattccgttattacaaaaatctggcgttaaacaaagagaacacctaggtggtttcccaatcagtggtcaattcttaagatgtacaaacccagatattattaaacaacatgcggctaaagtttacagtaaagagcctcaaggtaagccaccaatgactgtaccacaccttgatacacgttatatcaatggtaaacaaacattattatttggtccatatgcgaatatcggccctaaattcttgaaattcggttcaaatctagacttattcgaatcaatcaaaccatataacattactacaatgttggcttcagcagttaaaaatgtacctttaattaaatattcaattgatcaaatgatcaaaactaaagaaggttgtatgaactatttaagaacatttattcctgatgctaaagatgaagattgggaactttacactgctggtaaacgtgttcaagttattaaagatagtgaacaacacgggaaaggtttcgtagtatttggtactgaagttgtcaattcagacgacaattctatgattgcattattaggtgaatctccaggggcttcaacatcattatcagttgtattagaagttttagagaaaaacttcgctgatgacaaagaagcatgggaacctgttgttaaagaaatggtaccaacatacggtcgttcattaattaatgacgaaaaattaatgagagaaacacgtcgcgaaacttctaaaaacttacatttaaatagataa

SEQ ID NO: 2896 - protein, 496 aa, Artificial Sequence
  Description of Artificial Sequence: synthetic amino acid sequence
MHMSEANHKNIVVVGAGIIGTSVATMLSKVSPNWHIDMFERLEGAGIESSNENNNAGTGHAALCELNYTVEQDDGSIDASKAQEINEQFELSRQFWGNLVKNGDISNPEEFIQPLPHISFVMGPTNVNFLRKRYETLRTLPMFDTIEYTEDMETMRKWMPLMMENREPGHQMAASKIDEGTDVNYGALTRKLAHYLEQKSNVSLKYNHDVVDLTQREDGKWEVVVENRETKEKVTKIADKVFIGAGGHSIPLLQKSGVKQREHLGGFPISGQFLRCTNPDIIKQHAAKVYSKEPQGKPPMTVPHLDTRYINGKQTLLFGPYANIGPKFLKFGSNLDLFESIKPYNITTMLASAVKNVPLIKYSIDQMIKTKEGCMNYLRTFIPDAKDEDWELYTAGKRVQVIKDSEQHGKGFVVFGTEVVNSDDNSMIALLGESPGASTSLSVVLEVLEKNFADDKEAWEPVVKEMVPTYGRSLINDEKLMRETRRETSKNLHLNR

SEQ ID NO: 2897 - DNA, 327 bp, Artificial Sequence
  Description of Artificial Sequence: synthetic nucleic acid sequence
atgaattcagcagtagtagagtcagaactgaattctacaccatcttctttggtattaccttctaattcagggaatgtgaataatcctttaggtaatcccacatactcgcgtgaaccatcttccatagttttcgcaaacataacagctacatatggtggtgtatcgttaccaactgacacgatgccgtcctctgatttttctaatccgaacaatgcaactctgtcctctaatggtagtttgtggaaaccagcttctacttcaattgttccgttagcaactgccatttctgcaacttggttatcaccatatgccttctcgatgtcttga

SEQ ID NO: 2898 - protein, 108 aa, Artificial Sequence
  Description of Artificial Sequence: synthetic amino acid sequence
MNSAVVESELNSTPSSLVLPSNSGNVNNPLGNPTYSREPSSIVFANITATYGGVSLPTDTMPSSDFSNPNNATLSSNGSLWKPASTSIVPLATAISATWLSPYAFSMS

SEQ ID NO: 2899 - DNA, 1344 bp, Artificial Sequence
  Description of Artificial Sequence: synthetic nucleic acid sequence
atggctaatttagatgagcgcaaaaaagaaatcgctaatctgatttctaaagcgcaagaagcagtcgaaaaaggcgacctcgaaactgctcgtaatttaaaagctgatattgatgctcaaaagaaagagtacgaagaactcgaacagctttcaaaagaaattgaagcgtcagcacctaaacaagatgaaccacctaaagatgaaggtgcagaagttgaagataacaaagatggtaattctggagaagaatcagagaacaaaccttctgatgatgaaccagaaggaacttcagatgaagaaaaacctgatgatgcaccaaaaccagatgacaaacctgaagaaacaccagaaacacctactattgaaaaagtagaagaaccaacagaagaagaattaaaaaaagaaaaagacaaaaaagaaggagcgaaacgttctatggctaaattaaaccaaaatccagagacaaacgaagaaattctagcatttgaacagtacatgaaatcaaaaggggctaaacgtgacaatgttaaatctgatgacgttggcgtaactatcccagaggatattaaatatattcctgaaaaagaagttaagacagtccaagacttatcagaattggtacaaaaaacttcagtatcaactgcaagtgggaaatacccgatcttaaaacgtgctaacgctaaattcaacactgttgctgaattagagaaaaaccctgagttagctcgtccggaattcgaaacaatcaattgggaagtagacacttatcgtggatctattccgatttcacaagaagcattagatgattcagttgctaacttaactgctattgtttctgaaaatattaacgaacaaaaaatcaacactttaaatgaacgtattggtgaagttttaaaagcattcaatcctactagtgtttctaatgttgacgacttaaaagaaattatcaacgttaaattagatcctggttatgaccgccaaattatctgtactcaaagtttctatcaaaaactagatacattaaaagatggtaacggtcgttatttactacaagacagtatcatcaacactgcaggtaacactgtgttaggtatgaatgtaacagttgtgcgtgatgacttgttaggtaaaaatggagatgcattagcatttattggtgatgtaaaacgcggtgtgttatttgcagaccgtacagacgtttctgttcaatggattgaaaatgaaatctacggtaaatacttaatgggtgctttccgtttcgatgtgaaacaggctgataaaaatgctggtttcttcgtaacatttgaagatgcaacagaacctagtggggatctaggagcataa

SEQ ID NO: 2900 - protein, 447 aa, Artificial Sequence
  Description of Artificial Sequence: synthetic amino acid sequence
MANLDERKKEIANLISKAQEAVEKGDLETARNLKADIDAQKKEYEELEQLSKEIEASAPKQDEPPKDEGAEVEDNKDGNSGEESENKPSDDEPEGTSDEEKPDDAPKPDDKPEETPETPTIEKVEEPTEEELKKEKDKKEGAKRSMAKLNQNPETNEEILAFEQYMKSKGAKRDNVKSDDVGVTIPEDIKYIPEKEVKTVQDLSELVQKTSVSTASGKYPILKRANAKFNTVAELEKNPELARPEFETINWEVDTYRGSIPISQEALDDSVANLTAIVSENINEQKINTLNERIGEVLKAFNPTSVSNVDDLKEIINVKLDPGYDRQIICTQSFYQKLDTLKDGNGRYLLQDSIINTAGNTVLGMNVTVVRDDLLGKNGDALAFIGDVKRGVLFADRTDVSVQWIENEIYGKYLMGAFRFDVKQADKNAGFFVTFEDATEPSGDLGA

SEQ ID NO: 2901 - DNA, 393 bp, Artificial Sequence
  Description of Artificial Sequence: synthetic nucleic acid sequence
atgaaaggcgataaagaaataattgcctatttagaaacgaaatacggtaaatctgctatgaaacgcataactgactttgcactaactaaagctggcaataaagttgtaagtattatcaaaggtaatatgaaaagttttgaagatactggagaatcagtagaagaaactacactttcaaagccgatgacgataaaaggagtaaggaccgttaaaattcattggcgaggtcctaaacaacgttatcgtattatccacctaaatgaatatggtcactttgatcgttctggaaagtgggttaatacagctggtaaaggtgttattgaaaacgctatgcgtgaaggcagagaaacgtatttcagaacagtaaaagaagaaatgagaaagagggtgtaa

SEQ ID NO: 2902 - protein, 130 aa, Artificial Sequence
  Description of Artificial Sequence: synthetic amino acid sequence
MKGDKEIIAYLETKYGKSAMKRITDFALTKAGNKVVSIIKGNMKSFEDTGESVEETTLSKPMTIKGVRTVKIHWRGPKQRYRIIHLNEYGHFDRSGKWVNTAGKGVIENAMREGRETYFRTVKEEMRKRV

SEQ ID NO: 2903 - DNA, 630 bp, Artificial Sequence
  Description of Artificial Sequence: synthetic nucleic acid sequence
atggcagagaaaaactatcgttcatttacagggttaacagaattttattataaagttcatggagaaggtggagttcaaaaagttgctgatccagaacgcattaaatatttacaagaaatttcagtatctaaagatcaagacatcgagaaggcatatggtgataaccaagttgcagaaatggcagttgctaacggaacaattgaagtagaagctggtttccacaaactaccattagaggacagagttgcattgttcggattagaaaaatcagaggacggcatcgtgtcagttggtaacgatacaccaccatatgtagctgttatgtttgcgaaaactatggaagatggttcacgcgagtatgtgggattacctaaaggattattcacattccctgaattagaaggtaataccaaagaagatggtgtagaattcagttctgactctactactgctgaattcatgcaagctaaagttaaaggcttcgaagaagaaaaagcaatgttattaggtcacgatgctaaaggcacaactgttatgaaagacgctatctgggaagctatcttcggtgaatctgcaccaagcagtgatccaaaagaatctagtggaacagaatcagaactaggcgcataa

SEQ ID NO: 2904 - protein, 209 aa, Artificial Sequence
  Description of Artificial Sequence: synthetic amino acid sequence
MAEKNYRSFTGLTEFYYKVHGEGGVQKVADPERIKYLQEISVSKDQDIEKAYGDNQVAEMAVANGTIEVEAGFHKLPLEDRVALFGLEKSEDGIVSVGNDTPPYVAVMFAKTMEDGSREYVGLPKGLFTFPELEGNTKEDGVEFSSDSTTAEFMQAKVKGFEEEKAMLLGHDAKGTTVMKDAIWEAIFGESAPSSDPKESSGTESELGA

SEQ ID NO: 2905 - DNA, 4719 bp, Artificial Sequence
  Description of Artificial Sequence: synthetic nucleic acid sequence
atgaaggatatgggcgttcaacgtagtatttcggaaataaaacgtagctttaaaggattaaacgctgacttaaaactatctaacaacaactttaagtattccgaaaaaagtttaaattcatataagttaagaactagagaattatcgcaagcagtcaaagaatctaaagctaacgttgcagcgttgaaagcaaaataccaagaagcagcaagagcatctggtgtgaatagcaaaaaagccgctcaattaaggcaggaatatagtcgacaagctgacaatctcaactatttacaaaacgaactcgaccaaacacgtggcaaatacagagaaatgattgcagtaagtaaatcatctgtcggtagacttgggcaagcattttctgaaataggacctaagataagatccataggagattcaatgaagtcagtcgggcgtaacatgagtttacacgttactgcaccaattgcagcaggttttggcgctgcggtgaagaaaagtatagacttcgacgataccatgcgtaaagtaaaagccacatctggtgctactggagatgaatttaaccagcttagaacaaaagcacttcaaatgggccgagatactaaattcacggcctctgaatctgctgaagcaatgaactacatggcgcttgctggttgggacaccaaagatatgctaaaaggtgttggtggtgtaatggatttagctgctgcatctggtgaagatttagcaagcgtatctgatattgtaactgataacctaactgcatttggtatgaaagctaaagatagtacccactttgctgatgttttggctcaaacgagttcaaaagctaatactgatgtacgtggtttaggtgatgcgtttaaatatgctgctccagttgctggtgcgttaggttacacggtagaagatacatcaatagctattggtttgatgtctaatgctgggataaaaggtgaaaaagccggcacagcattaagaacaatgtttaccaacctatctaaaccaacaaaagcaatgaaagacgaaatggataaactaggaatatctattactgatagcaacggtgaaatgttacctatgagagatgttttagatcaacttagaggtaaaatgggcggtctatctaaagaccaacaagcagccgcagctagtacaatatttggtaaagaggccatgagtggtgcattagcagttatcaatgcatcagacgaagattataaaaagctaactaaatccatagacggctctaaaggtgcttcaaaaagaatggctaaagaaatggaaggcggtattggtggcgcaatgcgtaaaatgaaatcggcaattgaaagtttagcgatttcattaggtgatgcattagccccaatgttatataaagctgctaaatggatcacatcattagcgaataagttttctaatttacctactggcgttcaaaaaacgattgcagttgtaggattactcgccgcagctattggtccactactaatggtctttggcgttatggcatcaacaattggcactgctataacagtattaggctctttaatgacgagtatgagaacactatcatttttatctaaaaccagtgcagcagcgactggtatttggaatggcgttactgccactgctcgtggtatcgcaaatggttatagatatgcggtggctgcattaaccacttctcagacaatacaggctatgaaaactaaaattgctgcagctgcaacaacagcttggactacagttactaaaggtgcaactttagcaactaaaggcttgggattagcaataagatttatgactggaccagtcggtatagttattacagccatcggattattagtagcagggcttattcatttatggaaaacaaatagctcgtttagaaatgcagttatcggcatttggaattcaataaaaaatgctgcaatagctatatttggttttatcaaaccttatattattaatatttggaacgcaattaaaaactctacaattgccatttggaacgcgattaaaagaagtgctgtaataatatggaacgctattaaatttgctgttcaacatcctattcaagcattaaaaaatgtcttatcagctttatggaatggcatgaaaaatgctgctattaaaatctggaccgccttaaagaacggtgttatagcaattattaaagcatatgttgcgcaagtaaaatttaatatcaaccttattaagcgcatagtagttacgatatttaatgctattaagagtttctctattaaagtttggactgcattaaaaaatggtgtgttaggaatcgttcgagctttgcgcaaaggtgttctatctgtatttaacgcattaaaaaaaggtattgttgtaatatttaatgctgtaaagaatgccgcagttaaaatctggacggctataaaaaaatcagtagtgaataaagcaaaagcattatggtctggagttaaaaatacatggaatgcactcaaaaaaggtacaattggcatatttaaagcagttggcagtttcatgagttctaaatggaacagtattaaaaaaggtactgttaataaagcgaaagctctatggtcaggcgtcaaaggtgcttggggatcacttaaaaaaggtactcataacaccatgaatgctgtaggtggcttcatgagcaagaaatggaatggaattaaaagtactactgtatctatagtaaatggcatgaaatcgaaagttatgggcaccatgaataaaatgagagacggtatcaaaacagttaccggtaaaattgggaatctttttggtggaatggttaaaggcgttaaaaaaggccttaatggattaatcaaaggtgttaactgggtcgcagataaattaggtatggataaaatacctaagattaaattatctacaggtactcaatctacgcatacacaaagttatattaccaacggtaaaatcaataaaggtacaatggctactgtaggagatagaggtcgaggtaatggacctggtggctttagaaatgaaatgatccgttatcctaacggaagaatggcactaacacctaacaaagatacaacaacattcttacctaaaggctcaagtgtatatagtggcgcgcaaacacatgctattttatctaattcaggatatgacactaagaagaaaaaactacctaaatttagtaaaggtactaaaaagaaagacggtatattagatgttattagctctggtgtaaaaaatgatgttaataaagtaaaagacattggtggtaaagcaagagacataggtggtactacgtttgacaaagcaaaagacataggtacaaaagcacttgataaagctaaagatgtgtctagcactgttatcaagggtattggagatgtttttgattatgtaggtcatcctatgaaattggtaaataaagtctttgagaaagttggttttaacctagactttatgaaaaatgcaccattaccatttgatttaatgacagctatgattaagaaacttaaaaatggtattaaagacttctttaatgaaggtttagactctgcaggcggtggagatggttcttcgttcactaaattcccaattactacggggtattatcctaatggtggtgctcctggttatagttttaatggtggtgctcactttggtattgactatggcgctccatatggtacaactatcaatgctaccaatgatggaaatgtaaaagctatccacaacttaggtggaggacttgttgcacgacttttaacaggtcagttcacattgttctttatgcacttatctaaaatattaaaacaaggtaaaatcaaagctggagaaccaatggctaaaacaggtaattcaggtcaatggactactggtccacacgtacacttccaagttgaaagaggtcgccatgatgacatcacaaacagagggacagtaaaccctgctaaatggctcaaaggtcacggtggtggaaaagttggtggtagtggttctgtaaacgcacgtagagcaattcaaagagcacaatctattttaggtggacgttataaatcgtcttatattaccgaacaaatgatgagagttgccaaacgtgagtctaacttccaatcagatgcggttaataactgggacatcaacgcacaaaaaggaacgccttctaaaggtatgttccaaatgattgaaccatcttttagagcatatgctaaaccaggacacggaaacatcttaaatccaactgacgaagctatatctgctatgcgttacattgtaggtaagtgggttcctattatggggagttggagaagtgcatttaaacgtgctggagattatgcttatgctacaggcggggttattaacactgctggattatataatttggcagaagatggataccctgagatagtaatccctacagatccaagcagacaatcagatgcgatgaaattgttacatcttgctgcaagtaaaattagtggaaataacagaaataaacgacctaaccaattacgtacacctaatgttactagtaatacagttgataatgcagaattactactacaaatgatagaaaatcaacagaaacaaataaacgtgttaatggaaatagcacgaagtaataaaactattgaaaaacaaccgaaaggtttttcagaacgcgatgtaagtcaggcacaaggttcaaggttaagactcgctgcttatagccagggaggtttataa

SEQ ID NO: 2906 - protein, 1572 aa, Artificial Sequence
  Description of Artificial Sequence: synthetic amino acid sequence
MKDMGVQRSISEIKRSFKGLNADLKLSNNNFKYSEKSLNSYKLRTRELSQAVKESKANVAALKAKYQEAARASGVNSKKAAQLRQEYSRQADNLNYLQNELDQTRGKYREMIAVSKSSVGRLGQAFSEIGPKIRSIGDSMKSVGRNMSLHVTAPIAAGFGAAVKKSIDFDDTMRKVKATSGATGDEFNQLRTKALQMGRDTKFTASESAEAMNYMALAGWDTKDMLKGVGGVMDLAAASGEDLASVSDIVTDNLTAFGMKAKDSTHFADVLAQTSSKANTDVRGLGDAFKYAAPVAGALGYTVEDTSIAIGLMSNAGIKGEKAGTALRTMFTNLSKPTKAMKDEMDKLGISITDSNGEMLPMRDVLDQLRGKMGGLSKDQQAAAASTIFGKEAMSGALAVINASDEDYKKLTKSIDGSKGASKRMAKEMEGGIGGAMRKMKSAIESLAISLGDALAPMLYKAAKWITSLANKFSNLPTGVQKTIAVVGLLAAAIGPLLMVFGVMASTIGTAITVLGSLMTSMRTLSFLSKTSAAATGIWNGVTATARGIANGYRYAVAALTTSQTIQAMKTKIAAAATTAWTTVTKGATLATKGLGLAIRFMTGPVGIVITAIGLLVAGLIHLWKTNSSFRNAVIGIWNSIKNAAIAIFGFIKPYIINIWNAIKNSTIAIWNAIKRSAVIIWNAIKFAVQHPIQALKNVLSALWNGMKNAAIKIWTALKNGVIAIIKAYVAQVKFNINLIKRIVVTIFNAIKSFSIKVWTALKNGVLGIVRALRKGVLSVFNALKKGIVVIFNAVKNAAVKIWTAIKKSVVNKAKALWSGVKNTWNALKKGTIGIFKAVGSFMSSKWNSIKKGTVNKAKALWSGVKGAWGSLKKGTHNTMNAVGGFMSKKWNGIKSTTVSIVNGMKSKVMGTMNKMRDGIKTVTGKIGNLFGGMVKGVKKGLNGLIKGVNWVADKLGMDKIPKIKLSTGTQSTHTQSYITNGKINKGTMATVGDRGRGNGPGGFRNEMIRYPNGRMALTPNKDTTTFLPKGSSVYSGAQTHAILSNSGYDTKKKKLPKFSKGTKKKDGILDVISSGVKNDVNKVKDIGGKARDIGGTTFDKAKDIGTKALDKAKDVSSTVIKGIGDVFDYVGHPMKLVNKVFEKVGFNLDFMKNAPLPFDLMTAMIKKLKNGIKDFFNEGLDSAGGGDGSSFTKFPITTGYYPNGGAPGYSFNGGAHFGIDYGAPYGTTINATNDGNVKAIHNLGGGLVARLLTGQFTLFFMHLSKILKQGKIKAGEPMAKTGNSGQWTTGPHVHFQVERGRHDDITNRGTVNPAKWLKGHGGGKVGGSGSVNARRAIQRAQSILGGRYKSSYITEQMMRVAKRESNFQSDAVNNWDINAQKGTPSKGMFQMIEPSFRAYAKPGHGNILNPTDEAISAMRYIVGKWVPIMGSWRSAFKRAGDYAYATGGVINTAGLYNLAEDGYPEIVIPTDPSRQSDAMKLLHLAASKISGNNRNKRPNQLRTPNVTSNTVDNAELLLQMIENQQKQINVLMEIARSNKTIEKQPKGFSERDVSQAQGSRLRLAAYSQGGL

SEQ ID NO: 2907 - DNA, 1356 bp, Artificial Sequence
  Description of Artificial Sequence: synthetic nucleic acid sequence
atggattcagtagaaatagctcgattgttgacgggtatgacacttgcagtgcatatcatatttgcaacaattggtgttggtatgccacttatgtttgcaatagcagagtttattggcataaagaaaaatgatgcgaattatatcacattggctaaaagatggtcgaaaggctacacgataaccgttgctgttggagtcgttacaggtactattattggtttacaactttcacttgtctggccaacatttatgaaaatgggcggtcatgttatcgcattaccactattcatggaaacttttgcattcttttttgaagcaatctttttaagtatttatttatacacttgggaaagatttaaaaataaatggacacattttttcatatctatacccgttattataggaggttcattctcagcattctttattacatcagtcaattcatttatgaataccccagctggttttgaaattaaaaatggtcgtatggtaaatgttcagccattagaagcaatgtttaattcatcgtttatggttcgtgctttacatgtagttgcaactgcaggtatgacgatggcgtttatattagcagccatcgcagcgtttaaattattacgtcataatcatacagaagatagaacataccatacaaaagctcttaatttaagcatgattgttggattcatcaataccgttctttcgatgattgcaggagatttatctgctaaatttttacacaaagttcaaccagataagcttgcagcatatgaatggcattatgatacgcaatctcatgcgaatttagttcttttcggtgtattaaatgaaaaaacacatgaagtttcaggagcactagagattcccggattacttagttttttagcagataatagctttaatacaaaagttaaaggtttaaatgaatttcctaaaaatgaattacctcctatgatagtgcattactttttcgatttgatggtatcaatgggaatattctgttttatcatttcaggactatatatgttatttttaattgttaaaaagttacgtaaatatgtaactagtaatatgatgttatacgctatcttgttaactggtcctgcatcaatgttagcgatagaatttggttggttcttaactgaaatgggtcgtcaaccgtggattatacgaggatatatgcgcgtatcagaagctgctacccaggcggggggaatcacattagtaacgacgctattcggtttactatatcttttattactagttacttcggcttatgtactaattagaatgtttaaaaatcaacctgcttataaagatgtagaaaaagtgattaaagagagaggtgaaacaaaatga

SEQ ID NO: 2908 - protein, 451 aa, Artificial Sequence
  Description of Artificial Sequence: synthetic amino acid sequence
MDSVEIARLLTGMTLAVHIIFATIGVGMPLMFAIAEFIGIKKNDANYITLAKRWSKGYTITVAVGVVTGTIIGLQLSLVWPTFMKMGGHVIALPLFMETFAFFFEAIFLSIYLYTWERFKNKWTHFFISIPVIIGGSFSAFFITSVNSFMNTPAGFEIKNGRMVNVQPLEAMFNSSFMVRALHVVATAGMTMAFILAAIAAFKLLRHNHTEDRTYHTKALNLSMIVGFINTVLSMIAGDLSAKFLHKVQPDKLAAYEWHYDTQSHANLVLFGVLNEKTHEVSGALEIPGLLSFLADNSFNTKVKGLNEFPKNELPPMIVHYFFDLMVSMGIFCFIISGLYMLFLIVKKLRKYVTSNMMLYAILLTGPASMLAIEFGWFLTEMGRQPWIIRGYMRVSEAATQAGGITLVTTLFGLLYLLLLVTSAYVLIRMFKNQPAYKDVEKVIKERGETK

SEQ ID NO: 2909 - DNA, 738 bp, Artificial Sequence
  Description of Artificial Sequence: synthetic nucleic acid sequence
gtgaatcatttgaatttatttttgggaaaaaagcacattcttaaagatattacattctcattacctataaatggtgaaatcattggtattgtaggacctaatggtgccggtaaatcatctcttctcaaagcatttatcggagaatttaaagcgaccggtaaacatacattatatgatcaccctatacatacacaacttagatatattacatatatcccacaaaaagctcatattgatttagattttcctataaaagtggatcaagtgatactatcaggatgttatgaagacattggatggtttaaaaaagcaagtgtagttgaaaaaacgaaacttaaccaattacttaatgatttagaactcgaccatatacgccatcgacaaattgcagaattaagtggtggacaattgcaacgtgttcttgttgcaagagcacttatgagtaatagtgatatttattgtttagacgaaccttttgttggcatcgacatttatagcgaacaacttattatgaagaaaattaaacatttaagacatatgggtaaattgattttaattgttcatcatgacttatcaaaagcagatcaatattttgaccgcattttattattaaatcaatcgttgcagtttttagggccaacaaaagaagcattatcatctgaacgattaaatgcaactttcattaattacaaagatgattcgcttttaacactatcctcacaagggagtacgaattag

SEQ ID NO: 2910 - protein, 245 aa, Artificial Sequence
  Description of Artificial Sequence: synthetic amino acid sequence
VNHLNLFLGKKHILKDITFSLPINGEIIGIVGPNGAGKSSLLKAFIGEFKATGKHTLYDHPIHTQLRYITYIPQKAHIDLDFPIKVDQVILSGCYEDIGWFKKASVVEKTKLNQLLNDLELDHIRHRQIAELSGGQLQRVLVARALMSNSDIYCLDEPFVGIDIYSEQLIMKKIKHLRHMGKLILIVHHDLSKADQYFDRILLLNQSLQFLGPTKEALSSERLNATFINYKDDSLLTLSSQGSTN

SEQ ID NO: 2911 - DNA, 837 bp, Artificial Sequence
  Description of Artificial Sequence: synthetic nucleic acid sequence
atgttagatttcattaaccatttgcttagttatcaatttttaaatcgtgcattaatcacatctattttagttgggattgtatgtggaacgatgggtagcattattgttttacgtggtctttctttaatgggtgatgccatgagtcatgctgttttaccaggtgttgctttatctttcttatttaatattccaatgtttatcggggcacttgtaacgggaatgcttgcaagtttgtttattggttttattacttcaaacagtaaaacaaaaccagatgctgcaataggaataagtttcactgcattcctagcatctggcgtcataattattagtttaatcaatagtacaacagatttatatcacattttatttggcaatttattagcaattacacatcaatcattttggacaacaattgtcattactgtactggttattttacttattattatcttttatagacctttaatgatttcaacatttgatgcaacttttagtcgtatgagcgggctgaacacaacattaattcactactttgtcatgttattactcgcacttgtaactgttgcgagcatacaaacagttggaattatccttgtagttgctttactaatcactccagcttctacagcttttttaatcagtaaacaactttatgccatgatggtaattgcaagcataatcagcgtgataagttcgattatcggtctatattttagttatatatataatattccaagtggagcaactattgtaatctgtacctttatgatttatattgtaacgctatcaattactagaattaaaaataaacaaaaaaggagcgctttaacgtga

SEQ ID NO: 2912 - protein, 278 aa, Artificial Sequence
  Description of Artificial Sequence: synthetic amino acid sequence
MLDFINHLLSYQFLNRALITSILVGIVCGTMGSIIVLRGLSLMGDAMSHAVLPGVALSFLFNIPMFIGALVTGMLASLFIGFITSNSKTKPDAAIGISFTAFLASGVIIISLINSTTDLYHILFGNLLAITHQSFWTTIVITVLVILLIIIFYRPLMISTFDATFSRMSGLNTTLIHYFVMLLLALVTVASIQTVGIILVVALLITPASTAFLISKQLYAMMVIASIISVISSIIGLYFSYIYNIPSGATIVICTFMIYIVTLSITRIKNKQKRSALT

SEQ ID NO: 2913 - DNA, 864 bp, Artificial Sequence
  Description of Artificial Sequence: synthetic nucleic acid sequence
gtgagtgaaatggctaaaattgtagtagctttaggtggaaacgctttaggaaaatcaccacaagaacaacttgaattagtaaaaaatacagctaaatccctagtaggattaattactaaaggtcacgaaattgtgattagtcacggtaatggaccacaagtaggaagtattaaccttggtctgaattatgcagctgaacacgatcaaggtcctgcttttccatttgctgaatgtggcgctatgagtcaagcctacatcggctatcaacttcaagaaagtttacaaaatgaacttcattcaatgggcatagataagcaagttgtcacactagttacccaagtagaagttgatgaaggcgatccagcttttaatagtccaagtaaacccatcggtctgttctacactaaagaagaagcaaatcgtattcaacaggaaaaaggttatcaatttgtagaagatgctggtcgaggttaccgtcgcgttgtaccatcaccacaaccaatatctattatcgaactggaaagtattaaaactctagtagaaaatgacacactcgtcatcgctgcaggtggaggtggtataccagtcattcgcgaacagcatgatagctttaaaggtatagatgccgtcatcgataaagacaaaacaagtgcattattaggtgctgatattcactgtgatcaactcattattttaacagcgattgattatgtttatatcaactatcatactgaccaacaacaagcacttaaaacaacaaatatagatacgcttaaaacatatattgaagaagaacaatttgccaaaggcagcatgctacctaaaatcgaatctgccatctcctttattgaaaataatcctaac

SEQ ID NO: 2914 - protein, 288 aa, Artificial Sequence
  Description of Artificial Sequence: synthetic amino acid sequence
VSEMAKIVVALGGNALGKSPQEQLELVKNTAKSLVGLITKGHEIVISHGNGPQVGSINLGLNYAAEHDQGPAFPFAECGAMSQAYIGYQLQESLQNELHSMGIDKQVVTLVTQVEVDEGDPAFNSPSKPIGLFYTKEEANRIQQEKGYQFVEDAGRGYRRVVPSPQPISIIELESIKTLVENDTLVIAAGGGGIPVIREQHDSFKGIDAVIDKDKTSALLGADIHCDQLIILTAIDYVYINYHTDQQQALKTTNIDTLKTYIEEEQFAKGSMLPKIESAISFIENNPN

SEQ ID NO: 2915 - DNA, 738 bp, Artificial Sequence
  Description of Artificial Sequence: synthetic nucleic acid sequence
atgaaaaacatcatcgtaattaagctcggtggtatagctatagaaaatttaaacgacgcatttatacaacaaattaatgcttggcaccttgaaaacaaaaaaataattattgttcacggtggcggccaagtcatcagtaatttattaactaaaaacaatcattcaactattaaaattgatggcatgagagtaactgctaaaaatgatttacctatcatatatgatgctttaattaacatagttggccatcaacttttagaaagacttaaagaatctaatttagaattttttcaatttaaagaaaagataaaagaacttgtaagcgccgaatttttaaataaaaatatctatggttacgttggtaaagttaaagaaatcaacacgatgctattagaaaaaatgttatcacgcgacataataccaattatcactagtttgggtgtaaatgagcaaggggagtatcttaatgttaatgctgatcatctcgccaccgcaattgctaagaaactaaaagtcgaaaaattagtatatatgactgatgtccctggtgtaattgaaaaagataaaacgcttgctactcttacaattaatgaagcaaaaacaaaaattgaaaataaaataattacaggcggaatgatacctaaaattgagagtgcaatccaaacattagaatctggtgttgaatcgattttaattgcaaataatttacaaaaaggaacaatcataaggggtgattaa

SEQ ID NO: 2916 - protein, 245 aa, Artificial Sequence
  Description of Artificial Sequence: synthetic amino acid sequence
MKNIIVIKLGGIAIENLNDAFIQQINAWHLENKKIIIVHGGGQVISNLLTKNNHSTIKIDGMRVTAKNDLPIIYDALINIVGHQLLERLKESNLEFFQFKEKIKELVSAEFLNKNIYGYVGKVKEINTMLLEKMLSRDIIPIITSLGVNEQGEYLNVNADHLATAIAKKLKVEKLVYMTDVPGVIEKDKTLATLTINEAKTKIENKIITGGMIPKIESAIQTLESGVESILIANNLQKGTIIRGD

SEQ ID NO: 2917 - DNA, 1128 bp, Artificial Sequence
  Description of Artificial Sequence: synthetic nucleic acid sequence
atgagttatctttttaataattacaagcgtgacaatatagagtttgttgatgctaatcaaaatgaattaattgataaagataataatgtctacctagatttttcgtcaggtataggtgtgacaaatctgggttttaatatggaaatttaccaagcagtttataatcaactgaatttaatatggcattcacccaatttatacctaagtagtatccaagaggaagtggctcaaaaattaattggtcaacgagattatttagctttcttttgtaatagcggaacagaagcgaatgaggcagctatcaaactcgcacgtaaagctactggtaagtcggaaattattgcttttaaaaagtcttttcacggcagaacgtacggcgcaatgtctgcaacaggacagaagaaaattacagatcaatttggtccggttgttcctggattcaaatttgctatttttaatgattttaattcatttaaatcattaacttcaaataatactgctgctgtaattatagaaataattcaaggtgaatcaggagtactacctgctgattctttatttatgaagcaattaaatgagtattgtaaacaaaaagatatccttataattgtagacgaggttcaaacgggcataggtagaaccggtaagttatatgctcatgaacattatcaattgtctccagatatcatcacattagctaaaggattaggtaatggccttcctattggagcaatgttaggcaaaaaaaatttaggtcatgcatttggctacggttctcatggtacaacattcggtggaaatagattatcattggctgctgcaaaccaaacgctttctatcattaatgatgctgatttgctgaatgatgttcaatcaaaggggcaatttcttattgaaaacttaagaaaaagtttagtaaataaaagaaatgtaattgaagtacgtggtgtaggtttaatggtaggaatagaggtcactaatgatcctagtcaagtagtgcgagaagctaaacgtatggggttaatcattttaacagctggtaaaaatgtgattaggttattaccgccattgaccatcactaaaaaacaattagaaaaaggtatagaaatattaactgaaatcatttga

SEQ ID NO: 2918 - protein, 375 aa, Artificial Sequence
  Description of Artificial Sequence: synthetic amino acid sequence
MSYLFNNYKRDNIEFVDANQNELIDKDNNVYLDFSSGIGVTNLGFNMEIYQAVYNQLNLIWHSPNLYLSSIQEEVAQKLIGQRDYLAFFCNSGTEANEAAIKLARKATGKSEIIAFKKSFHGRTYGAMSATGQKKITDQFGPVVPGFKFAIFNDFNSFKSLTSNNTAAVIIEIIQGESGVLPADSLFMKQLNEYCKQKDILIIVDEVQTGIGRTGKLYAHEHYQLSPDIITLAKGLGNGLPIGAMLGKKNLGHAFGYGSHGTTFGGNRLSLAAANQTLSIINDADLLNDVQSKGQFLIENLRKSLVNKRNVIEVRGVGLMVGIEVTNDPSQVVREAKRMGLIILTAGKNVIRLLPPLTITKKQLEKGIEILTEII

SEQ ID NO: 2919 - DNA, 402 bp, Artificial Sequence
  Description of Artificial Sequence: synthetic nucleic acid sequence
gtgcacctgattgtgctggcgtacctggttccactggtttacctggttctgctggcgtacctggttccgctggtttacctggttccgctggtttacctggttccgctggtttacctggttccgctggtttacctggttctgctggtttacctggttccgctggtttacctggttctgctggcgtacctggttccgctggtttacctggttccgctggtttacctggttctgctggtttacctggttctgctggcgtacctggttccgctggtttacctggttctgctggcgtacctggttccgctggtttacctggttccgctggtttacctggttccgctggtttacctggttctgcttttgttggaccatactcaacaatttcgtcaacaggttgtttag

SEQ ID NO: 2920 - protein, 133 aa, Artificial Sequence
  Description of Artificial Sequence: synthetic amino acid sequence
VHLIVLAYLVPLVYLVLLAYLVPLVYLVPLVYLVPLVYLVPLVYLVLLVYLVPLVYLVLLAYLVPLVYLVPLVYLVLLVYLVLLAYLVPLVYLVLLAYLVPLVYLVPLVYLVPLVYLVLLLLDHTQQFRQQVV

SEQ ID NO: 2921 - DNA, 2091 bp, Artificial Sequence
  Description of Artificial Sequence: synthetic nucleic acid sequence
gtggatgagatcgttcattatggtggcgaagaaatcaagccaggccataaggatgaatttgatccaaacgcaccgaaaggtagccaagaggacgttccaggtaaaccaggagttaaaaatcctgatacaggcgaagtagtcacaccaccagtggatgatgtgacaaaatatggtccagttgatggagattcgattacgtcaacggaagaaattccattcgacaagaaacgtgaattcaatcctgatttaaaaccaggtgaagagcgtgttaaacagaaaggtgaaccaggaacaaaaacaattacaacaccaacaactaagaacccattaacaggggaaaaagttggcgaaggtgaaccaacagaaaaaataacaaaacaaccagtagatgaaatcacagaatatggtggcgaagaaatcaagccaggccataaagatgaatttgatccaaatgcaccgaaaggtagccaagaggacgttccaggtaagccaggagttaaaaatcctgatacaggcgaagtagtcacaccaccagtggatgatgtgacaaaatatggtccagttgatggagatccgattacgtcaacggaagaaattccgtttgataaaaaacgcgaatttaatccaaacttagcgccaggtacagagaaagtcgttcaaaaaggtgaaccaggaacaaaaacaattacaacaccaacaactaagaacccattaacaggggaaaaagttggtgaaggtgaaccaacagaaaaaataacaaaacaaccagtggatgagatcgttcattatggtggcgaagaaatcaagccaggccataaggatgaatttgatccaaacgcaccgaaaggtagccaagaggacgttccaggtaaaccaggagttaaaaatcctgatacaggcgaagtagtcacaccaccagtggatgatgtgacaaaatatggtccagttgatggagattcgattacgtcaacggaagaaattccgtttgataaaaaacgcgaatttgatccaaacttagcgccaggtacagagaaagtcgttcaaaaaggtgaaccaggaacaaaaacaattacaacgccaacaactaagaacccattaacaggagaaaaagttggcgaaggtgaaccaacagaaaaaataacaaaacaaccagtggatgagattgttcattatggtggtgaacaaataccacaaggtcataaagatgaatttgatccaaatgcacctgtagatagtaaaactgaagttccaggtaaaccaggagttaaaaatcctgatacaggtgaagttgttaccccaccagtggatgatgtgacaaaatatggtccgaaagttggtaatccaatcacatcaacggaagagattccatttgataagaaacgtgtatttaatcctgatttaaaaccaggtgaagagcgcgttaaacaaaaaggtgaaccaggaacaaaaacaattacaacaccaatattagttaatcctattacaggagaaaaagttggcgaaggtaaatcaacagaaaaagtcactaaacaacctgttgacgaaattgttgagtatggtccaacaaaagcagaaccaggtaaaccagcggaaccaggtaaaccagcggaaccaggtaaaccagcggaaccaggtacgccagcagaaccaggtaaaccagcggaaccaggtacgccagcagaaccaggtaaaccagcagaaccaggtaaaccagcggaaccaggtaaaccagcggaaccaggtacgccagcagaaccaggtaaaccagcggaaccaggtaaaccagcagaaccaggtaaaccagcggaaccaggtaaaccagcggaaccaggtaaaccagcggaaccaggtaaaccagcggaaccaggtacgccagcagaaccaggtaaaccagtggaaccaggtacgccagcacaatcaggtgcaccagaacaaccaaatagatcaatgcattcaacagataataaaaatcaattacctgatacaggtgaaaatcgtcaagctaatgagggaactttagtcggatctctattagcaattgtcggatcattgttcatatttggtcgtcgtaaaaaaggtaatgaaaaataa

SEQ ID NO: 2922 - protein, 696 aa, Artificial Sequence
  Description of Artificial Sequence: synthetic amino acid sequence
VDEIVHYGGEEIKPGHKDEFDPNAPKGSQEDVPGKPGVKNPDTGEVVTPPVDDVTKYGPVDGDSITSTEEIPFDKKREFNPDLKPGEERVKQKGEPGTKTITTPTTKNPLTGEKVGEGEPTEKITKQPVDEITEYGGEEIKPGHKDEFDPNAPKGSQEDVPGKPGVKNPDTGEVVTPPVDDVTKYGPVDGDPITSTEEIPFDKKREFNPNLAPGTEKVVQKGEPGTKTITTPTTKNPLTGEKVGEGEPTEKITKQPVDEIVHYGGEEIKPGHKDEFDPNAPKGSQEDVPGKPGVKNPDTGEVVTPPVDDVTKYGPVDGDSITSTEEIPFDKKREFDPNLAPGTEKVVQKGEPGTKTITTPTTKNPLTGEKVGEGEPTEKITKQPVDEIVHYGGEQIPQGHKDEFDPNAPVDSKTEVPGKPGVKNPDTGEVVTPPVDDVTKYGPKVGNPITSTEEIPFDKKRVFNPDLKPGEERVKQKGEPGTKTITTPILVNPITGEKVGEGKSTEKVTKQPVDEIVEYGPTKAEPGKPAEPGKPAEPGKPAEPGTPAEPGKPAEPGTPAEPGKPAEPGKPAEPGKPAEPGTPAEPGKPAEPGKPAEPGKPAEPGKPAEPGKPAEPGKPAEPGTPAEPGKPVEPGTPAQSGAPEQPNRSMHSTDNKNQLPDTGENRQANEGTLVGSLLAIVGSLFIFGRRKKGNEK

SEQ ID NO: 2923 - DNA, 672 bp, Artificial Sequence
  Description of Artificial Sequence: synthetic nucleic acid sequence
atgaatatatttgtaactggaacgaatactgacatcggtaaaacgtatgtcactaaatatctctataaggcattaagaacgaggggatatcgggtatgtattttcaaaccttttcaaactgaagaaattggtggaggtagatacccagatttagaaatttataaaaacgaatgcgatttagactatgacgttacgtctctttacacattcaaagatccagtttcaccacatttagcattcaaaattgaaaggcatcagcaattgaaccatcaaacaatgatagacaaactcgaatcactagaagcacaattcgatatgattctcattgaaggtgcaggtggtattgcagtgcctatctatgaatacagtgaccatttttatatgacaacagatttaattaaagacacatcggatttcattgtgagtgtcttaccttcaaagttaggtgcgattaatgatgccatcgttcaccagaaatatattgatcatcaagaacttcccccgaatgtgttaatcatgaataactatactgatagtgctattgaacaggataatttacataccattgaaaaattaatacacaagtctgtttatacgttgggtcatcaagcgactcaagaaagcttttccgaagcatttatacaacgaattataggaggatccaatggctaa

SEQ ID NO: 2924 - protein, 223 aa, Artificial Sequence
  Description of Artificial Sequence: synthetic amino acid sequence
MNIFVTGTNTDIGKTYVTKYLYKALRTRGYRVCIFKPFQTEEIGGGRYPDLEIYKNECDLDYDVTSLYTFKDPVSPHLAFKIERHQQLNHQTMIDKLESLEAQFDMILIEGAGGIAVPIYEYSDHFYMTTDLIKDTSDFIVSVLPSKLGAINDAIVHQKYIDHQELPPNVLIMNNYTDSAIEQDNLHTIEKLIHKSVYTLGHQATQESFSEAFIQRIIGGSNG

SEQ ID NO: 2925 - DNA, 1134 bp, Artificial Sequence
  Description of Artificial Sequence: synthetic nucleic acid sequence
atggacattaaagcacagttaaaacagattcaagataaaggtttatatagagagcttcagccgattcagtccgtagaaaaacaatatatttatatcaatgaccaatcttatattaattttacttcgaacgattatctcggtataggacaagttgaatatcaacctcaaaatttcttagattttataaagacatatagtatccatctatcaagttctagattagtgagtggcaattcagttgtttatcagcaattagaacaggaaattagcgagcattttaattttgaagacgccttaatttttaatagtggttacgatgcgaatttggcggtatttaatatttttaaaaataataatattgttattttttctgatcaacagaatcatgccagtataatagacggtattaaattaagtggtttatcaaaagtgatttatcaacatttaaactatgatgacctggaaagtcatttagcacggcacaccaatccagatgttcaaaaagtaattgtctctgatagtgtgttttctactaatggcactaaagcagatattaataggctagtacatctcaagcaacgttacaatgcgattttaattattgacgcatctcatagtttaggattaaatctctttgagtatcatgcagacattgacatagttacttcaagtttatctaaagcgtggggagcccatggtggcgtcatattcagttcaaaagatataaaagatttaatcattaataaaggtcgttcgcttatctactcgagtagtttacctagctatcatttgtattttattcaagtgagcttacaacatgtgattgaagatacatacagacgagagaagttgaatgtacttagtgaatattttaatcaccaattcatggaattatttcccgatcaaccattatctaatacacctatcaaaaatatcgtttgtgatagtttggcttcagcacaagcacaatacgacatgttatttgaacatggtatatttgtcagttatttaaggtatccaacagtgtcacagctaacattaagaatttcattatcctattttcatgacacagatgatattgatcgacttttcaatgtaatgaaacaatacgatgaaggtgatagctatgtatag

SEQ ID NO: 2926 - protein, 377 aa, Artificial Sequence
  Description of Artificial Sequence: synthetic amino acid sequence
MDIKAQLKQIQDKGLYRELQPIQSVEKQYIYINDQSYINFTSNDYLGIGQVEYQPQNFLDFIKTYSIHLSSSRLVSGNSVVYQQLEQEISEHFNFEDALIFNSGYDANLAVFNIFKNNNIVIFSDQQNHASIIDGIKLSGLSKVIYQHLNYDDLESHLARHTNPDVQKVIVSDSVFSTNGTKADINRLVHLKQRYNAILIIDASHSLGLNLFEYHADIDIVTSSLSKAWGAHGGVIFSSKDIKDLIINKGRSLIYSSSLPSYHLYFIQVSLQHVIEDTYRREKLNVLSEYFNHQFMELFPDQPLSNTPIKNIVCDSLASAQAQYDMLFEHGIFVSYLRYPTVSQLTLRISLSYFHDTDDIDRLFNVMKQYDEGDSYV

SEQ ID NO: 2927 - DNA, 1398 bp, Artificial Sequence
  Description of Artificial Sequence: synthetic nucleic acid sequence
atgataggggtgttagggatgaacttttttgatattcataaaatgccaaacaaagggataccattagctgtacaacgcaaattatggctcagaaactttatgcaagcgttttttgtcgtattctttgtttacatggcgatgtatttaattcgaaacaattttaaagcggcacaaccgttattaaaagaagaaatcggattaacaacattagaactaggttatataggattagcgtttagtattacttacggtttaggaaaaacaatactcggttatttcgttgatgggcgtaatacgaaacgtattatttccttcttattaatattatctgcgattacagtacttattatgggatttgtattaagttatttcggttctgtgatggggctattaattgtattgtgggggcttaacggtatatttcaatctgtgggtgggcctgcaagttactcaacgatttcaaggtgggcgcctcgaacaaagcgcggtcgttatttaggcttttggaatacatcacataacattggtggtgctattgctggtggtgtcgcactttggggcgcgaatacatttttccacggtaatgtggttggaatgtttatttttccttccgtcatcgctttaatcattgggattgtgacattatttattggtaaagatgatccagaggaattaggttggaatcgtgccgaagaaatttgggaagagcctatcgaccaagaaaacattgattctcaaggtatgactaaatgggatatctttaaaaaatatatccttggaaatcctgtgatttggattttgtgtatctctaatgtttttgtatatatcgtgcgtattggtattgataactgggcaccgctatacgtatcagagcatttacattttaataaaggtgatgcggtgaatactattttttactttgaaataggtgcattagtagctagtttattgtggggctatatctcagatttattaaaaggtcgtcgtgcgattgtagcgattggatgtatgtttatgatcacctttgttgtactcttttataccaatgcaacaagcgtgacaatggtcaatatttctctatttgcattaggcgctttaatcttcggtccacagttactcattggtgtatctctgactggctttgttcctaaaaatgcaattagtgtcgctaacggtatgacaggttcatttgcatatctattcggggattcaatggctaaagtgggtctggctgcaatcgctgatccaacacgtaatggtttaaatatttttgggtatacgttgagtggttggacagatgtctttattgtattctatgtagctttattcttaggaatgatattattagccattgttgcttattacgaagaaaagaaaattagaaaattaaaaatttaa

SEQ ID NO: 2928 - protein, 465 aa, Artificial Sequence
  Description of Artificial Sequence: synthetic amino acid sequence
MIGVLGMNFFDIHKMPNKGIPLAVQRKLWLRNFMQAFFVVFFVYMAMYLIRNNFKAAQPLLKEEIGLTTLELGYIGLAFSITYGLGKTILGYFVDGRNTKRIISFLLILSAITVLIMGFVLSYFGSVMGLLIVLWGLNGIFQSVGGPASYSTISRWAPRTKRGRYLGFWNTSHNIGGAIAGGVALWGANTFFHGNVVGMFIFPSVIALIIGIVTLFIGKDDPEELGWNRAEEIWEEPIDQENIDSQGMTKWDIFKKYILGNPVIWILCISNVFVYIVRIGIDNWAPLYVSEHLHFNKGDAVNTIFYFEIGALVASLLWGYISDLLKGRRAIVAIGCMFMITFVVLFYTNATSVTMVNISLFALGALIFGPQLLIGVSLTGFVPKNAISVANGMTGSFAYLFGDSMAKVGLAAIADPTRNGLNIFGYTLSGWTDVFIVFYVALFLGMILLAIVAYYEEKKIRKLKI

SEQ ID NO: 2929 - DNA, 486 bp, Artificial Sequence
  Description of Artificial Sequence: synthetic nucleic acid sequence
atgagatttatggaaaaccaaaaacaatatcctatgactcaagaaggttatgagaaacttgaacaagaattagaagaattaaaaacggttaaaagacctgaggtagttgaaaaaataaaagtagctcgttcatttggagacctatctgagaactctgaatatgatgctgctaaagatgaacaaggctttattgaacaagatatacaacgtattgaacatatgattagaaatgcgttaatcattgaagataacggtgataacaatgtagttcaaattggtaaaacagttacttttattgaattacctggagatgaagaagaaagttatcaaatcgttggttctgctgaagctgacgcatttaaaggaaaaatttctaacgaatctccaatggcaaaagcactaatcggtaaaggattaaatgatcaagtacgtgttccacttcctaacggtggcgaaatgaatgttaaaatcgttgaaattaaataa

SEQ ID NO: 2930 - protein, 161 aa, Artificial Sequence
  Description of Artificial Sequence: synthetic amino acid sequence
MRFMENQKQYPMTQEGYEKLEQELEELKTVKRPEVVEKIKVARSFGDLSENSEYDAAKDEQGFIEQDIQRIEHMIRNALIIEDNGDNNVVQIGKTVTFIELPGDEEESYQIVGSAEADAFKGKISNESPMAKALIGKGLNDQVRVPLPNGGEMNVKIVEIK

SEQ ID NO: 2931 - DNA, 600 bp, Artificial Sequence
  Description of Artificial Sequence: synthetic nucleic acid sequence
atgcgctatgcgtatggttcagaaaaggttttaccgttatctaaaaaaacatctcatcatgctagaatatatattggtcagccaaccaaaatattcaacacgaggagatgcttttttatgtcatctgacacaaacagtttagcacatacaaaatggaattgtaagtatcacatagtctttgtaccaaaatatagaagacaagtgatatacggaaaaatcaaaagagatattggagttattttacgtcaactatgtgaaagaaaaggcgtagaaataatagaagcagaagcatctaaagatcatattcatatgttagttagtattccacctaaattaggagtatcctcatttgttggatatttaaaaggtaaaagcagtttaatgatttttgatagacatgctaatttaaaatatagatatggaaatagaaagttttggtgtaaaggattttatgtagatacagtaggtagaaataaaaaggtaattgaaaattacattcgtaatcaattacaagaagatatcgttgcagatcaaatttcaatggaagaatacctagatccctttacaggagaagaaattaaaaaaagacgaaaaaaatag

SEQ ID NO: 2932 - protein, 199 aa, Artificial Sequence
  Description of Artificial Sequence: synthetic amino acid sequence
MRYAYGSEKVLPLSKKTSHHARIYIGQPTKIFNTRRCFFMSSDTNSLAHTKWNCKYHIVFVPKYRRQVIYGKIKRDIGVILRQLCERKGVEIIEAEASKDHIHMLVSIPPKLGVSSFVGYLKGKSSLMIFDRHANLKYRYGNRKFWCKGFYVDTVGRNKKVIENYIRNQLQEDIVADQISMEEYLDPFTGEEIKKRRKK

SEQ ID NO: 2933 - DNA, 528 bp, Artificial Sequence
  Description of Artificial Sequence: synthetic nucleic acid sequence
atggatcttactccaaatgaaatttataacttagttatatatcaattaggtgcgttaagtggcttttgtaaaatcaatcatgtaaaaatgatgcatgttaaacctcatggtgccctttatcaaatgggggctagaaataaagaaattgcacatgcaattgctcaagcagtttttgatttcgactcaaatctaattttcgtcggcttagcgaatacattacttatttcggaagctgaattagtggggcttaaggtagcttcggaagtatttgctgaccgtcgttatgaagatgacggacaattggtaagtagaaaaaaaaccgatgccactatcactaatactgacgaagcaatccaacaagcattaaaaatggttttggaaaataaagttgtaagtaaaaatggaaaaatcatcgatttgaaagctgatacaatttgtgttcacggagatggaaaacacgcattagaatttgttacgcaaattagaaatgaattaatgaaagaaggcattgatattcaatccttatag

SEQ ID NO: 2934 - protein, 175 aa, Artificial Sequence
  Description of Artificial Sequence: synthetic amino acid sequence
MDLTPNEIYNLVIYQLGALSGFCKINHVKMMHVKPHGALYQMGARNKEIAHAIAQAVFDFDSNLIFVGLANTLLISEAELVGLKVASEVFADRRYEDDGQLVSRKKTDATITNTDEAIQQALKMVLENKVVSKNGKIIDLKADTICVHGDGKHALEFVTQIRNELMKEGIDIQSL

SEQ ID NO: 2935 - DNA, 687 bp, Artificial Sequence
  Description of Artificial Sequence: synthetic nucleic acid sequence
atgataggaattattggagcaatggaagaagaagtgacgattttaaagcgtaaattgaatgatatgaatgaaataaatattgcgcatgttaaattttatgttggcaagctaaaccacaaagaggtggttttaacacaaagtggtataggtaaagttaatgcttctatctcaacgactttgttaatagaaaaatttaatccagaagtcgtcattaatactggatcagcaggtgcactagatcaaacactatctattggagatatattagtgagtaatcatgtattatatcatgatgctaatgctacagcgtttggttatgaatatggacaaatacctcaaatgcctaaaacttatactactgatcctactttgttgaaaaaaacaatgcatgtattagaacaacaacaactgaatggtaaagtaggtatgattgttagtggtgatagttttataggtagctcagaacagcgacaaaaaattaagcaacaatttccagaagctatggctgtcgaaatggaggcaactgcaattgcgcaaacatgttatcaatttaaagtaccatttatcgtaactagagctgtttctgatttagcaaacggtaaagccgatatttcttttgaagaatttttagataaagcagctttatcatctagtgagacagtttcattattagtagaatcattataa

SEQ ID NO: 2936 - protein, 228 aa, Artificial Sequence
  Description of Artificial Sequence: synthetic amino acid sequence
MIGIIGAMEEEVTILKRKLNDMNEINIAHVKFYVGKLNHKEVVLTQSGIGKVNASISTTLLIEKFNPEVVINTGSAGALDQTLSIGDILVSNHVLYHDANATAFGYEYGQIPQMPKTYTTDPTLLKKTMHVLEQQQLNGKVGMIVSGDSFIGSSEQRQKIKQQFPEAMAVEMEATAIAQTCYQFKVPFIVTRAVSDLANGKADISFEEFLDKAALSSSETVSLLVESL

SEQ ID NO: 2937 - DNA, 963 bp, Artificial Sequence
  Description of Artificial Sequence: synthetic nucleic acid sequence
atgaaaaagttaattcaagataaaaacacaattttaaaagatatgcttgatggaattacagtttcaaacaacgatgttgaagttgtatctgacactattgttgttagaaagcataaaaaacaatcaggtgttgcactcgtttctgggggcggcagtggacatgaacctgcacacgcaggatttgtagcagaaggcatgctcgatgcagctgtatgtggagaaatcttcacttcacctacacctgataaaatattagatgccattaaagctgtggacaatggtgacggcgttctacttgttattaaaaactatgcaggagacgttatgaactttgaaatggctcaagaaatggctcaaatggaagatattaaagttgaaagtgttattgtcagagatgatattgctatttctgacccggaaaaacgccgtggtgtagcgggtacagtatttgtgcataaatatgctggatacctagctgaaaaaggtgttgcacttgatgaaatcaaatctaaagttgaggcacttttaccagatattaaaagtattggtatggcattaacgcctccaatggtgcccacaactggtaaaaacggtttcgatattgaagacaatcaaatggaaattggtatcggtattcacggtgaaaaaggtttacatcgtgaagacgtacaacctattaacgtgattgttgaacgtttactcgatcaattatacaaagaaattgagaaaaaacctttaatcgtaatggttaatggtatgggtggtacgccactatcagaattaaatatagttactaaatatctagatgaacaattcaatcagaatgatattggtgttaaacaatggttcgtaggtgactatatgacagcgttagacatgcaaggcttctctataactgtactccccttcagtgaagaattgagtgaagctttagctgcacctacagcaagtaaatatttctaa

SEQ ID NO: 2938 - protein, 320 aa, Artificial Sequence
  Description of Artificial Sequence: synthetic amino acid sequence
MKKLIQDKNTILKDMLDGITVSNNDVEVVSDTIVVRKHKKQSGVALVSGGGSGHEPAHAGFVAEGMLDAAVCGEIFTSPTPDKILDAIKAVDNGDGVLLVIKNYAGDVMNFEMAQEMAQMEDIKVESVIVRDDIAISDPEKRRGVAGTVFVHKYAGYLAEKGVALDEIKSKVEALLPDIKSIGMALTPPMVPTTGKNGFDIEDNQMEIGIGIHGEKGLHREDVQPINVIVERLLDQLYKEIEKKPLIVMVNGMGGTPLSELNIVTKYLDEQFNQNDIGVKQWFVGDYMTALDMQGFSITVLPFSEELSEALAAPTASKYF

SEQ ID NO: 2939 - DNA, 483 bp, Artificial Sequence
  Description of Artificial Sequence: synthetic nucleic acid sequence
atgaataaagtgctatttgagcaatatcctcattttgttaaaaatcacattcatattcctgatggcttatcagaaaatctagaagcagaagcggaacgatataacaatttattagatgaaagagggccaatcgatattcaaattttaggaattggagaaaatggtcacattggttttaatgaaccagggactgacttcaatagtgaaacacatgtggtgaacttaacagaaagcaccataaaagcaaatagtcgattttttgacaatgaaaaggatgttcctagacaagcagtttcaatgggggtaaaaagtattttaaaagcaaaaaggattatcctactcgcatttggtccaaagaaaaaagaggctataagtaaactgttaaatgaacaggttaccgaagatgtacctgcgaccattttacacacacaccctaatgttgaagtttatgtagacgatgaagcagcgccagattgtttataa

SEQ ID NO: 2940 - protein, 160 aa, Artificial Sequence
  Description of Artificial Sequence: synthetic amino acid sequence
MNKVLFEQYPHFVKNHIHIPDGLSENLEAEAERYNNLLDERGPIDIQILGIGENGHIGFNEPGTDFNSETHVVNLTESTIKANSRFFDNEKDVPRQAVSMGVKSILKAKRIILLAFGPKKKEAISKLLNEQVTEDVPATILHTHPNVEVYVDDEAAPDCL

SEQ ID NO: 2941 - DNA, 1299 bp, Artificial Sequence
  Description of Artificial Sequence: synthetic nucleic acid sequence
gtgtttgaagatcgacatctaacgtatggagaattaagtaaagaaatttatcaggctagtatgcgctataaagaagtaaaattaaacaaaaaagtaggtctaatggatgaacatcctgtaaataatattattaactattttgcggtacatcaaagaggtggaattccttgcatttttaatcatcaatggagtaatgaaaggatacatcaacttgtaaaaagttatgacatacaatggttaattaaagataatcatcttacctcaaatcatgataactcaatttataatgatgaggttatcccacgtaatgttatacatataggtttcacgtcaggaactacaggtttacccaaagcgttttatagaaatgaacattcttggatagtttcttttaaggaaaatgagaaattactccagcattgtgaagaaaccattgtagcaccgggtcctttatcacattcactttcattgtacgcatgtatttatgcattaagtactggaaaaacatttataggtcaaaaaaattttaatccactatctcttatgcgtcttattaatcaattgaacaaaacgacagcaatatttgtagtgccaacgatggtacaacaacttatttcaactcaacgacattgttcatcgattaaaagtattttgagtagtggtgctaaacttacattgcaacagtttcaacaaatcagaaatttatatccacaagcaaatttaatagaattttttgggacatctgaagcaagttttataagctacaattttaaccaatcatctcctgctaattctgttggtaaacttttccctcatgtcgagacacgattattaaatcaagatgatgatgcagtaggattattagccgttagaagtgaaatggtgtttagtggttatgttggacaaagcaatcaagagggggcatggattaaaacaggcgacttcgcttatattaaaaatcaacatttgtttttagtaggtagagagagtgatcgtattatagttggggggattaatgtatatccaacagctattgaaagcttaattatggatattgaaggcattgatgaggcccttgtcattggtataccacatgctaaatttggagaaatagcgatattgctttattcaggtaaagtacaattgaattaccgacaaattaaatcttttttaatgaaacatctttcaagacaagaagttccatcaaaattaaagaaaattgaccatatgatttatacagaatcaggaaagattgctagaaaagagatgaaaaataaatttattaatggagagttataa

SEQ ID NO: 2942 - protein, 432 aa, Artificial Sequence
  Description of Artificial Sequence: synthetic amino acid sequence
VFEDRHLTYGELSKEIYQASMRYKEVKLNKKVGLMDEHPVNNIINYFAVHQRGGIPCIFNHQWSNERIHQLVKSYDIQWLIKDNHLTSNHDNSIYNDEVIPRNVIHIGFTSGTTGLPKAFYRNEHSWIVSFKENEKLLQHCEETIVAPGPLSHSLSLYACIYALSTGKTFIGQKNFNPLSLMRLINQLNKTTAIFVVPTMVQQLISTQRHCSSIKSILSSGAKLTLQQFQQIRNLYPQANLIEFFGTSEASFISYNFNQSSPANSVGKLFPHVETRLLNQDDDAVGLLAVRSEMVFSGYVGQSNQEGAWIKTGDFAYIKNQHLFLVGRESDRIIVGGINVYPTAIESLIMDIEGIDEALVIGIPHAKFGEIAILLYSGKVQLNYRQIKSFLMKHLSRQEVPSKLKKIDHMIYTESGKIARKEMKNKFINGEL

SEQ ID NO: 2943 - DNA, 303 bp, Artificial Sequence
  Description of Artificial Sequence: synthetic nucleic acid sequence
atgaaaattcaaacagaagtagatgaattgggctttttcggtgaatatggtggccaatatgtacctgaaacattgatgccagctattattgaacttaaaaaagcatatgaggacgcgaaatcagatactcacttcaagaaagaatttaattattatttaagtgaatatgttggtagagaaacgcctttaacatttgctgaatcatacacaaaattgttaggtggtgccaaaatatatcttaaaagagaagacttaaatcacactggtgctcataaaattaataacgcgataggacaggcataa

SEQ ID NO: 2944 - protein, 100 aa, Artificial Sequence
  Description of Artificial Sequence: synthetic amino acid sequence
MKIQTEVDELGFFGEYGGQYVPETLMPAIIELKKAYEDAKSDTHFKKEFNYYLSEYVGRETPLTFAESYTKLLGGAKIYLKREDLNHTGAHKINNAIGQA

SEQ ID NO: 2945 - DNA, 888 bp, Artificial Sequence
  Description of Artificial Sequence: synthetic nucleic acid sequence
atgggagcaacagcatttgtctataacggtcgtttccaccctgaaacatatctcgagttacttcaaaattatcaaattaatgttctatgttgtacaccaacagaatatcgtatgatggctaaacttagtcatttagaacagtacaatttagagtatttacacagtgcggtgtctgcgggtgaacctttaaatcgagaagttgttgaacaatttaaacgtcattttaatattactgttcgagatggatatggacaaaccgaaagtacattgttgatcggatttctaaaagatactgaaccacgtatgggttctatgggcaaaggtatacctggtagttttgttactgtcattgacgatgatggtaaagaggttggtccaaatgttaaaggtaatatcgccgtgcctttagacttaccggctttatttaaaggttactttaaagatgaagcacgcacaaaagcagcttcaacaggtgattattatgttactggagaccaagctcatattgataatgatggttatttctggttcgaaggtcgccgtgacgatattatcattagttcaggatataccattggacctttcgaggtagaagatgcactaacaaatcacgcagctgttaaagaatgtgcagttgttgcaagtcctcatgacattcgtggaaatattgttaaagcatttatcatcttgcaagatgattatgaagcaagtgatgagttaatccaagaattacaagtattttgtaaaaatgaagtagcaccgtataaatatccaagagcaattgaatttgttgaacatctaccaaaaacaaattcaggtaagatacgtcgtgttgaattacgtgacgcagaaataaaaaaatataaacaacaagattcatcacattaa

SEQ ID NO: 2946 - protein, 295 aa, Artificial Sequence
  Description of Artificial Sequence: synthetic amino acid sequence
MGATAFVYNGRFHPETYLELLQNYQINVLCCTPTEYRMMAKLSHLEQYNLEYLHSAVSAGEPLNREVVEQFKRHFNITVRDGYGQTESTLLIGFLKDTEPRMGSMGKGIPGSFVTVIDDDGKEVGPNVKGNIAVPLDLPALFKGYFKDEARTKAASTGDYYVTGDQAHIDNDGYFWFEGRRDDIIISSGYTIGPFEVEDALTNHAAVKECAVVASPHDIRGNIVKAFIILQDDYEASDELIQELQVFCKNEVAPYKYPRAIEFVEHLPKTNSGKIRRVELRDAEIKKYKQQDSSH

SEQ ID NO: 2947 - DNA, 2449 bp, Artificial Sequence
  Description of Artificial Sequence: synthetic nucleic acid sequence
atgaaagacttacttggtggtaaaggtgccaatctttcagagatgaagagactcggactaccagtaccagatggttttacaattacgactgaagcttgtattacatatttaaaacaaaatgaagaactacctacagaagtaaagacacaattaattgatcatttagcagctttttctaaacgaacaggaaaagccttttcctctgatgataacttgttattagtatcagtacgtagtggtgcaaaaatttccatgccaggaatgatggatacaattcttaatttaggacttaatgatgataatgtaaaaaagcttgttgacaaaacaaatgatgcacgatttgcatatgattgttaccgtcgtttactacaaatgtttggagaggttgtttatggtattccaatgacagctttcgatacatattttaatgattttaaaacaaagcatcgttatcaaaatgatgctgaaattccggcagaaggactacaaactatatgtgaaaaatataaagaaatctatgtagaagaggcatataaaccttttccccaagaaccgttaaagcaattagaagaagcaattgaagcagtatttaaatcttgggataatgatcgtgcacgtgtatatagagatttaaatgatattccacatgatattggtacagccgtaaatattcaggaaatggtatttggtaatagtggtgaaaatagtggtacgggtgtagcatttacaagaaatccagttactggagaaaatcatttattcggagagtacttacttaatgctcaaggtgaagatgttgttgcaggcattcgtacccctaaggatattgacactttaaaacaacaaatgccagatgtacatcaagagtttgttgatgtaaccaaacaacttgaaaaacattacaaagatatgcaagacatagaatttacaattgaaaatggtaaactttatttattacaaacacgtaacggaaaacgtactgctaaagctgcaataaaaattgctgtggatttagttcacgagcaattaattacacgtgaagaagcagtatcaaaagtagaggtaaaatcaatagaccaattattacatcctaattttaatgaagaatcattaaagcaagcgacagtggtttctaaaatgggcttaccagctagtcccggtgcagcaacaggaaaagtagtcttctctgctgaagaagcaaaacttcaagctgaaaatggtaataaagtagtgttaatgcgaccggaaacatcacctgaagatattgaggggatggtagcaagtgaagcaatcgtaacaactcatggtggtatgacatcacacgctgctgttgtagcaagaggaatgggcaaatgttgtgtgacaggatgttcgaatgtagagatagatacagtgaacaaaacagtatattatcctgaaggtgaattacatgaaggggatatcgtttctgtagatggttcagctggtgatttatatttaggagcaattgaaacagtcaatgctgaacatagtgaagagttcgatcaatttatgacttggtctgaagagattgcaagactgcaagttagaatgaatgctgaaacaccacaagatataaaagctggatataattttggttctaaaggaataggtttagttcgtactgagcacatgttctttggccctgaacgtttaatagaaatgcgccgttttatcttagcttcaaatcatgacgaacgtgtacaagctttagaaaaaattaaaacataccaagtagaagattttgaaacaattttcagattatctcaagatagacctacgattgttcgtttacttgatccaccgttacatgagttcttaccatcatctgaagaagatataaacaatgtttctcaacagctgaatgtatcttcagagttcttacgcaagcgaatcgttgacttaaatgaggtcaattcaatgcttggtcatcgtggttgtcgtttggctgtgacttatccagagttatatgagatgcaagttgaagctatcattgaaagtgttattaagcttcaaaaagagggcataacgtgcctaccagaaattatgattcctctcgtgtcaacagtagaagaatttacaactttaaaagaacgattagttaatacaattacacatttagaaaaagaatcacaacaagatatacaatatatgataggtactatgattgaaacgcctagagcatgcttgattgcgaatgaccttgcgaaacattgtgatttcttcagttttggtactaatgatttaacgcaattgacatttggtttctctagagatgatgcaggaaaattcataaatgtgtatactgaaaataacattttacagcttgacccattccaaactttagatagagaaggtgtaggacgactaattcaattagctgttgaacaagctaaaaatacaaatccagagataaaaattggtgtattta

SEQ ID NO: 2948 - protein, 817 aa, Artificial Sequence
  Description of Artificial Sequence: synthetic amino acid sequence
  MOD_RES (817): variable amino acid
MKDLLGGKGANLSEMKRLGLPVPDGFTITTEACITYLKQNEELPTEVKTQLIDHLAAFSKRTGKAFSSDDNLLLVSVRSGAKISMPGMMDTILNLGLNDDNVKKLVDKTNDARFAYDCYRRLLQMFGEVVYGIPMTAFDTYFNDFKTKHRYQNDAEIPAEGLQTICEKYKEIYVEEAYKPFPQEPLKQLEEAIEAVFKSWDNDRARVYRDLNDIPHDIGTAVNIQEMVFGNSGENSGTGVAFTRNPVTGENHLFGEYLLNAQGEDVVAGIRTPKDIDTLKQQMPDVHQEFVDVTKQLEKHYKDMQDIEFTIENGKLYLLQTRNGKRTAKAAIKIAVDLVHEQLITREEAVSKVEVKSIDQLLHPNFNEESLKQATVVSKMGLPASPGAATGKVVFSAEEAKLQAENGNKVVLMRPETSPEDIEGMVASEAIVTTHGGMTSHAAVVARGMGKCCVTGCSNVEIDTVNKTVYYPEGELHEGDIVSVDGSAGDLYLGAIETVNAEHSEEFDQFMTWSEEIARLQVRMNAETPQDIKAGYNFGSKGIGLVRTEHMFFGPERLIEMRRFILASNHDERVQALEKIKTYQVEDFETIFRLSQDRPTIVRLLDPPLHEFLPSSEEDINNVSQQLNVSSEFLRKRIVDLNEVNSMLGHRGCRLAVTYPELYEMQVEAIIESVIKLQKEGITCLPEIMIPLVSTVEEFTTLKERLVNTITHLEKESQQDIQYMIGTMIETPRACLIANDLAKHCDFFSFGTNDLTQLTFGFSRDDAGKFINVYTENNILQLDPFQTLDREGVGRLIQLAVEQAKNTNPEIKIGVFX

SEQ ID NO: 2949 - DNA, 342 bp, Artificial Sequence
  Description of Artificial Sequence: synthetic nucleic acid sequence
atgtcaaatagcgcttcaatatctcagagcaacgtcgcaagtcaaagtactacagcaagtttgagccaatctgaatcagcaaatgattcaatgagttcatctctgtccgagtctaactcaataacatccgaaagtaatacaaatagcaaatcggaaattgaatcaaaaagtacgtctacaagcgagttcttgtcagaatcaggaagtgtatctaactcagaaaaatctgagtcaatttctcattctcaatcaacatcagctacaccttcttctcaatcgacttaccaacaacaacctaaagaagagaagaaaggtttctttgcacgtctatttaacttataa

SEQ ID NO: 2950 - protein, 113 aa, Artificial Sequence
  Description of Artificial Sequence: synthetic amino acid sequence
MSNSASISQSNVASQSTTASLSQSESANDSMSSSLSESNSITSESNTNSKSEIESKSTSTSEFLSESGSVSNSEKSESISHSQSTSATPSSQSTYQQQPKEEKKGFFARLFNL

SEQ ID NO: 2951 - DNA, 981 bp, Artificial Sequence
  Description of Artificial Sequence: synthetic nucleic acid sequence
gtgaaaagtggcaaagcacgagcacatacaaatattgcgttgattaagtattgggggaaagctgatgaaacttacattattcctatgaataatagtttatcagttaccttagatagattttatactgaaacaaaagtgacatttgaccctgattttactgaagattgccttattttaaatggtaatgaagtgaatgccaaagagaaagaaaagattcaaaactatatgaatatagtgagagatttggctggaaatcgtttgcatgcgcgaattgaaagtgaaaattatgtgccaacagcagcaggacttgcttcttcagcgagtgcttacgctgctttagctgccgcttgtaatgaagctttgtcattgaacttatcagatacagacttatcacgattagctcgacgtggttcaggttctgcttctagaagtatttttggtggatttgccgaatgggaaaaagggcatgatgatttaacttcatatgcacatggtattaattccaatggttgggaaaaagatttatcaatgatatttgtagtgattaacaatcagtcaaaaaaagtatctagtaggtcaggaatgtcactaacaagagatacttctagattttatcaatattggttggatcacgttgatgaagatttaaatgaagcaaaagaggcagtcaaaaatcaagattttcaacgcttaggagaagtcattgaagcaaatggtttacgtatgcatgccactaacttaggcgctcaacctcctttcacgtatttagtgcaagaaagctacgatgctatggcgattgtggaacagtgtcgaaaagccaatttaccttgttactttacaatggacgcgggtcccaatgtaaaagttttagtagaaaagaaaaataaacaagctgtgatggaacaatttttaaaagtatttgacgaatcgaagattatagcaagtgatatcattagctctggtgttgaaattattaagtaa

SEQ ID NO: 2952 - protein, 326 aa, Artificial Sequence
  Description of Artificial Sequence: synthetic amino acid sequence
VKSGKARAHTNIALIKYWGKADETYIIPMNNSLSVTLDRFYTETKVTFDPDFTEDCLILNGNEVNAKEKEKIQNYMNIVRDLAGNRLHARIESENYVPTAAGLASSASAYAALAAACNEALSLNLSDTDLSRLARRGSGSASRSIFGGFAEWEKGHDDLTSYAHGINSNGWEKDLSMIFVVINNQSKKVSSRSGMSLTRDTSRFYQYWLDHVDEDLNEAKEAVKNQDFQRLGEVIEANGLRMHATNLGAQPPFTYLVQESYDAMAIVEQCRKANLPCYFTMDAGPNVKVLVEKKNKQAVMEQFLKVFDESKIIASDIISSGVEIIK

SEQ ID NO: 2953 - DNA, 1542 bp, Artificial Sequence
  Description of Artificial Sequence: synthetic nucleic acid sequence
atgtttgcttttttcggtattgttttgggattcgctacattatttaaaaatccaaccattatgggaggattagctgatcagcaaacattttggtttaaattttggtctgttattgaatcaggtggttgggtaatatttacacatatggaaattgtctttgtagttggcttaccattatctcttgctaaaaaagcaccaggacatgcagctttagcagctctaatgggatatttaatgtttaatacttttatcaatgcaattttaactcaatggccacatacttttggcgctaatttaaaaaaaggtgtagaaaacacaacaggattaaaatcgattgcaggtattgaaacgttagataccaatattttaggtgcaatcattatctcaggaataataacgtggatacataatagatattacagtaagcgtttacctgaaatgttaggtgtatttcaaggattaacattcgttgtaacaatctctttctttgtcatgctaccagtggcagcaatcacttgtgttgtttggccaacgattcaacacggtattgcttcaattcaatattttattgttgcatcaggttatataggtgtttggttatatcatttcttagagcgtgtactaatacctacaggattgcatcattttatctatgcaccaatcgaagtaggtccagtagttgttaatcatggtttgaaagcagaatggcttcaacacttaaaccagtttgccgaaagtaataaaccacttaaagaacaattcccatatggatttatgttgcaaggaaatggaaaggtttttggttgtctaggtatagcattggcaatgtatgcaactacaccaaaagaaaatcgtaaaaaagttgctgcattattaataccagcaacacttacggcagtagtagctggtattacagaaccacttgaatttacattcttatttattgcgccatttttattcgtattacatgcactactagcagcaactatggatacactgatgtatggatttggtgttgtaggtaatatgggtggcggtgtactagattttattgcaactaactggataccattaggaaaagcacattggatgacatatgtctttcaagtagtaattggtttaatctttgttgcaatttactacttcttatttaaatatttaattttaaaatttgatattccattaccaggacgtaagaaaggtgaagaagaagttaaattattttccaaacaagattataaagataaaaaaggagattcaactcgcaatcattcacctaatagtgaatatgaagaaaaggcgatgtactacctagaaggtcttggaggaaaagaaaatattaaagacgttacaaattgtacgacacgtctacgtttaactgttaaagacgaaagtaaagttcaagaaagtgcctattttacacataatcaaatgtctcatggtttagtaaaaagtggcaaaagtgttcaagtcgtcgttggaatgtctgtacctcaggtaagagaagcatttgaaaatattgtaaatgatgatctatcttag

SEQ ID NO: 2954 - protein, 513 aa, Artificial Sequence
  Description of Artificial Sequence: synthetic amino acid sequence
MFAFFGIVLGFATLFKNPTIMGGLADQQTFWFKFWSVIESGGWVIFTHMEIVFVVGLPLSLAKKAPGHAALAALMGYLMFNTFINAILTQWPHTFGANLKKGVENTTGLKSIAGIETLDTNILGAIIISGIITWIHNRYYSKRLPEMLGVFQGLTFVVTISFFVMLPVAAITCVVWPTIQHGIASIQYFIVASGYIGVWLYHFLERVLIPTGLHHFIYAPIEVGPVVVNHGLKAEWLQHLNQFAESNKPLKEQFPYGFMLQGNGKVFGCLGIALAMYATTPKENRKKVAALLIPATLTAVVAGITEPLEFTFLFIAPFLFVLHALLAATMDTLMYGFGVVGNMGGGVLDFIATNWIPLGKAHWMTYVFQVVIGLIFVAIYYFLFKYLILKFDIPLPGRKKGEEEVKLFSKQDYKDKKGDSTRNHSPNSEYEEKAMYYLEGLGGKENIKDVTNCTTRLRLTVKDESKVQESAYFTHNQMSHGLVKSGKSVQVVVGMSVPQVREAFENIVNDDLS

SEQ ID NO: 2955 - DNA, 1440 bp, Artificial Sequence
  Description of Artificial Sequence: synthetic nucleic acid sequence
atggaggtgtttaacatgacaaatcaattatttattaacaatgaatttatagaaagtcagtctaaagagacaatggatgtcattaatccagctactggcgaggcatttgatactatcactcttgcaactgaagaggaagtaaacgacgccattgaaaaatcgcaacaagcacaacttgaatgggagcgcgtgcctcaacctacacgtgcggaacatgttaaattacttatacctttattagaaaaaaatcgcgatgaaatagctcaattatacgtaaaagaacaaggtaaaactttagcgcaagcttatggagaaattgacaaatcaatctcatttatcgattatatgacaagtctgagtatgtcagataaaggacgtgttctacaaaatagtattgcaaatgaaacgattcaaattatcaacaaacctatcggagttactgctggtattgtgccatggaacgcaccgatacttgtccttatgcgaaaagtcattccagctatagtaactggttgttcagtagtgattaaacctagtgaagagacaacgttactcactcttcgattagctgaattattcagagcatcaactataccagcaggattgtttcaaattgttcctggcactggagaaacagtaggtacacaattagcttcgcataaagacattcaacttatttctttaactggaagtatgagagctggtaaatctgtttacgaaaatgctgctcaaactgtaaagaaagtaaatttagaattaggtggaaacgcaccagtcattgtcacatcaaatgccgatttagataaagcagttgactatatcgtgacagcccgtataaataatgcaggtcaagtttgtacgtgccctgaacgtatctttgtacatgaagatgttcacgatgactttttaaataaagtaacttccaaaatgaaaagcttaactgttggagatccatttgatgaaaacaccgattacggcgcaattattaaccaaaaacaacttgatagtattcatgaaaaggttcaagatgctattaaaaatggtgcaacattgatgactggtggacatcaattaaaacgccatggtttcttctacgcaccaacagtattagataacgttagaaaagacgataatgtgtttaaagatgaaatttttggtccagttcttgcgataacaacctaccgtgatattgaacaagtgattgaagacgctaatgatacaaacgctggcttatcttcttatatcttctctgaaaatttaacagaagtaatgacagcaaccgaacgtctaaaatttggtgaagtatatgcaaattgtgaggctgaagaagtggttaatggctatcacgcaggttggcgtgaatcaggcttaggtggcgctgacggtattcacggttttgaagaatactacaataccacagtaagttatattagatactaa

SEQ ID NO: 2956 - protein, 479 aa, Artificial Sequence
  Description of Artificial Sequence: synthetic amino acid sequence
MEVFNMTNQLFINNEFIESQSKETMDVINPATGEAFDTITLATEEEVNDAIEKSQQAQLEWERVPQPTRAEHVKLLIPLLEKNRDEIAQLYVKEQGKTLAQAYGEIDKSISFIDYMTSLSMSDKGRVLQNSIANETIQIINKPIGVTAGIVPWNAPILVLMRKVIPAIVTGCSVVIKPSEETTLLTLRLAELFRASTIPAGLFQIVPGTGETVGTQLASHKDIQLISLTGSMRAGKSVYENAAQTVKKVNLELGGNAPVIVTSNADLDKAVDYIVTARINNAGQVCTCPERIFVHEDVHDDFLNKVTSKMKSLTVGDPFDENTDYGAIINQKQLDSIHEKVQDAIKNGATLMTGGHQLKRHGFFYAPTVLDNVRKDDNVFKDEIFGPVLAITTYRDIEQVIEDANDTNAGLSSYIFSENLTEVMTATERLKFGEVYANCEAEEVVNGYHAGWRESGLGGADGIHGFEEYYNTTVSYIRY

SEQ ID NO: 2957 - DNA, 780 bp, Artificial Sequence
  Description of Artificial Sequence: synthetic nucleic acid sequence
gtgggttacggtgtagcacaagcaggtgctgaacgtatcgttcctacaacattagaactaggtggtaaaagtgctaatattatctttgatgatgctaatttagagcaagtgattgaaggtgttcaacttggtatattatttaaccaaggtgaagtatgtagtgcaggttcaagattattagtacaatcatctatttacgatgaattgttgccaaaattgaaagaagcatttgaaaatattaaagttggcgatccatttgatgaagatactaaaatgagtgcgcaaactggaccagaacaattagataaaattgaaagttatataaaaattgctgaagaagatgacaaagcgaacatcttaactggtggtcatcgaatcacagataacggcttagacaaaggttacttctttgagcctacaattattgagattaacgataacaagcatcaacttgctcaagaagaaatcttcggtccagttgtagtagttgaaaaattcgatgatgagcaagaagctatcgaaattgcaaatgattctgagtatggtttagctggaggtatcttcactacagatattcatcgtgcattaaatgtagctaaagctatgagaacaggtcgtatttggattaatacttataatcaaattcctgctggtgcgccattcggaggatataaaaaatcaggtattgggcgcgaagtatataaagatgctatcaaaaactatcaacaagttaaaaatatctttattgatacaagcaaccaaactaaaggtttatattaa

SEQ ID NO: 2958 - protein, 259 aa, Artificial Sequence
  Description of Artificial Sequence: synthetic amino acid sequence
VGYGVAQAGAERIVPTTLELGGKSANIIFDDANLEQVIEGVQLGILFNQGEVCSAGSRLLVQSSIYDELLPKLKEAFENIKVGDPFDEDTKMSAQTGPEQLDKIESYIKIAEEDDKANILTGGHRITDNGLDKGYFFEPTIIEINDNKHQLAQEEIFGPVVVVEKFDDEQEAIEIANDSEYGLAGGIFTTDIHRALNVAKAMRTGRIWINTYNQIPAGAPFGGYKKSGIGREVYKDAIKNYQQVKNIFIDTSNQTKGLY

SEQ ID NO: 2959 - DNA, 1310 bp, Artificial Sequence
  Description of Artificial Sequence: synthetic nucleic acid sequence
gtgtttaatatgtcattggaattgcccgtgatgctaacgattgtgttgttcttagcactaggcatttttagtcaatggttagcgagtagaataaaatggccatcgattgttgtcatggccatcgtaggtttacttgtaggacctatttttggattagcaaatccaaaagaggcacttggacctgaggcatttagttcaattgtatctcttgctgtagcaattatattatttgaaggtagtagtaatctagattttagagaattaaaaggcatttctaaagctgttataagaattattacaataggagcgggaattgcatggattttaggagcaatcgctttacatgtcactatgaatttccctctgtctatttcatttgttatcggagggctattcctaatcactggtccaaccgtgattcaacccttgctgaagcaagcgaaagtaaaaagaaatgtcgattcagtattaagatgggaaagtattatcttagatcctattggacctattattgcactcactgcattttatgtattccagatttttgaggaagggataggctttgtcgttattattctctttatcttgaagctcttagctgcaattttaataggttttggtgcagcctttctatttaattggcttataggtcaagataaaattcctcaaagtttaatgccacccattcagtttgtatttattcttttaacatttagtatctgcgatgagatattatcagaatcaggtttactagctgtaacaatttttgggttaatgatggcgcgtaaaaaacgtcacgatctcatctttaaagaatcagaccactttatagataatgcatcatctatacttgtgagtactgtatttattttaattacgtcttctctcactaaagatgtgttgctcaatgtgttatcttggcagctcatactctttagtttggttatgattgtattagtaagaccaatttcagtgtttctttcaacattaggtactgaaataactaaaaaggaacgtgcagtagtagcactaatggcgcctagaggtattgtggttttaacagtggcacaattcttctcaagtttatttatggacgataaaattcctatggctcaatatattacaccagtaacttttggtcttgtatttatcactgtagtcatttatggatttggttttacacctttaagtaaactgttcggtgtagcaagtacggagccaccaggcgtaatcattgtcggagaaagtgaattttcgttccatcttggtattaatctaagggatcatggtatacccgtcatgatgttcaa

SEQ ID NO: 2960 - protein, 437 aa, Artificial Sequence
  Description of Artificial Sequence: synthetic amino acid sequence
  MOD_RES (437): variable amino acid
VFNMSLELPVMLTIVLFLALGIFSQWLASRIKWPSIVVMAIVGLLVGPIFGLANPKEALGPEAFSSIVSLAVAIILFEGSSNLDFRELKGISKAVIRIITIGAGIAWILGAIALHVTMNFPLSISFVIGGLFLITGPTVIQPLLKQAKVKRNVDSVLRWESIILDPIGPIIALTAFYVFQIFEEGIGFVVIILFILKLLAAILIGFGAAFLFNWLIGQDKIPQSLMPPIQFVFILLTFSICDEILSESGLLAVTIFGLMMARKKRHDLIFKESDHFIDNASSILVSTVFILITSSLTKDVLLNVLSWQLILFSLVMIVLVRPISVFLSTLGTEITKKERAVVALMAPRGIVVLTVAQFFSSLFMDDKIPMAQYITPVTFGLVFITVVIYGFGFTPLSKLFGVASTEPPGVIIVGESEFSFHLGINLRDHGIPVMMFX

SEQ ID NO: 2961 - DNA, 1218 bp, Artificial Sequence
  Description of Artificial Sequence: synthetic nucleic acid sequence
atgttcatgagagctatgggagaattactgttatccaatttaggatttaaatcgtttggtgacattgctcatcatcatattggttctatggcaggttttatggtggggtggacatattggttaacatggattatttcaggaatggcagaagtgactgctgttgccaagtatgtttccttctggtatccaacaattccaaactggttaacagctgcagcgactattttagttttagttgctttaaatctattcagtgctaaattatttggagaattagaattttggctatctattattaaagttttgactattttagctttgatagccgttggtgttgttatgattgtatttggaatgaagacaagctatggccctgcaacggtaacgaatatatggaaagacggaggctttttccctaatggtgcacaaggtttcttcatgtcattccaaatggcaattttctcatttattggtattgagttgattggaataactgcaggggagactaaagatcctcacaaaacaattcctcaagcaattaataatgtaccgtttagaatattattattttatataggatcgttggcagttatcatgtctgttgtaccatggcaacaattgaatcctgctgacagtccatacgttaaaatgtttggattagttggaatcccttttgcagcaggtattattaactttgttgtacttacagctgcagcctcttcttgtaatagtggtatatttgctaatagccgtacgatgtttggattagctggaagaaagcaaggtccagcattcttacatagaaccaataagcacggcgtaccacattatgctattttagtgacatgtggcttattaagtatttcagtcgtgttaaatgcaatttttaaagatgcgactaaagtgttcgtacaaattacaacattttcaactgttttaaatattatgatttggacaattattatgatcgcgtatctaggttatttaagacatgaaccgaaacagcataaagaaagtaactataaaatgtggggcggaaaatacatggcttacagtattttagggttctttgcatttatttttattatactattgattaatagtgcaacgcgttatgccgtactttctgcacccgtatggtttgttatcatgctattgatgtatcaaaaatataaaaaagaatctcgcaaagctaaaattaaaaatgaggaagagtaa

SEQ ID NO: 2962 - protein, 405 aa, Artificial Sequence
  Description of Artificial Sequence: synthetic amino acid sequence
MFMRAMGELLLSNLGFKSFGDIAHHHIGSMAGFMVGWTYWLTWIISGMAEVTAVAKYVSFWYPTIPNWLTAAATILVLVALNLFSAKLFGELEFWLSIIKVLTILALIAVGVVMIVFGMKTSYGPATVTNIWKDGGFFPNGAQGFFMSFQMAIFSFIGIELIGITAGETKDPHKTIPQAINNVPFRILLFYIGSLAVIMSVVPWQQLNPADSPYVKMFGLVGIPFAAGIINFVVLTAAASSCNSGIFANSRTMFGLAGRKQGPAFLHRTNKHGVPHYAILVTCGLLSISVVLNAIFKDATKVFVQITTFSTVLNIMIWTIIMIAYLGYLRHEPKQHKESNYKMWGGKYMAYSILGFFAFIFIILLINSATRYAVLSAPVWFVIMLLMYQKYKKESRKAKIKNEEE

SEQ ID NO: 2963 - DNA, 15071 bp, Artificial Sequence
  Description of Artificial Sequence: synthetic nucleic acid sequence
atgggcacgttaaaatcattagttgctaaacaacctacagtacaaaaaacaagtgtttatattaacgaagatcaacctgagcaatctgcctacaatgattccattacaatgggacaaactataattaataaaacagctgatccagtacttgataaaactttagttgataacgcaatcagtaacatttcaactaaagagaatgcactgcatggtgaacaaaaattaacaactgctaaaacggaagcaattaatgcacttaatacattagctgatttaaacacacctcagaaagaggctattaaaacagctattaacactgctcatacaagaactgatgtaactgcagagcaaagtaaggctaatcaaataaatagtgcaatgcacacgttgagacaaaacatttctgacaacgaatcagtaacaaacgaaagtaattatattaacgctgaacccgaaaaacaacatgcctttactgaggctctaaataatgctaaagaaatagttaatgaacaacaagccactcttgatgccaattcaattaaccaaaaagcacaagcgattcttactactaaaaatgctttagatggtgaagaacaattacgtcgtgctaaagaaaatgccgatcaagaaatcaatacgttaaatcaattgactgatgcgcaaagaaatagtgaaaaaggtttagtcaacagttctcaaactagaacagaagttgcttctcaattagcaaaagctaaagaactaaataaggtgatggaacaactgaataaccttatcaatggtaaaaaccaaatgataaatagcagtaaatttatcaatgaagatgcgaaccaacaacaagcatattcaaatgcgattgcaagtgcagaagtgcttaaaaacaaatcacaaaaccctgaattagataaagtaacaattgaacaagcaattaataatattaattctgcaattaataatctaaacggtgaagctaaactgactaaagctaaagaagatgctgttgcttcaataaacaacctaagcggattaactaacgagcaaaaaacaaaagaaaatcaagccgttaatggctctcaaactagagaccaagttgctaacgttttacgtgattcaaaggcattagatcaatctatgcaaacattacgtgatttagttaacaatcaaaatgtaatacattcaacaagtaattattttaacgaggattcaactcaaaagaatacttatgataatgcaattgataatggctcgacatatataactggtcaacacaattcagaattaaataaatctactattgatcaaacgattagccaaattaacacagctaaaaatgatttacatggtgcagaaaagttacaaagagataagggaactgctaatcaagaaattggacaattaggttatttaaatgaccctcaaaaatctgctgaggaatccttagtcaacggttcaaatacacgttctgaagtagaagagcatcttaatgaagctaaatcattaaataatgcaatgaaacaattaagagataaagtagctgaaaagactaatgtcaaacaaagtagcgattacattaatgattcaactgaacatcaacgtgggtatgatcaagcacttcaagaagcagaaaatattattaatgaaatcggtaatccaacattaaataaatcggaaattgaacaaaagttacaacaattgactgacgctcaaaatgcgttacaaggttcacatctattagaagaagctaaaaataatgcgattactgaaatcaataaacttacagcattaaatgatgcacaacgtcaaaaagcaattgaaaatgttcaagcacagcagacaatcccagcagttaatcaacaattaactttggatagagaaataaatactgcaatgcaagctttacgagataaagtaggccaacaaaataacgttcaccaacaaagtaattatttcaatgaagatgaacaaccaaaacataactatgataattctgtacaagccggtcaaactattattgataaacttcaagatccaatcatgaacaaaaatgaaattgagcaggctattaatcaaatcaatacgactcaaacagcgttaagtggagaaaataaattacacactgaccaagaaagcacaaatagacaaatagaaggtttatctagtttgaacacagctcaaatcaacgccgaaaaagatttagtcaatcaagctaaaacaagaacagatgttgctcaaaagttagctacagctaaagaaataaattctgctatgagtaatttaagagatggcattcaaaataaagaggacatcaaacgtagcagtgcatatatcaacgcagatccgactaaagttacagcttacgatcaagcactacagaacgcagaaaatatcatcaatgccacaccaaacgtagagcttaataaagctacaattgaacaagcgctatcacgcgttcaacaagcacaacaagatcttgatggtgttcaacaattagctaatgctaaacaacaagctacacaaactgtcaatgggttaaatagcttaaatgacggtcaaaagcgtgaattaaatctattaattaattcagctaatacccgtacaaaagtacaagaagaattaaacaaagcaactgaatcgaaccatgcgatggaagctttaagaaacagtgttcaaaacgttgatcaagtaaaacaaagtaacaattatgtcaatgaagatcaacctgaacagcacaattatgataatgctgtcaatgaagctcaagctacaatcaacaacaatgctcaacctgttctagacaaattagctatagaacgtttaactcaaactgttaacactacaaaagatgcattacatggtactcaaaaactgatacaagaccaacaagctgctgaaactggaatacgtggtttaacgagtctcaatgaacctcagaaaaatgctgaagtagctaaagtaactgcagcaacaacacgtgatgaagtgagaaatattcgtcaagaagcaacaacattagatactgcaatgcttggtttacgtaaaagcattaaagataaaaacgatactaaaaatagtagtaaatatattaatgaggatcatgaccaacaacaagcttatgacaatgctgtaaataatgctcaacacgttatcgatgaaactcaagcaacgttaagctcagatacaatcaatcaattggcaaatgccgtaactcaagctaaatctaatcttcatggagatactaaactacaacacgataaagatagtgctaaacaaacgattgctcaattacagaatttgaattcagctcaaaaacatatggaagattctttaattgataatgaatctacacgtacgcaagtccaacacgatttaacagaagctcaagctttagatggtttaatgggtgccttaaaagaaagtattaaagataatactaatattgtttcaaacggtaattacatcaatgcggaaccatctaagaaacaagcatatgatgcagctgtacaaaatgctcaaaatataataaatggaacgaatcaaccaacaattaataaaggtaatgtcactacagcaacacaaaccgtgaaaaatactaaagatgccttagacggtgatcatagattagaggaagctaaaaataatgccaatcaaacaatcagaaatctatctaatttgaacaatgcccaaaaagatgcagagaaaaatctagttaatagcgcatcaacattagaacaagttcaacaaaacttacaaaccgctcaacaattagataatgctatgggtgagttacgacaaagtattgctaacaaagatcaagtgaaagcagatagtaaatatctaaatgaagatcctcaaattaagcaaaactatgatgatgcagttcaacgtgttgaaactattattaacgaaactcaaaaccctgaattacttaaagcaaacattgaccaagcaactcaatccgttcaaaatgcagaacaagctttacatggtgctgaaaaattaaatcaagacaaacaaacgtcttcgacagaactagatggattaacagatttaacagatgcacaacgtgaaaaactcagagaacaaattaacacttctaatagtagagatgatattaagcaaaaaattgagcaagcaaaagcactaaatgacgcaatgaaaaaacttaaagaacaagttgcgcaaaaagatggtgttcatgctaacagtgattatacaaatgaagattctgcacaaaaagatgcgtataataatgcacttaaacaagcggaagacattattaataacagctcaaatcctaacttaaatgcacaagacattactaatgctttaaataatattaaacaagcacaagataaccttcatggagctcaaaaattacagcaagacaaaaatacaactaatcaagccattggtaacttaaatcatcttaatcaacctcaaaaagatgcgcttatacaagctattaatggagctacatctagggaccaagttgcagaaaaacttaaagaggccgaagcgcttgatgaagctatgaaacaacttgaagatcaagtgaatcaagatgatcaaatttcaaatagcagcccattcataaatgaagactcagacaaacaaaaaacttataatgataaaatccaagctgcaaaagaaataattaatcaaacatctaatccaaccttagataaacaaaaaattgctgatacacttcaaaatattaaagatgcagtgaataatttacatggtgatcaaaaattagctcaatctaaacaagacgctaataatcaattaaatcatttagatgacttaaccgaagaacaaaaaaaccattttaaaccgttaattaataatgctgatactcgagatgaggtaaataaacaactagagattgctaaacaattaaatggtgatatgagtacacttcataaagtcataaatgataaagatcaaattcaacatttaagcaattacattaatgctgataatgataaaaaacaaaattatgataatgctattaaagaagctgaggatttaattcataatcatccagatacattagatcataaagcattacaagatttattaaacaagatagaccaagcgcataacgaattaaatggagaatccagatttaaacaggctttagacaatgctttaaacgacatagatagcttaaacagtctcaatgttccacaacgtcaaactgttaaggataacatcaaccatgtgacaactctagaaagtttagctcaagaattgcagaaagcaaaagagcttaatgatgctatgaaagcaatgagagatagcattatgaatcaagagcaaattcgtaaaaatagcaattatactaatgaagacttagctcaacaaaatgcctataatcatgcagtagataatataaataacattattggtgaagacaatgcgacgatggatcctcaaataatcaaacaagcaactcaagatataaatacagctataaatggattaaatggagatcaaaaacttcaagatgcaaagacagatgctaaacaacaaattactaactttactggtttaactgaaccacaaaaacaagcattggaaaacatcattaaccaacaaacaagtagagcaaatgttgctaaacagttaagtcatgctaaattcttaaatggaaaaatggaagaattaaaagttgcagtagccaaagcgtcattagtaagacaaaatagtaactatattaatgaagatgtctctgaaaaagaagcatatgaacaagctattgcaaaaggtcaggaaataattaattcagaaaataatccaacaataagtagtactgatatcaatcgtaccattcaagaaattaatgatgctgaacaaaatcttcatggtgaaaataaattaagacaagcacaggaaattgcaaagaatgaaatacaaaatctagacggattaaattcagctcaaataacaaaattaatccaagatataggcagaacaacaactaaacctgcagtaactcagaaactagaagaagcaaaagcaataaaccaagctatgcaacaacttaaacaaagtatagccgataaggatgctactctaaattctagtaactatctcaatgaagattctgagaaaaagttagcgtacgataatgctgtaagccaagctgaacaactcataaatcaacttaacgacccaactatggatataagtaatattcaagctattactcaaaaggtcattcaagcaaaagattcattgcacggtgcgaataaacttgcacaaaatcaagcagattcaaatttaataataaatcaatcaacaaatttaaatgataaacaaaagcaagcattaaatgacttaattaatcatgctcaaactaaacagcaagtggcagaaataattgcacaagctaataagttaaataacgaaatgggcacactaaaaacactcgtagaagaacagtcaaacgttcatcaacaaagtaaatatattaatgaagatccgcaagttcaaaatatttataatgactccattcaaaaaggtcgagaaatattaaacggcactacagatgatgttttaaacaacaataaaatagcagatgccattcaaaacattcatttaactaaaaacgatttacatggtgatcaaaaattacaaaaagcacaacaagatgcaaccaatgaattaaactatttaacaaatctaaacaattctcaaagacaaagcgagcatgatgagattaactctgctccttcaagaactgaagtttctaatgatttaaatcatgctaaagcacttaatgaagctatgcgtcaacttgagaatgaagttgctcttgaaaacagtgttaaaaaattaagcgactttatcaatgaagatgaagcggcacaaaatgaatatagtaatgcacttcaaaaagctaaagacattatcaacggcgttccaagtagcactttagataaagctacaattgaagatgctttattagaattgcaaaatgctagagaaagtttacatggtgagcaaaaacttcaagaggctaaaaatcaagctattgctgaaattgataatttacaagcattaaatcctggacaggttcttgctgaaaaaacattagttaaccaagcatcaaccaaaccagaagttcaagaagccttacaaaaagcaaaagaacttaatgaagctatgaaagcactgaaaactgaaataaataaaaaagaacaaatcaaggctgatagtagatatgtaaatgctgacagtggtcttcaagcaaattacaattctgcgttaaattatggttctcaaattattgcaactacccaaccaccagagcttaataaagatgtaataaatagagcaactcaaacgattaaaactgctgaaaataatttaaatgggcaatctaaattagcagaggctaagtcagacggaaatcaaagcatcgaacatttgcaaggattaacacaatcacaaaaagataaacaacatgatttaattaatcaagctcaaactaaacaacaggtagatgatatcgtaaataactctaaacaattagataactctatgaatcaactacaacaaattgttaacaatgacaatacagtaaaacaaaatagtgatttcattaatgaagattccagccaacaggatgcttataatcatgcaattcaagcagcaaaagatttgataactgctcatcctactatcatggataaaaatcaaatagatcaagctattgaaaatatcaaacaagcacttaatgatttacacggtagtaataaactatcagaagataaaaaagaagcttcagaacaactacaaaaccttaatagcttgacgaacgggcaaaaagatacgattttaaatcatattttcagtgcaccaacaagaagccaagtaggagaaaaaattgcaagtgctaaacaattaaataatacaatgaaagcacttagagattctattgctgataataatgaaattttacaaagtagtaagtacttcaatgaagattctgaacaacaaaatgcttataatcaagccgtaaataaagctaaaaatataattaatgatcaaccaacaccagtaatggcaaatgatgagattcaaagtgtcctaaatgaagttaaacaaactaaagataatttacatggtgatcaaaaacttgctaacgacaagacagatgcccaagcaacattaaatgcgttaaattacttaaatcaagcgcaaagaggtaatcttgaaactaaagttcaaaactctaattctagaccagaagtacaaaaagtagttcaattagcaaatcaacttaatgatgcgatgaaaaaattagatgatgctttaactggtaatgacgcaataaaacaaacgagtaattatattaatgaagatacttctcaacaagttaactttgatgagtatacagatagaggtaaaaacatagttgctgaacaaacaaatccaaatatgtctccaactaatattaacactattgctgataaaattactgaagctaaaaatgatttacatggcgtacaaaaactagaacaagctcaacaacagtccatcaatactattaatcaaatgactggtctaaaccaagctcaaaaagaacaattaaatcaagaaattcaacaaactcaaacccgttctgaagtacatcaagtaattaataaagcacaagctttaaatgattcaatgaatactttacgtcaaagtattactgatgaacatgaagttaaacaaacaagtaactacatcaatgaaactgttggtaatcaaactgcatataacaatgccgttgatcgtgtaaaacaaataatcaatcaaacatctaatccaactatgaatcctttagaggtggaacgtgcaacatcaaatgtaaaaacttctaaagatgcacttcatggtgaacgtgaattgaatgacaataaaaattcaaaaacttttgcagtcaatcacttagataacctcaatcaagctcaaaaagaagcattaactcatgaaattgaacaagcaactatagtttcacaagtaaataatatctataacaaagcgaaagctttaaataatgatatgaaaaaacttaaagatatcgttgctcaacaagataatgtgagacaatcaaacaattatataaacgaggatagtacacctcaaaatatgtacaacgatacaattaatcatgcacaatcaatcattgatcaagtagcaaaccctacgatgtctcatgacgaaatagagaatgcaatcaataacataaagcatgccatcaatgcactcgatggagaacataaattacaacaagcaaaagaaaatgcaaacttattgattaatagtttaaacgatttaaatgcaccacaaagagatgccataaatagattggttaatgaagctcaaacaagagaaaaagtagctgaacaacttcaaagtgctcaagctttaaatgacgctatgaagcatttaagaaacagcattcaaaatcaatcatccgtaagacaagagagcaaatatattaatgcaagtgatgctaaaaaagagcaatataatcacgcagttagagaagtcgaaaatattatcaatgaacaacatccaacattggataaagaaataattaagcaactaacggatgctgtaaatcaagcgaataatgacttaaatggcgttgaattattagatgctgataagcaaaacgcacatcaatcgatacctacattgatgcacttaaatcaagcacaacaaaacgcattaaatgaaaaaattaataacgcagttaccagagctaaagttgcggctattattggccaagcaaaaatactcgatcatgctatggagaatttagaagaaagtatcaaagataaagagcaagtcaaacagtcaagtaactatattaatgaagaccctgatgttcaagaaacatacaataacgccgttgatcatgtgacagaaatacttaatcaaacagtaaatccaactttatctattgaagatatagagcatgctatcaacgaagttaatcaagcgaaaaaacaactcagaggtaaacaaaaactttatcaaactatcgatttagctgataaagaattaagtaaattggatgatttaacatcacaacaaagcagttcaatatctaatcaaatatatactgctaaaacgagaacagaagttgcccaagcaattgaaaaagcaaaatcattaaatcatgcaatgaaagcacttaacaaaatatataaaaatgcagataaagtgttagatagtagtcgattcattaacgaagatcaacctgaaaaagaggcgtatcaacaagctataaatcatgttgattcaatcattcatagacaaacaaatcctgaaatggatccaacagtaatcaatagcataactcatgaactcgaaacagctcaaaataacttacatggtgatcagaaacttgctcatgcaaaacaagatgccgctaatgtaattaatggtctaattcatcttaatgttgctcaacgcgaggtaatgataaatacgaatacaaatgctacaacacgcgaaaaagttgcaaagaacttagataatgctcaagctcttgataaagctatggaaacactacaacaagtagttgctcataaaaataatatattgaacgatagtaaatatttaaatgaagattcaaaatatcaacaacaatacgatcgagttattgctgatgccgaacaactacttaatcagacaacaaatccaacattagaaccttataaagtcgatattgttaaggataatgtcctagctaacgaaaaaatactatttggcgcagaaaaactatcatatgacaaatcaaatgcaaatgatgaaattaaacatatgaattatcttaataatgcacaaaagcaatctataaaagatatgatttctcacgcagcattaagaactgaagttaaacaacttctgcaacaagctaaaacccttgatgaagctatgaaatcacttgaagataaaactcaagtagtgattacagatactactttgcctaattacactgaagcttcagaggataaaaaggaaaaagtagaccaaactgtatcacatgctcaagcaatcattgataaaataaatggctcaaatgtaagtttagatcaagtacgacaagcactagaacaattaactcaagcatcagaaaacctcgatggtgatcagcgagttgaagaagctaaagttcatgctaatcaaacaattgaccaattaacacatcttaattcattacaacaacaaactgcgaaagaaagtgttaaaaacgcaacaaaactagaagaaatcgctactgctagtaacaatgctctggcattaaacaaagtaatgggtaaattagaacaattcattaatcatgctgattctattgaaaatagtgataattatagacaagccgacgacgacaaaattatcgcttatgatgatgcactagaacatggacaagatatacaaaaatctaacgcaacccaaaatgaagcaaaacaagcgttacaacaattaataaatgcagaaacatcgttaaatggtttcgaaagattaaatcatgctagaccacgagctttagaatatattaaatcactagaaaaaataaacaatgctcaaaagtctgctttagaggataaagtaacgcaatcgcatgatttattagaattagaacatcttgtcaacgagggcacaaacctcaatgacattatgggtgaattagctaacgcaatcgttaataactatgctccaaccaaagcaagtataaattatattaacgccgataacctacgcaaagataactttactcaagctatcaacaatgcacgtgatgcactcaacaaaactcaaggtcagaacttagatttcaatgcaattgatacatttaaagatgatatattcaaaactaaagatgcacttaacggtattgaacgtttaacagctgcaaaatcaaaagcagaaaaactaattgatagtttaaaatttattaataaagctcaattcacacatgcaaatgatgaaattatgaatactaattctattgcacaattgtctagaatcgtgaatcaagcatttgatttaaatgatgcaatgaaatctttaagagatgaacttaataatcaagcttttcctgtccaagcaagctcaaattatataaattcagatgaagatttaaaacaacaatttgaccatgctttaagtaatgctcgaaaagtacttgcaaaagaaaatggtaaaaatttagatgaaatacaaattgagggactcaaacaagtgattgaggatactaaagatgctttaaatggtatccaacgtttatcaaaagctaaagctaaagcaattcaatacgtacaatctttatcttatatcaatgatgcacagcgtcatattgctgaaagtaatattcacaactctgatgatttatcatctttagcaaatacattatctaaagctagtgatttagataatgcaatgaaagacttacgagatactctagaaagtaattcaacttctgttccaaatagtgtgaattatattaatgctgataagaatttacaaattgaatttgatgaggcgctacaacaagcaagtgcaacaagttctaaaacttcagaaaatccagcaacgattgaagaagtattaggtcttagtcaagccatttacgatacaaaaaatgcattgaatggtgaacaacgtcttgcaactgagaagagcaaagatttaaaattaataaaaggattaaaagatttaaataaagcacaacttgaagatgtcacaaacaaggtaaattcagcaaatactttaacagagttatctcagctcactcaatcaacgttaaaattaaacgataaaatgaaattattgagagataagcttaaaaccttagtaaatcctgttaaagcaagtttaaattatagaaacgctgattataatttaaaacgtcaatttaacaaagctttaaaagaagctaaaggcgtattaaataaaaatagcggtacaaatgtcaatatcaatgacattcaacatcttttaacacaaatagataatgctaaagaccaattaaatggtgaacgacgtctaaaagaacatcaacaaaaatctgaagtatttattattaaagaattagatatacttaataatgctcaaaaagctgcaataattaatcagattagagcgtctaaagacattaaaataattaatcaaatcgttgataatgcaatagaattaaatgatgctatgcaaggtttaaaagaacatgtagctcaattaacagcaactacaaaagacaacattgaatatttaaatgctgatgaagaccttaaaatacaatatgattacgctatcaacttagcgaataatgttcttgacaaagaaaacggtacaaataaagacgctaatatcataattggaatgattcaaaacatggatgatgctagagcacttctaaatggaattgaaagacttaaagatgctcaaacaaaagcacataatgacattaaagatacgctcaaacgtcaacttgatgaaattgaacacgctaatgcaacatcaaattctaaagctcaagcaaaacaaatggtaaatgaggaagctagaaaagcgttttctaatattaatcacgcaacatcaaatgatttagttaatcaagcaaaagatgaagggcaatctgcaattgaacacatacatgcagatgaattacctaaagcaaaactagatgctaatcaaatgattgaccaaaaagttgaagatataaatcacttaattagtcaaaatccaaacttatcaaatgaagaaaaaaataaactaatatctcaaattaataagttagtaaatggaattaagaatgaaattcaacaagctataaacaaacaacaaatagaaaatgctacaacaaaactagatgaagtcattgaaactactaaaaaattaattatcgccaaagcagaagctaaacaagtgataaaagagttatcacaaaagaaacgagatgcaataaataacaacactgatttaacaccttctcaaaaggcacatgctttagcagatattgataaaacagaaaaagatgcacttcaacatatcgaaaattctaattcaattgatgatatcaataacaataaagagcatgcatttaatactttagctcatatcattatttgggatactgatcagcaaccattagtttttgaactacctgaattgagccttcaaaatgctctagtaacaagtgaggtggttgttcacagagatgaaactatttcattagaatctataattggagctatgactttaactgatgaacttaaagtcaatattgtttcattaccgaacactgataaagtagctgatcacctaaccgctaaagttaaggttattttagctgatggctcatttgtcactgtaaatgttccagtcaaagttgtagaaaaagaattacaaatagctaaaaaggatgctataaaaacaattgatgttctggtaaaacaaaaaatcaaagatatagattctaataacgaattaacgtctactcaacgtgaagatgcaaaagctgaaattgaaagattgaaaaagcaagccatcgataaagtgactcattctaaatcgattaaagatattgaaacagtaaaacgaactgattttgaagaaatagatcagtttgatcctaaacgctttacgctaaataaagctaaaaaggatatcattactgatgttaatactcaaatccaaaatggtttcaaagaaattgaaacaataaaaggtttaacttctaatgaaaaaactcagtttgataaacaattaactgcactacaaaaagaatttttagaaaaagtcgagcatgctcataatttagtagaattaaatcaattacaacaagagtttaataatagatatgaacatattttaaaccaagcacatttactaggtgaaaaacatatagcagaacataaattaggatatgttgtagtaaacaaaactcagcaaatactaaataatcaatctgcttcttactttataaaacaatgggcacttgatagaattaaacaaattcaactagaaacgatgaattcaattcgtggtgcgcataccgtaca

SEQ ID NO: 2964 - protein, 5024 aa, Artificial Sequence
  Description of Artificial Sequence: synthetic amino acid sequence
  MOD_RES (5024): variable amino acid
MGTLKSLVAKQPTVQKTSVYINEDQPEQSAYNDSITMGQTIINKTADPVLDKTLVDNAISNISTKENALHGEQKLTTAKTEAINALNTLADLNTPQKEAIKTAINTAHTRTDVTAEQSKANQINSAMHTLRQNISDNESVTNESNYINAEPEKQHAFTEALNNAKEIVNEQQATLDANSINQKAQAILTTKNALDGEEQLRRAKENADQEINTLNQLTDAQRNSEKGLVNSSQTRTEVASQLAKAKELNKVMEQLNNLINGKNQMINSSKFINEDANQQQAYSNAIASAEVLKNKSQNPELDKVTIEQAINNINSAINNLNGEAKLTKAKEDAVASINNLSGLTNEQKTKENQAVNGSQTRDQVANVLRDSKALDQSMQTLRDLVNNQNVIHSTSNYFNEDSTQKNTYDNAIDNGSTYITGQHNSELNKSTIDQTISQINTAKNDLHGAEKLQRDKGTANQEIGQLGYLNDPQKSAEESLVNGSNTRSEVEEHLNEAKSLNNAMKQLRDKVAEKTNVKQSSDYINDSTEHQRGYDQALQEAENIINEIGNPTLNKSEIEQKLQQLTDAQNALQGSHLLEEAKNNAITEINKLTALNDAQRQKAIENVQAQQTIPAVNQQLTLDREINTAMQALRDKVGQQNNVHQQSNYFNEDEQPKHNYDNSVQAGQTIIDKLQDPIMNKNEIEQAINQINTTQTALSGENKLHTDQESTNRQIEGLSSLNTAQINAEKDLVNQAKTRTDVAQKLATAKEINSAMSNLRDGIQNKEDIKRSSAYINADPTKVTAYDQALQNAENIINATPNVELNKATIEQALSRVQQAQQDLDGVQQLANAKQQATQTVNGLNSLNDGQKRELNLLINSANTRTKVQEELNKATESNHAMEALRNSVQNVDQVKQSNNYVNEDQPEQHNYDNAVNEAQATINNNAQPVLDKLAIERLTQTVNTTKDALHGTQKLIQDQQAAETGIRGLTSLNEPQKNAEVAKVTAATTRDEVRNIRQEATTLDTAMLGLRKSIKDKNDTKNSSKYINEDHDQQQAYDNAVNNAQHVIDETQATLSSDTINQLANAVTQAKSNLHGDTKLQHDKDSAKQTIAQLQNLNSAQKHMEDSLIDNESTRTQVQHDLTEAQALDGLMGALKESIKDNTNIVSNGNYINAEPSKKQAYDAAVQNAQNIINGTNQPTINKGNVTTATQTVKNTKDALDGDHRLEEAKNNANQTIRNLSNLNNAQKDAEKNLVNSASTLEQVQQNLQTAQQLDNAMGELRQSIANKDQVKADSKYLNEDPQIKQNYDDAVQRVETIINETQNPELLKANIDQATQSVQNAEQALHGAEKLNQDKQTSSTELDGLTDLTDAQREKLREQINTSNSRDDIKQKIEQAKALNDAMKKLKEQVAQKDGVHANSDYTNEDSAQKDAYNNALKQAEDIINNSSNPNLNAQDITNALNNIKQAQDNLHGAQKLQQDKNTTNQAIGNLNHLNQPQKDALIQAINGATSRDQVAEKLKEAEALDEAMKQLEDQVNQDDQISNSSPFINEDSDKQKTYNDKIQAAKEIINQTSNPTLDKQKIADTLQNIKDAVNNLHGDQKLAQSKQDANNQLNHLDDLTEEQKNHFKPLINNADTRDEVNKQLEIAKQLNGDMSTLHKVINDKDQIQHLSNYINADNDKKQNYDNAIKEAEDLIHNHPDTLDHKALQDLLNKIDQAHNELNGESRFKQALDNALNDIDSLNSLNVPQRQTVKDNINHVTTLESLAQELQKAKELNDAMKAMRDSIMNQEQIRKNSNYTNEDLAQQNAYNHAVDNINNIIGEDNATMDPQIIKQATQDINTAINGLNGDQKLQDAKTDAKQQITNFTGLTEPQKQALENIINQQTSRANVAKQLSHAKFLNGKMEELKVAVAKASLVRQNSNYINEDVSEKEAYEQAIAKGQEIINSENNPTISSTDINRTIQEINDAEQNLHGENKLRQAQEIAKNEIQNLDGLNSAQITKLIQDIGRTTTKPAVTQKLEEAKAINQAMQQLKQSIADKDATLNSSNYLNEDSEKKLAYDNAVSQAEQLINQLNDPTMDISNIQAITQKVIQAKDSLHGANKLAQNQADSNLIINQSTNLNDKQKQALNDLINHAQTKQQVAEIIAQANKLNNEMGTLKTLVEEQSNVHQQSKYINEDPQVQNIYNDSIQKGREILNGTTDDVLNNNKIADAIQNIHLTKNDLHGDQKLQKAQQDATNELNYLTNLNNSQRQSEHDEINSAPSRTEVSNDLNHAKALNEAMRQLENEVALENSVKKLSDFINEDEAAQNEYSNALQKAKDIINGVPSSTLDKATIEDALLELQNARESLHGEQKLQEAKNQAIAEIDNLQALNPGQVLAEKTLVNQASTKPEVQEALQKAKELNEAMKALKTEINKKEQIKADSRYVNADSGLQANYNSALNYGSQIIATTQPPELNKDVINRATQTIKTAENNLNGQSKLAEAKSDGNQSIEHLQGLTQSQKDKQHDLINQAQTKQQVDDIVNNSKQLDNSMNQLQQIVNNDNTVKQNSDFINEDSSQQDAYNHAIQAAKDLITAHPTIMDKNQIDQAIENIKQALNDLHGSNKLSEDKKEASEQLQNLNSLTNGQKDTILNHIFSAPTRSQVGEKIASAKQLNNTMKALRDSIADNNEILQSSKYFNEDSEQQNAYNQAVNKAKNIINDQPTPVMANDEIQSVLNEVKQTKDNLHGDQKLANDKTDAQATLNALNYLNQAQRGNLETKVQNSNSRPEVQKVVQLANQLNDAMKKLDDALTGNDAIKQTSNYINEDTSQQVNFDEYTDRGKNIVAEQTNPNMSPTNINTIADKITEAKNDLHGVQKLEQAQQQSINTINQMTGLNQAQKEQLNQEIQQTQTRSEVHQVINKAQALNDSMNTLRQSITDEHEVKQTSNYINETVGNQTAYNNAVDRVKQIINQTSNPTMNPLEVERATSNVKTSKDALHGERELNDNKNSKTFAVNHLDNLNQAQKEALTHEIEQATIVSQVNNIYNKAKALNNDMKKLKDIVAQQDNVRQSNNYINEDSTPQNMYNDTINHAQSIIDQVANPTMSHDEIENAINNIKHAINALDGEHKLQQAKENANLLINSLNDLNAPQRDAINRLVNEAQTREKVAEQLQSAQALNDAMKHLRNSIQNQSSVRQESKYINASDAKKEQYNHAVREVENIINEQHPTLDKEIIKQLTDAVNQANNDLNGVELLDADKQNAHQSIPTLMHLNQAQQNALNEKINNAVTRAKVAAIIGQAKILDHAMENLEESIKDKEQVKQSSNYINEDPDVQETYNNAVDHVTEILNQTVNPTLSIEDIEHAINEVNQAKKQLRGKQKLYQTIDLADKELSKLDDLTSQQSSSISNQIYTAKTRTEVAQAIEKAKSLNHAMKALNKIYKNADKVLDSSRFINEDQPEKEAYQQAINHVDSIIHRQTNPEMDPTVINSITHELETAQNNLHGDQKLAHAKQDAANVINGLIHLNVAQREVMINTNTNATTREKVAKNLDNAQALDKAMETLQQVVAHKNNILNDSKYLNEDSKYQQQYDRVIADAEQLLNQTTNPTLEPYKVDIVKDNVLANEKILFGAEKLSYDKSNANDEIKHMNYLNNAQKQSIKDMISHAALRTEVKQLLQQAKTLDEAMKSLEDKTQVVITDTTLPNYTEASEDKKEKVDQTVSHAQAIIDKINGSNVSLDQVRQALEQLTQASENLDGDQRVEEAKVHANQTIDQLTHLNSLQQQTAKESVKNATKLEEIATASNNALALNKVMGKLEQFINHADSIENSDNYRQADDDKIIAYDDALEHGQDIQKSNATQNEAKQALQQLINAETSLNGFERLNHARPRALEYIKSLEKINNAQKSALEDKVTQSHDLLELEHLVNEGTNLNDIMGELANAIVNNYAPTKASINYINADNLRKDNFTQAINNARDALNKTQGQNLDFNAIDTFKDDIFKTKDALNGIERLTAAKSKAEKLIDSLKFINKAQFTHANDEIMNTNSIAQLSRIVNQAFDLNDAMKSLRDELNNQAFPVQASSNYINSDEDLKQQFDHALSNARKVLAKENGKNLDEIQIEGLKQVIEDTKDALNGIQRLSKAKAKAIQYVQSLSYINDAQRHIAESNIHNSDDLSSLANTLSKASDLDNAMKDLRDTLESNSTSVPNSVNYINADKNLQIEFDEALQQASATSSKTSENPATIEEVLGLSQAIYDTKNALNGEQRLATEKSKDLKLIKGLKDLNKAQLEDVTNKVNSANTLTELSQLTQSTLKLNDKMKLLRDKLKTLVNPVKASLNYRNADYNLKRQFNKALKEAKGVLNKNSGTNVNINDIQHLLTQIDNAKDQLNGERRLKEHQQKSEVFIIKELDILNNAQKAAIINQIRASKDIKIINQIVDNAIELNDAMQGLKEHVAQLTATTKDNIEYLNADEDLKIQYDYAINLANNVLDKENGTNKDANIIIGMIQNMDDARALLNGIERLKDAQTKAHNDIKDTLKRQLDEIEHANATSNSKAQAKQMVNEEARKAFSNINHATSNDLVNQAKDEGQSAIEHIHADELPKAKLDANQMIDQKVEDINHLISQNPNLSNEEKNKLISQINKLVNGIKNEIQQAINKQQIENATTKLDEVIETTKKLIIAKAEAKQVIKELSQKKRDAINNNTDLTPSQKAHALADIDKTEKDALQHIENSNSIDDINNNKEHAFNTLAHIIIWDTDQQPLVFELPELSLQNALVTSEVVVHRDETISLESIIGAMTLTDELKVNIVSLPNTDKVADHLTAKVKVILADGSFVTVNVPVKVVEKELQIAKKDAIKTIDVLVKQKIKDIDSNNELTSTQREDAKAEIERLKKQAIDKVTHSKSIKDIETVKRTDFEEIDQFDPKRFTLNKAKKDIITDVNTQIQNGFKEIETIKGLTSNEKTQFDKQLTALQKEFLEKVEHAHNLVELNQLQQEFNNRYEHILNQAHLLGEKHIAEHKLGYVVVNKTQQILNNQSASYFIKQWALDRIKQIQLETMNSIRGAHTVX

SEQ ID NO: 2965 - DNA, 1026 bp, Artificial Sequence
  Description of Artificial Sequence: synthetic nucleic acid sequence
gtgatttcatttgaaaatgattatttagaaggtgcacatgaaaaagttttaaatcgattagtagagacaaatcgaatacaagctgctggatatggcttcgatgacttttcggcacaagctgcagataaaattagacaacgtattgactgtccagatgctaccattcgttttttagtaggtggtacgcaaaccaatcaagtagttattaactcaatgcttgatagttatgaaggtgttatatccgctgatacaggacatgtggcagtccatgaaggtggtgcgatagaattcagtggacataaagttctaaccataccctcccaagaaggtaagattactgctcaagacgttgagaattatatagaaacttttgaaagtgattttaaaaaagaacacatggtgtatccagggatggtttatatttcacatccaaccgaatatggaactttatacacgaaagaagaattacaatctttatctagagtttgccgtagacatcagattccactatttatggatggtgcacgtttaggctatggccttatgagcaatcaaactaatgtaactatcgaagatgttgcaaaatactgtgatgtgttttacataggaggtactaagattggagcactttgtggtgaagcaattgtcttcactaaacaaaatgaacctaaaaacttcactacaattataaaacatcatggtgctttattagcaaaaggccgtctaactggtgttcaatttttagaattattcactgatgatttatattttgatataagtcgacatgctattaaaatggctgaaaaggtaaaaaaaggatttatagataaaggatatcaagtctattttgattcaccaaccaatcaacaattttttattttaagcaacgataaaattgaagaactaaaacaaaaggtaaaattcgcagtttgggagaaatacgataatcaacatcgtgtagttcgcttcgcaacaagttgggccacaactgaagaaaatgttaatcaactacttgaactaatataa

SEQ ID NO: 2966 - protein, 341 aa, Artificial Sequence
  Description of Artificial Sequence: synthetic amino acid sequence
VISFENDYLEGAHEKVLNRLVETNRIQAAGYGFDDFSAQAADKIRQRIDCPDATIRFLVGGTQTNQVVINSMLDSYEGVISADTGHVAVHEGGAIEFSGHKVLTIPSQEGKITAQDVENYIETFESDFKKEHMVYPGMVYISHPTEYGTLYTKEELQSLSRVCRRHQIPLFMDGARLGYGLMSNQTNVTIEDVAKYCDVFYIGGTKIGALCGEAIVFTKQNEPKNFTTIIKHHGALLAKGRLTGVQFLELFTDDLYFDISRHAIKMAEKVKKGFIDKGYQVYFDSPTNQQFFILSNDKIEELKQKVKFAVWEKYDNQHRVVRFATSWATTEENVNQLLELI

SEQ ID NO: 2967 - DNA, 891 bp, Artificial Sequence
  Description of Artificial Sequence: synthetic nucleic acid sequence
atgttaataggatcacatgtttcaatgagtggcaaaaaaatgctgcaagggtcagcagaagaagcacataaatatggtgaatctacatttatgatttatacaggtgcgcctcaaaatacaagacgtaaaaatattgaagatttaaatatcgaaaaaggccagcaggcaatgaaaacatatggcttatcaaatatcgttgtacatgcaccatatatcattaacattgcaaatacaaccaaacctgaagtatttaatttaggagtcgactttctacaaaaagaaatcgaaagaactcaagcgctcggagcgaaagatattgtactgcatcctggagcgcatgtcggagcaggtgtagataaaggaattcaaaaaattattgaaggacttaatgaagtactcacacatgataatgatgtaagaatagcacttgaaactatggcgggtaaaggaacagaagtagggagatcttttgaagaaattgctcaaataattgatggtgttacacataatgatcgcttatcagtatgttttgatacgtgccacactcatgatgccggttataacgtcaaagaagatttcgatggtgtactagaaaaattcgacagcataattggagtagatcgaattaaagtagtacatgttaatgacagtaaaaacctaagaggtgcacagaaggatcgtcacgaaaatatcggctttggtcatattggctttgatgcacttaattacgtagtacatcatgatacttttaaaaatattcccaaaatattagaaactccatatgttggtgaagataaaaaaaataaaaaaccaccgtataaattagaaatagacatgttaaaatcacaaaaatttgatccagaactcaaaaacaaaattttaactcaataa

SEQ ID NO: 2968 - protein, 296 aa, Artificial Sequence
  Description of Artificial Sequence: synthetic amino acid sequence
MLIGSHVSMSGKKMLQGSAEEAHKYGESTFMIYTGAPQNTRRKNIEDLNIEKGQQAMKTYGLSNIVVHAPYIINIANTTKPEVFNLGVDFLQKEIERTQALGAKDIVLHPGAHVGAGVDKGIQKIIEGLNEVLTHDNDVRIALETMAGKGTEVGRSFEEIAQIIDGVTHNDRLSVCFDTCHTHDAGYNVKEDFDGVLEKFDSIIGVDRIKVVHVNDSKNLRGAQKDRHENIGFGHIGFDALNYVVHHDTFKNIPKILETPYVGEDKKNKKPPYKLEIDMLKSQKFDPELKNKILTQ

SEQ ID NO: 2969 - DNA, 420 bp, Artificial Sequence
  Description of Artificial Sequence: synthetic nucleic acid sequence
atgaatacaaatgatgcaattaaagttttaaaggaaaacggacttaaatatactgataaacgtaaagatatgctagatatctttgttaaagaggataaatatttaaatgctaaacatattcaacaacaaatggataaagactatcctggaatatcatttgatactgtatacagaaatcttcatttatttaaagatttaggcattatagagagtaccgaattagatggagaaatgaaattcagaatcgcatgcacaaatcatcaccatcatcattttatttgcgaaaattgcggagaaactaaagtgattgatttttgtccaatagaaaagattaaaagtcaattacccaatgtaaatattcatactcataaattagaagtgtatggtatttgtgaagaatgtcaacgtaaagcaaactaa

SEQ ID NO: 2970 - protein, 139 aa, Artificial Sequence
  Description of Artificial Sequence: synthetic amino acid sequence
MNTNDAIKVLKENGLKYTDKRKDMLDIFVKEDKYLNAKHIQQQMDKDYPGISFDTVYRNLHLFKDLGIIESTELDGEMKFRIACTNHHHHHFICENCGETKVIDFCPIEKIKSQLPNVNIHTHKLEVYGICEECQRKAN

SEQ ID NO: 2971 - DNA, 474 bp, Artificial Sequence; identical to SEQ ID NO: 2887
  Description of Artificial Sequence: synthetic nucleic acid sequence

SEQ ID NO: 2972 - protein, 157 aa, Artificial Sequence; identical to SEQ ID NO: 2888
  Description of Artificial Sequence: synthetic amino acid sequence

SEQ ID NO: 2973 - DNA, 1719 bp, Artificial Sequence
  Description of Artificial Sequence: synthetic nucleic acid sequence
atgagaagaaaacgcgattcatacgattatgtcatcattggtggcggtagtgcaggttcagttcttggtgcacgcctttcagaggataaagataaaaatgttttggtattagaagctggacgtagtgactatttctgggatttatttattcaaatgccagcagcattgatgttcccatcaggtaatcgtttttatgactgggaatatcaaactgacgaagaaccacatatgggacgtagagtagatcatgcgagaggtaaagtattaggtggctcaagttctattaacggtatgatttatcaacgaggtaacccaatggactatgaaggatgggcagaacctgaaggaatggacacatgggactttgcacattgtctaccatacttcaaaaagttagaaacaacatatggtgcagcgccatacgataaagttagaggccatgatggtccaatcaaattaaaacgtggaccagctactaatccattatttaaatcattctttaatgcaggtgttgaagcgggctatcataaaactgcagacgttaatggatacagacaagaaggttttggaccatttgatagccaagtacatcatggacgtcgtatgtctgcttcaagagcgtatctacgcccagcattaagacgtagaaacttagatgttgaaacacgtgcattcgttacaaaattaatttttgatgaaaataatagtaaaaaagtaacaggcgtgactttcaagaaaaatggtaaagaacatactgttcatgcaaacgaagttattttatctggcggtgctttcaatacaccacaactattacaattatcaggtattggtgactcagaattcttaaaatcaaaaggtatagagccacgtatgcatttaccaggtgttggtgagaacttcgaagatcacttagaagtatatattcaacataaatgtaaacaaccggtttcactacaacctagccttgatgtcaaacgtatgccgttcatcggtttacaatggatttttgcacgtaaaggtgcagcggcgtctaaccactttgaaggtggtggctttgtaagatcaaatgatgatgttgattatccaaacctcatgttccatttcttaccaattgctgtaagatatgatggtcaaaaagcaccagtagcacatggttaccaagtacatgttggaccaatgtactccaactcaagaggtagtttgaaaatcaaatctaaggatccatttgaaaaaccaagtatcgtgtttaattacttatctacgaaagaagacgaaagagaatgggttgaagcaattagagtagcaagaaatatcctaaaacaaaaagctatggacccatttaatggtggcgaaatttcaccaggaccacaagttcaaacggatgaagaaattctagattgggtacgtaaagatggagaaactgcattacatccatcttgtagcgcgaaaatgggacctgcatctgacccaatggcagtagtcgatccattaactatgaaagtacatggtatggaaaatttacgtgtcgttgatgcttcagcaatgcctagaacaacaaatggtaatattcatgcacctgtattgatgttagctgagaaagcagcggacattattcgtggtagaaaaccgcttgaacctcaatatgttgactattataaacatggtattgatgatgaaaaagcaggtgcaatggaagatgatccattctaccaatattaa

SEQ ID NO: 2974 - protein, 572 aa, Artificial Sequence
  Description of Artificial Sequence: synthetic amino acid sequence
MRRKRDSYDYVIIGGGSAGSVLGARLSEDKDKNVLVLEAGRSDYFWDLFIQMPAALMFPSGNRFYDWEYQTDEEPHMGRRVDHARGKVLGGSSSINGMIYQRGNPMDYEGWAEPEGMDTWDFAHCLPYFKKLETTYGAAPYDKVRGHDGPIKLKRGPATNPLFKSFFNAGVEAGYHKTADVNGYRQEGFGPFDSQVHHGRRMSASRAYLRPALRRRNLDVETRAFVTKLIFDENNSKKVTGVTFKKNGKEHTVHANEVILSGGAFNTPQLLQLSGIGDSEFLKSKGIEPRMHLPGVGENFEDHLEVYIQHKCKQPVSLQPSLDVKRMPFIGLQWIFARKGAAASNHFEGGGFVRSNDDVDYPNLMFHFLPIAVRYDGQKAPVAHGYQVHVGPMYSNSRGSLKIKSKDPFEKPSIVFNYLSTKEDEREWVEAIRVARNILKQKAMDPFNGGEISPGPQVQTDEEILDWVRKDGETALHPSCSAKMGPASDPMAVVDPLTMKVHGMENLRVVDASAMPRTTNGNIHAPVLMLAEKAADIIRGRKPLEPQYVDYYKHGIDDEKAGAMEDDPFYQY

SEQ ID NO: 2975 - DNA, 570 bp, Artificial Sequence
  Description of Artificial Sequence: synthetic nucleic acid sequence
atgattagatttgaaattcatggagataacctcactatcacagatgcaattcgcaactatattgaggagaaagtaggtaaattagaaagatactttaacaatgtgccaaatgctgtagcacatgttagagttaaaacttattctaattctacaactaaaattgaagttacaattcctttaaaagatgtcactcttagagctgaagaaagacatgatgatttatatgcaggcattgatttaattactaacaaattggaaagacaagtacgtaaatacaaaactcgtgtaaatcgtaaacatagagatcgtggagatcaagatatctttgttgctgaagtacaagagtctacaacaaacaatcatgcagatgatatagaaagtgaaaatgatattgaaattattcgttctaaacaattcagcttaaaaccaatggattctgaagaagcagtattgcaaatgaatttattgggacatgatttctttatttttaccgatagagaaactgatggcacaagcattgtttatagacgaaaagatggcaaatacggtctgattgaaacaactgaataa

SEQ ID NO: 2976 - protein, 189 aa, Artificial Sequence
  Description of Artificial Sequence: synthetic amino acid sequence
MIRFEIHGDNLTITDAIRNYIEEKVGKLERYFNNVPNAVAHVRVKTYSNSTTKIEVTIPLKDVTLRAEERHDDLYAGIDLITNKLERQVRKYKTRVNRKHRDRGDQDIFVAEVQESTTNNHADDIESENDIEIIRSKQFSLKPMDSEEAVLQMNLLGHDFFIFTDRETDGTSIVYRRKDGKYGLIETTE

SEQ ID NO: 2977 - DNA, 429 bp, Artificial Sequence
  Description of Artificial Sequence: synthetic nucleic acid sequence
atggcaaattctatttactcaactacaatgatttcaaatggtggacgtgatggtcgcgtttttagtccagataatacatttgttcaaaaccttgcaacacctaaggaaatgggtggtcaaggaggcaacgatactaatcctgaacaattatttgctgctggatatagtgcatgctttaatagcgcgctatcattaatcttatctcaaaataaaataagtgatgccaacccagaagttgaaatcactattgaattacttaaagatgatactgacaatggttttaaacttggcgcagatattaaagtcacacttgaaaatatgtcccaacaagatgctgagaaatttgtggagcaagcacatcaattctgtccatactcaaaagcgacacgtggtaacattgacgttcagttagatgttacagcgcaataa

SEQ ID NO: 2978 - protein, 142 aa, Artificial Sequence
  Description of Artificial Sequence: synthetic amino acid sequence
MANSIYSTTMISNGGRDGRVFSPDNTFVQNLATPKEMGGQGGNDTNPEQLFAAGYSACFNSALSLILSQNKISDANPEVEITIELLKDDTDNGFKLGADIKVTLENMSQQDAEKFVEQAHQFCPYSKATRGNIDVQLDVTAQ

SEQ ID NO: 2979 - DNA, 909 bp, Artificial Sequence
  Description of Artificial Sequence: synthetic nucleic acid sequence
atgtctattcccattataattgatactgatcctggtatagatgatgctacagcaattagtatcgcactttcacaccctcaatttgacgttaaaatgatatcaactgtgaatggtaatgtaggtattgagaaaacgacagcaaatgcattaaagctaaaaaggttttttaatagttctgttcctgtacatagaggggcatcccaaccattgattaatgacatctttgaagctacatcaattcatggtgagtctggtatggatggttacgagtttccacaaataaatcaagatgatttaacatcaattcatgcagttgaagcaatgagaaatctattagtaaatactcaagaacctttaaccttgattgccataggtccactaacaaatatcgctattcttttaactagttatcccgaagttcaaccatttattaaggaaattgttttaatgggtggtagtaccggtagaggtaatgtaacgcctttagctgaatttaatatatattgtgatccagaagctgctcaaattgtatttaactctggattacctttgactatgattggtcttgatttggctcgtgaagcattgtttactcaccattttgtaaaagacttcaaagatacaaatgcaacttcaaacatgttatataatttatttcagcactataagagtgaagattttgaaataggatttaaattatacgatgtattcactatattatatttgttggatccagaagcctttaatgtcaaggaggcgtatactcaaatagaattaaatggcaactttacaaggggagccacagtggtagactttaatatggagcatcccaattgtacagttgttttaagtcctgttgaaagacagtatgaggatttattcttaaacgccctttcttattgtaaataa

SEQ ID NO: 2980 - protein, 302 aa, Artificial Sequence
  Description of Artificial Sequence: synthetic amino acid sequence
MSIPIIIDTDPGIDDATAISIALSHPQFDVKMISTVNGNVGIEKTTANALKLKRFFNSSVPVHRGASQPLINDIFEATSIHGESGMDGYEFPQINQDDLTSIHAVEAMRNLLVNTQEPLTLIAIGPLTNIAILLTSYPEVQPFIKEIVLMGGSTGRGNVTPLAEFNIYCDPEAAQIVFNSGLPLTMIGLDLAREALFTHHFVKDFKDTNATSNMLYNLFQHYKSEDFEIGFKLYDVFTILYLLDPEAFNVKEAYTQIELNGNFTRGATVVDFNMEHPNCTVVLSPVERQYEDLFLNALSYCK

SEQ ID NO: 2981 - DNA, 742 bp, Artificial Sequence
  Description of Artificial Sequence: synthetic nucleic acid sequence
atgacaaaaaaagatgtaattcaattattagaaaaaatagctatatatatggagctaaaaggagaaaatacatttaaagtttcagcgtatagaaaagccgcacaaagtctagaggttgatgagcgtacattagaagagattgatgatgtaacagaacttaaaggcattggaaaaggcgtaggagaagttattaatgaatttaaaacacaaggtcaatcatcgacccttcaagcacttcaagatgaagtacctgaagggttagtgccacttttgaaaatacaaggattaggcagtaaaaaaatagcgaaactatatcatgaacttcaaattacagataaagaaatacttcaaaaagcctgtgaagaaggtaaggtcagtgctttaaaaggttttgcaaaaaagacagagcaaaacattttagaagcagtgaagtcgatgggtgctaaaaaagatcgttatcctatagagctaatgagaggactcaaccaagaaattgtaaaatttattgaacagttagaaggagttgaacaatattcaactgctggtagttttcgaagatataaggaaatgagtaaagatttagatttcataattagtacatcagagcctaaaaaagttcaacaacaattacttcgtattccgaataaagtcaaagatgttgctgttggggatactaaaatttctctggaattagcttatgatgatgagacgattggcgttgattttagattgatagaacctt

SEQ ID NO: 2982 - protein, 248 aa, Artificial Sequence
  Description of Artificial Sequence: synthetic amino acid sequence
  MOD_RES (248): variable amino acid
MTKKDVIQLLEKIAIYMELKGENTFKVSAYRKAAQSLEVDERTLEEIDDVTELKGIGKGVGEVINEFKTQGQSSTLQALQDEVPEGLVPLLKIQGLGSKKIAKLYHELQITDKEILQKACEEGKVSALKGFAKKTEQNILEAVKSMGAKKDRYPIELMRGLNQEIVKFIEQLEGVEQYSTAGSFRRYKEMSKDLDFIISTSEPKKVQQQLLRIPNKVKDVAVGDTKISLELAYDDETIGVDFRLIEPX

SEQ ID NO: 2983 - DNA, 1938 bp, Artificial Sequence
  Description of Artificial Sequence: synthetic nucleic acid sequence
atgagttacggctctatctcagcagaggcacatgagacgttggctcaagctatgaatcaaattggaggtaaaagtaatagtggagaaggtggagaagattcttcacgttacgaaattcaaaaggatggaagtaataagataagtgcgattaagcaagttgcatcaggtcgttttggggtgacgagtgattacttgcaacatgcaaaagaaattcaaattaaagtcgcacaaggcgctaaaccaggggaaggtggacaactaccaggttcaaaagtatatccatggattgctgagactagaggttcgacaccaggtataggattaatttcaccaccaccacaccatgatatttattcaattgaggacttagcacagctcattcatgatttaaaaaatgcaaatagaagagctgatattgcagttaagcttgtatcaaaaactggcgttggaactatagcttcaggggtagctaaagctttcgccgataaaattgttataagtggttatgatggaggtacaggtgcatcgcctaaaacaagtattcaacatgcaggtttgccatgggagataggccttgccgaaacacatcaaacacttaaattaaatgatttgcgtagtcgcgtaaaattagaaacggatggtaagttactgacgggtaaagatgtagcttatgcttgtgcgcttggtgcagaagaatttggtttcgcaacagcaccacttgttgttttggggtgtattatgatgagggtttgtcataacgatacgtgtccagtaggggttgcaacacaaaacaaagatttaagagctttgtttagaggtaaggcacagcatgtagttaactttatgtattttatagctgaagaattacgtgaaattttggcttcacttggtttagaaacagtagaagagttagtaggaagaacagatcttcttcaacgttcgacgcaattgaaaccaaatagtaaagcagcttcgcttcaaatagaacgtttaatagaacaatttgacggggttaatacgaaagagatatcacaaaaccatcatcttgatgaaggattcgatttgaattatctgtacccagacgcacgctatagtattgaaaacgggcactcttttaccggaaattatgttgttaataatgaacagcgagatgtaggtgtaattacaggtagtgcgatagctaaacaatatggagaagaaggattacctgaagatacgatacttgcttacactgaaggtcatgcaggtcaaagcttagctgcatatgcaccacgcggattaacaatccatcataccggtgatgctaatgactacgtaggtaaaggattgtccggtggaactgtcatcgtaaatgctccaaatagtcaacgtgaaaatgaaattatagcaggaaatataaacttttacggggcttctagaggtaaagcgtttatcaatggtaaagctggtgagcgtttctgtatcagaaatagtggtgcagatgttgtagtagaaggtattggtgatcatggacttgaatatatgacagggggacatgtcattatcttaggagatgttggaaagaactttggccaaggcatgagcgggggcgtaagttatattttctcttctgacgtggagaaatttaaaaaggttaatgcgcttgaaactttagaattcagtagcatacgttttgatgaggaaaaatctcttatcaaagacatgcttgaagcacattttaagcatacacgtagtaacaaagcacgccaattacttgaccaatttgacaatattgaaaagttagcaattaaagttattccgaaagattacaaattaatgatgcaaaaaattgatttgaaaaaacgtcaaatggaacgtgaagatgaagcaacactggcagcgttttatgatgacagagaaacaattgaacaagagctacagccagcagtcatttattaa

SEQ ID NO: 2984 - protein, 645 aa, Artificial Sequence
  Description of Artificial Sequence: synthetic amino acid sequence
MSYGSISAEAHETLAQAMNQIGGKSNSGEGGEDSSRYEIQKDGSNKISAIKQVASGRFGVTSDYLQHAKEIQIKVAQGAKPGEGGQLPGSKVYPWIAETRGSTPGIGLISPPPHHDIYSIEDLAQLIHDLKNANRRADIAVKLVSKTGVGTIASGVAKAFADKIVISGYDGGTGASPKTSIQHAGLPWEIGLAETHQTLKLNDLRSRVKLETDGKLLTGKDVAYACALGAEEFGFATAPLVVLGCIMMRVCHNDTCPVGVATQNKDLRALFRGKAQHVVNFMYFIAEELREILASLGLETVEELVGRTDLLQRSTQLKPNSKAASLQIERLIEQFDGVNTKEISQNHHLDEGFDLNYLYPDARYSIENGHSFTGNYVVNNEQRDVGVITGSAIAKQYGEEGLPEDTILAYTEGHAGQSLAAYAPRGLTIHHTGDANDYVGKGLSGGTVIVNAPNSQRENEIIAGNINFYGASRGKAFINGKAGERFCIRNSGADVVVEGIGDHGLEYMTGGHVIILGDVGKNFGQGMSGGVSYIFSSDVEKFKKVNALETLEFSSIRFDEEKSLIKDMLEAHFKHTRSNKARQLLDQFDNIEKLAIKVIPKDYKLMMQKIDLKKRQMEREDEATLAAFYDDRETIEQELQPAVIY

SEQ ID NO: 2985 - DNA, 1443 bp, Artificial Sequence; identical to SEQ ID NO: 2851
  Description of Artificial Sequence: synthetic nucleic acid sequence

SEQ ID NO: 2986 - protein, 480 aa, Artificial Sequence; identical to SEQ ID NO: 2852
  Description of Artificial Sequence: synthetic amino acid sequence

SEQ ID NO: 2987 - DNA, 963 bp, Artificial Sequence
  Description of Artificial Sequence: synthetic nucleic acid sequence
atgccacaagacgatacatttaaatatgaagatatagatgttattgaaccttcagaaaatgaattgcaattgaaaacattatatatatcggttgatccatatatgagaggacgtatgacaaatgctgattcttatgtagatccgttcaaacaaggggaaccgttcaatggacatacggtatctaaagttttgaaatccaaggatagtaattttgatgaaggtgatatagtagtgggtatgctaccttggagaaaaataaatacagtaaatagtgagtatgttaacaaagtacctacttctgacgtaccattacatctttatcttagtgtgttggggatgcctggtcagactgcttatcatggattacttgatattggacaacctaaagaaggtgaaacagtagttatttcagcagcttcaggtgcagttggttcagttgtgggccaaattgcgaagcttaaaggttgcagagtcgttggtatagctggtggagataaaaaagtgaactatctaaaaaatgaacttcgttttgatgctggtatcgattacaaaaaagataatttccctgaagcgttaaaagaagcggtgcctaacggtatagatgtctacttcgaaaatgtaggtggatatattggcgatgaagtcttcaaacatctcaatacacatgcaagaattcctgtttgtggtgcgatttcatcctataatcatccagaaaaagatattggaccacgcattcagcaaacattgattaaaaatcaagcaatgatgagaggtttcatagtagcagaattcgctgatggttttaaagaagcgagcaaacaattagctcaatgggttcaagagaataaaattaaaacacaagtttcagtagaagatggttttgataaagtgccgcaagcctttagaaatctgctaactggtgataattttggtaaacaagttattaaagtggcaagtgaataa

SEQ ID NO: 2988 - protein, 320 aa, Artificial Sequence
  Description of Artificial Sequence: synthetic amino acid sequence
MPQDDTFKYEDIDVIEPSENELQLKTLYISVDPYMRGRMTNADSYVDPFKQGEPFNGHTVSKVLKSKDSNFDEGDIVVGMLPWRKINTVNSEYVNKVPTSDVPLHLYLSVLGMPGQTAYHGLLDIGQPKEGETVVISAASGAVGSVVGQIAKLKGCRVVGIAGGDKKVNYLKNELRFDAGIDYKKDNFPEALKEAVPNGIDVYFENVGGYIGDEVFKHLNTHARIPVCGAISSYNHPEKDIGPRIQQTLIKNQAMMRGFIVAEFADGFKEASKQLAQWVQENKIKTQVSVEDGFDKVPQAFRNLLTGDNFGKQVIKVASE

SEQ ID NO: 2989 - DNA, 463 bp, Artificial Sequence
  Description of Artificial Sequence: synthetic nucleic acid sequence
atgccagttgacaaagcgccacgtgtacttggctttgatgctgttggtgtgattgaaaagataggagatcaagtgtcaatgtttcaagaaggggacgtcgttttttattcaggttctcctaaccaaaatggttcgaatgaagaataccaattaatagaggaatatttagtagctaaagcacctacaaatttgaaaagtgaacaagcagctagcctacctttaactgggctaacagcttatgaaacgcttttcgatgtttttggaatttcaaaagaaccatctgaaaataaaggtaaatcattgttaataattaatggagcaggtggtgtaggtagtattgcaacacagatagcgaaattttatgggttgaaggttattacaactgcttcgagagaggatactataaagtggtctgttaatatgggtgctgatgttgtactgaatcataagaaagatttaagtc

SEQ ID NO: 2990 - protein, 155 aa, Artificial Sequence
  Description of Artificial Sequence: synthetic amino acid sequence
  MOD_RES (155): variable amino acid
MPVDKAPRVLGFDAVGVIEKIGDQVSMFQEGDVVFYSGSPNQNGSNEEYQLIEEYLVAKAPTNLKSEQAASLPLTGLTAYETLFDVFGISKEPSENKGKSLLIINGAGGVGSIATQIAKFYGLKVITTASREDTIKWSVNMGADVVLNHKKDLSX

SEQ ID NO: 2991 - DNA, 415 bp, Artificial Sequence
  Description of Artificial Sequence: synthetic nucleic acid sequence
gtgttatggggagtgtttgatatggatttgcttataggtacattatttttaattttagttttagttgtttttactctatttacatataaggcacctagtgggatgaaagcgatgggtgctttagcgaatgcggcaattgcttcgtttttagttgaagctttcaataaatatgtgggtggacaagtatttggtattaaattcttagaagaattaggagatgctgctggaggtttaggtggtgtggctgcggctggattaactgcattagcgattggagtatctccagtttatgcactagttattggtgcagcttgtggaggtatggacttgttgccaggatttttcgctgggtatattgtaggctacatgatgaagtataccgagaaatatgtgccagatggtattgatttaattg

SEQ ID NO: 2992 - protein, 139 aa, Artificial Sequence
  Description of Artificial Sequence: synthetic amino acid sequence
  MOD_RES (139): variable amino acid
VLWGVFDMDLLIGTLFLILVLVVFTLFTYKAPSGMKAMGALANAAIASFLVEAFNKYVGGQVFGIKFLEELGDAAGGLGGVAAAGLTALAIGVSPVYALVIGAACGGMDLLPGFFAGYIVGYMMKYTEKYVPDGIDLIX

SEQ ID NO: 2993 - DNA, 714 bp, Artificial Sequence
  Description of Artificial Sequence: synthetic nucleic acid sequence
atgagtcacttcgaacattttactttagaacattaccactccctttttcataatgatcggttgatgtcggtgatttttaatacagttgcagtggcacttttatctgcatcgattgctacagttataggtacatttggtgcgatcgctttatattacttacgcaacaaacggtttaaggttacgctattaacgatgaataatgtattaatggtatcttcagacgtagtcattggtgcttcttttttaattatgttcactgcaataggacatttcacaggtttaggtttaggattttcaacagtgctagcatctcatatagcgttctgtattccaattgttgttatcatcgtcttaccccaattatatgaaatgaatgataacatgttaaatgcagcaagagatttaggtgctaatgaatcacaattattaactagcattattatacctaatattatgccctcgattataggaggattctttatggcattaacatattctctagatgattttacggtaagcttctttgttactggaaacggatttagtgtattgtctgtagaagtttatgctatggctcgaaaaggtataagtatggagattaatgccatttctacaataatatttattgctattatgtttggagtatttggatattactttattcaacatatcgttaatcgtcagaaaaagatgaagcgaggtgttaatgaatga

SEQ ID NO: 2994 - protein, 237 aa, Artificial Sequence
  Description of Artificial Sequence: synthetic amino acid sequence
MSHFEHFTLEHYHSLFHNDRLMSVIFNTVAVALLSASIATVIGTFGAIALYYLRNKRFKVTLLTMNNVLMVSSDVVIGASFLIMFTAIGHFTGLGLGFSTVLASHIAFCIPIVVIIVLPQLYEMNDNMLNAARDLGANESQLLTSIIIPNIMPSIIGGFFMALTYSLDDFTVSFFVTGNGFSVLSVEVYAMARKGISMEINAISTIIFIAIMFGVFGYYFIQHIVNRQKKMKRGVNE

SEQ ID NO: 2995 - DNA, 336 bp, Artificial Sequence
  Description of Artificial Sequence: synthetic nucleic acid sequence
gtggtagagttattagaaattaactttatacatagaacttgtgaagtgttaattattatcgatccgcagtatgcaaataatgggtacgcgaaaaaagcctttaaaatggctattgactatgcttttttagtattaaatatgaataaggtatacttatatgtggatattaagaatgagaaagcagtacatatctatcaaagtaataatttcgaaatagaaggaacgttaaaggaacacttctatacaaggggagaatatagagattgctatgtaatgggcttgttaaaaaggaattgggttaataagaatgatgatgatttgtctcatataagatga

SEQ ID NO: 2996 - protein, 111 aa, Artificial Sequence
  Description of Artificial Sequence: synthetic amino acid sequence
VVELLEINFIHRTCEVLIIIDPQYANNGYAKKAFKMAIDYAFLVLNMNKVYLYVDIKNEKAVHIYQSNNFEIEGTLKEHFYTRGEYRDCYVMGLLKRNWVNKNDDDLSHIR

SEQ ID NO: 2997 - DNA, 888 bp, Artificial Sequence
  Description of Artificial Sequence: synthetic nucleic acid sequence
atgatgatgactacaagttccaaacacttatctaaaatattaatcgttatacttggcgttatgactgcatttggtcctttgactattgatatgtacggaccatctttacctaaagttcagcatgcgtttggttcatcaatttcagaaatacaacttacattatcctttgctatgataggtttagctattggtcaatttgtattcgggccactatcagatgtattaggtcgtaaaaaaatggcactcattttattgattggatatttaatagcctcattattatcagtttttacagttcatttaacaatatttttaattatccgtttaattcaaggtttagcaggaggtggtgcaatcgtcatagccaaagcttctattggagataactatgacggagacgaattagcaaaatttttaacttctcttatggtcataaacggtataatcaccatcattgctccactgttaggtggcctcgctttatctattgcaagttggagaatgatttttatatttttaacaatcattaccttaatagtcatcttaggcattttattaaagatgccagttgggccccatcaagaacaatctcagttaaattttaaagcaatatttaaagattttggtctgttattaacaaaacccaccttcgttattccaatgttattgcaaggattaacttatgtcatgttattcagttattcgtcagccgcaccttttatttcacaaaagatgtatcatatgacaccacttcaatacagtgcaatgtttgctattaatggagtgggtttgatagtcgtcagtcagataaccgctattatagtagaaaaggtaagccgatatgcgatgctcatatatttaacaatcattcaaatgttaggtgtttaa

SEQ ID NO: 2998 - protein, 295 aa, Artificial Sequence
  Description of Artificial Sequence: synthetic amino acid sequence
MMMTTSSKHLSKILIVILGVMTAFGPLTIDMYGPSLPKVQHAFGSSISEIQLTLSFAMIGLAIGQFVFGPLSDVLGRKKMALILLIGYLIASLLSVFTVHLTIFLIIRLIQGLAGGGAIVIAKASIGDNYDGDELAKFLTSLMVINGIITIIAPLLGGLALSIASWRMIFIFLTIITLIVILGILLKMPVGPHQEQSQLNFKAIFKDFGLLLTKPTFVIPMLLQGLTYVMLFSYSSAAPFISQKMYHMTPLQYSAMFAINGVGLIVVSQITAIIVEKVSRYAMLIYLTIIQMLGV

SEQ ID NO: 2999 - DNA, 570 bp, Artificial Sequence; identical to SEQ ID NO: 2975
  Description of Artificial Sequence: synthetic nucleic acid sequence

SEQ ID NO: 3000 - protein, 189 aa, Artificial Sequence; identical to SEQ ID NO: 2976
  Description of Artificial Sequence: synthetic amino acid sequence

SEQ ID NO: 3001 - DNA, 306 bp, Artificial Sequence
  Description of Artificial Sequence: synthetic nucleic acid sequence
gtgttgaaaaagatacatgggttattgttttgtccaactcttgaccatgatacaacttccgttatttcttctaaagttccaggtccaccaggaagtgctatgcatacatcgcctttctttaagataacttcttttctttcagacatactttccacgattattagttcgtctaatttatcatgtgctaactctctttgttttaaaaacgtaggcattacaccaattgtttttccgttgttatgtattacagtatttgcaattgttcccattaatcctgcatttccgccaccaaaaactaaagtgtga

SEQ ID NO: 3002 - protein, 101 aa, Artificial Sequence
  Description of Artificial Sequence: synthetic amino acid sequence
VLKKIHGLLFCPTLDHDTTSVISSKVPGPPGSAMHTSPFFKITSFLSDILSTIISSSNLSCANSLCFKNVGITPIVFPLLCITVFAIVPINPAFPPPKTKV

SEQ ID NO: 3003 - DNA, 561 bp, Artificial Sequence
  Description of Artificial Sequence: synthetic nucleic acid sequence
atgaatattatagtctattgtggagcaagcaagggaaacaaaaaagaatacgaaaatagtgcaattcaattaggtgaatggatagctaaaaataatcacactttagtttttggtggcggaaatgcaggattaatgggaacaattgcaaatactgtaatacataacaacggaaaaacaattggtgtaatgcctacgtttttaaaacaaagagagttagcacatgataaattagacgaactaataatcgtggaaagtatgtctgaaagaaaagaagttatcttaaagaaaggcgatgtatgcatagcacttcctggtggacctggaactttagaagaaataacggaagttgtatcatggtcaagagttggacaaaacaataacccatgtatctttttcaacacaaataattattattcccttatcgaacaattctacgatcaaatggtttcaaacgagtttttaactcaagaagatagagataaaatattattctcaaactcattccaagaaattgaagaatttatagaaaactataaaacaccaaaaataagaacttattaa

SEQ ID NO: 3004 - protein, 186 aa, Artificial Sequence
  Description of Artificial Sequence: synthetic amino acid sequence
MNIIVYCGASKGNKKEYENSAIQLGEWIAKNNHTLVFGGGNAGLMGTIANTVIHNNGKTIGVMPTFLKQRELAHDKLDELIIVESMSERKEVILKKGDVCIALPGGPGTLEEITEVVSWSRVGQNNNPCIFFNTNNYYSLIEQFYDQMVSNEFLTQEDRDKILFSNSFQEIEEFIENYKTPKIRTY

SEQ ID NO: 3005 - DNA, 405 bp, Artificial Sequence
  Description of Artificial Sequence: synthetic nucleic acid sequence
atgttagctaataatggtttaatcgcgattaatctcgcttatcagaatttagaaagagcatttgttcaagatgtttctgatattgaatccaaacttacgttagcagcgacacctaagctcgcatcaaaatcagctattagagaaagtatacgcttagcaattgttcctacaattgattctgtaaaaacatatggtctagtttcaattccaggtatgatgacaggattgattatcggaggcgttgacccacttcaagcaattaaatttcaattgcttgtcgtgtttattcatacaacagcgacgattatgtctgcactcattgcaacgtatatgagttacggtcagttctttaatgctcgtcatcaactcattgctagaacgcaacgcacaagacaaagtagttaa

SEQ ID NO: 3006 - protein, 134 aa, Artificial Sequence
  Description of Artificial Sequence: synthetic amino acid sequence
MLANNGLIAINLAYQNLERAFVQDVSDIESKLTLAATPKLASKSAIRESIRLAIVPTIDSVKTYGLVSIPGMMTGLIIGGVDPLQAIKFQLLVVFIHTTATIMSALIATYMSYGQFFNARHQLIARTQRTRQSS

SEQ ID NO: 3007 - DNA, 987 bp, Artificial Sequence
  Description of Artificial Sequence: synthetic nucleic acid sequence
atgaatgtagtacttattggtggtggcactggactttctgtccttgctagaggccttagagaatttccaatagacattactgccattgttactgtagcggacaatggtgggagcacggggaaaattagagatgtcatggatattccagcgcctggtgatattcgtaatgtcattgctgctttaagtgactcagaatcgatattaactcaattgttccagtaccgttttggtgaaaatcaagtagatgggcattcattaggtaatttagttattgctggaatgactaacattactaatgattttggacacgctattaaagagttaagcaaagttttaaatattaaaggccaagtcatcccttcaacaaacgcaagtgtgcaactcaacgcggtgatggaagacggtgaaattgtacatggagaaactaatatacctaaaacacataaaaaaatagatcgtgtgtttttagaaccaagtgatgttgaaccaatgaatgaagcgatagaagctttagaacaagcagatttaattgtcttaggaccaggttcattatatacaagtgttatatcaaatttatgtgtcaaaggtatttcagaagcattattacgtacatctgctccaaaactttatgtatctaatgttatgacacaaccaggcgagactgataattatgatgtcaaagagcatattgatgcacttactcgacaagttggtgaaccatttattgattttgtcatatgtagctcagaatcctatagtaaagatgttttacaacgatatgaagaaaagaattcgaaaccagtagcagtacataaagaacaattaaaagatagtggaattagagttttaacggcatctaatttagttgaaatatctaatgaacactatgtcagacataacacaaaagtattatcaaaaatgatttatgaacttgccttagaattaacaagtacaattcgctttactcctagtgataaaaagaaataa

SEQ ID NO: 3008 - protein, 328 aa, Artificial Sequence
  Description of Artificial Sequence: synthetic amino acid sequence
MNVVLIGGGTGLSVLARGLREFPIDITAIVTVADNGGSTGKIRDVMDIPAPGDIRNVIAALSDSESILTQLFQYRFGENQVDGHSLGNLVIAGMTNITNDFGHAIKELSKVLNIKGQVIPSTNASVQLNAVMEDGEIVHGETNIPKTHKKIDRVFLEPSDVEPMNEAIEALEQADLIVLGPGSLYTSVISNLCVKGISEALLRTSAPKLYVSNVMTQPGETDNYDVKEHIDALTRQVGEPFIDFVICSSESYSKDVLQRYEEKNSKPVAVHKEQLKDSGIRVLTASNLVEISNEHYVRHNTKVLSKMIYELALELTSTIRFTPSDKKK

SEQ ID NO: 3009 - DNA, 720 bp, Artificial Sequence
  Description of Artificial Sequence: synthetic nucleic acid sequence
atgattatcgttgctacagctactggggatatgcctttcccaagcgtggctaacatcttacaagaaagactaggaacaggtaaggttgctactatggatcaacttgctgcatgttctggctttatgtattcaatgattactgctaaacaatatatacaatctggtgattacaaacatattttagttgtgggtgctgataaattatctaagattaccgatatgactgaccgttctactgctgtattatttggagacggtgctggagctgttgtcatgggagaagttgctgaaggtcgtggtatcattagctatgaaatgggttcagacggtagtggtggtaaatacttgtacttagatagagaaactggcaaactcaaaatgaatggtagagaagtatttaaatttgctgtgagaattatgggtgatgcatctacgcgtgtagttgagaaagctggtttatcgtctgaagacatagacttatttgttccacatcaggctaatattagaattatggaatctgcgagagagagattaggaatagaaagagaaaaaatgagtgtctcagtaaataaatatggtaatacttcggctgcctcaataccattaagtattaatcaagaattgcaaaatggaaaaatcaaagatgacgatactttagtcttagttggcttcggtggaggtctaacttggggcgcaatcgttattaaatggggaaaatag

SEQ ID NO: 3010 - protein, 239 aa, Artificial Sequence
  Description of Artificial Sequence: synthetic amino acid sequence
MIIVATATGDMPFPSVANILQERLGTGKVATMDQLAACSGFMYSMITAKQYIQSGDYKHILVVGADKLSKITDMTDRSTAVLFGDGAGAVVMGEVAEGRGIISYEMGSDGSGGKYLYLDRETGKLKMNGREVFKFAVRIMGDASTRVVEKAGLSSEDIDLFVPHQANIRIMESARERLGIEREKMSVSVNKYGNTSAASIPLSINQELQNGKIKDDDTLVLVGFGGGLTWGAIVIKWGK

SEQ ID NO: 3011 - DNA, 1134 bp, Artificial Sequence
  Description of Artificial Sequence: synthetic nucleic acid sequence
atgaataaaaataatagagttgttataacgggtatcggagccttatctccaattggtaacgatgctaaaacaacatgggacaatgcactaaaaggtgttaacggtatagataaaatcacaagaatagatactgatgattataatgtacatcttgctggtgaattgaaagattttaatatagaagaccacattgatagaaaagaagctcgccgtatggatcggtttacacaatacgcggtggttgctgcaagagaagcggttaaagatgcacaattaaatattaatgaaaaaaatgccgaccgtattggtgtatggattggttctggtatcggtggtatggaaactttcgaagttgcacatacaacacttgtagaaagaggaccacgtcgagtaagtccatttttcgttccaatgttaattcctgatatggctactggtcaagtttctattgatttaggtgccaaagggcccaatggttctacagtaacagcttgtgctacggggactaactcaataggtgaggcatttaaaattattcaacgtggtgatgcagatgcaatggtgactggtggaacagaggcacctattacacatatggcaatcgcagggtttagtgcaagtcgtgcattatctacaaacaatgaccctgaaacagcttgtcgaccattccaagaaggccgtgatggctttgttatgggtgaaggggcaggtattgttgtacttgaatcattagattcagctaaagagagaggcgctgaaatttacgctgaagttgtaggttatggttcctctggcgatgcacatcatattacagcacctgcgcctgaaggtgaaggtggctcacgagctatgcaagctgctttagatgatgctggaatcaaagctcaagatgtacagtatttaaatgcacatggcacaagtacacctgttggagatttatatgaggttcaagcgattaaaaatacattcggtgatgctgcgaagtcattaaaagtaagttcaactaaatcaatgactggacatttattaggtgctacaggtggaattgaagctattttttctgcgctatcaattcgtgattcaaaggtagcccctacaatacatgcaatcacaccagacgaagaatgtgatttg

SEQ ID NO: 3012 - protein, 378 aa, Artificial Sequence
  Description of Artificial Sequence: synthetic amino acid sequence
MNKNNRVVITGIGALSPIGNDAKTTWDNALKGVNGIDKITRIDTDDYNVHLAGELKDFNIEDHIDRKEARRMDRFTQYAVVAAREAVKDAQLNINEKNADRIGVWIGSGIGGMETFEVAHTTLVERGPRRVSPFFVPMLIPDMATGQVSIDLGAKGPNGSTVTACATGTNSIGEAFKIIQRGDADAMVTGGTEAPITHMAIAGFSASRALSTNNDPETACRPFQEGRDGFVMGEGAGIVVLESLDSAKERGAEIYAEVVGYGSSGDAHHITAPAPEGEGGSRAMQAALDDAGIKAQDVQYLNAHGTSTPVGDLYEVQAIKNTFGDAAKSLKVSSTKSMTGHLLGATGGIEAIFSALSIRDSKVAPTIHAITPDEECDL

SEQ ID NO: 3013 - DNA, 1134 bp, Artificial Sequence
  Description of Artificial Sequence: synthetic nucleic acid sequence
gtgatacatcgacaaacaaatcaattaaacactgataacttagaaaagaagcaacgacaatataaatatgcttttaatttagctgaaattgattctgaaagttttcctatgcacatttttagaaaatatgcgaaagacgtttttgaagaccatcagctatcactattacaacgaggcgagcgtcaaggggaatatattttaaggcaacaaatttcacattacttatttaatagtcgtggcgtcacttgtcacccaaatcaaattattgttggatcatcaacaagccagttactcgatatgataaccaatttactaaaaaaagaagaatttattattgaacagccaagttatccacctattaaacatacgcttgataaaaaaggtataagttatattcaagtcccagttgaacaaaatggaatacaaatcgaccctattttaaatacaaataacaatattttgtatataacaccatctcatcaatttccaactggttatgtcaccaatttaaaaaaaagaacacaattaatcaattggtcccatcaagctaagcaaagatatattatcgaagatgattatgattcagaatttagatattttggcaaacccatacctgcattacaaagtttagacacaaaaggaaaagtcatttatattagtactttctcaaaatctttatatccaagctgtaggattgcatatattgttttgccacaaaatttaatgcacaaatataataatcaaaaatataaagagggaaatacagtgcctgtgcatgttcaacacatgattgctcaattcatgataagtgggaaatttgaaagacatttgaataaaatgcgaaagatatatagagataaacttgattatattttaaaacgattaaagccctacaatactcaaataaagattgaaggcgcactaactggaatgcattttacaataactgttaataatggattgtcaatgaaacaatgtttaaaaaatgcgaaaaaaaataatttaaaattaaaaccttatcattacgaaaattattctaaagtttatccaaaatttattttaggatttggggggataaaaaaagaagaattagaagatcatgttaatgcattaattcattcactcgttatataa

SEQ ID NO: 3014 - protein, 377 aa, Artificial Sequence
  Description of Artificial Sequence: synthetic amino acid sequence
VIHRQTNQLNTDNLEKKQRQYKYAFNLAEIDSESFPMHIFRKYAKDVFEDHQLSLLQRGERQGEYILRQQISHYLFNSRGVTCHPNQIIVGSSTSQLLDMITNLLKKEEFIIEQPSYPPIKHTLDKKGISYIQVPVEQNGIQIDPILNTNNNILYITPSHQFPTGYVTNLKKRTQLINWSHQAKQRYIIEDDYDSEFRYFGKPIPALQSLDTKGKVIYISTFSKSLYPSCRIAYIVLPQNLMHKYNNQKYKEGNTVPVHVQHMIAQFMISGKFERHLNKMRKIYRDKLDYILKRLKPYNTQIKIEGALTGMHFTITVNNGLSMKQCLKNAKKNNLKLKPYHYENYSKVYPKFILGFGGIKKEELEDHVNALIHSLVI

SEQ ID NO: 3015 - DNA, 373 bp, Artificial Sequence
  Description of Artificial Sequence: synthetic nucleic acid sequence
atgaatatagttgatgtaaatgatgttgagaaaatcgacttagcaatagatggcgctgatgaagtagacagtgcgcttaaccttattaaaggcggtggtggagccttatttagggaaaaggtcatagatgaaatggctgaccgatttgtcgttgttgtagatgaaagtaaactcgtcaactatttaggagaaacatttgcattaccagttgaagtcgataaatttaattggtaccaagttgccaaaaaaattgagcgtacttatgatattcatgtaagcagaagagttaatgaagatgtaccgtttataaccgacaatggtaattacatattagattgttcattgcaaaatagaattcctgcttatgagctac

SEQ ID NO: 3016 - protein, 125 aa, Artificial Sequence
  Description of Artificial Sequence: synthetic amino acid sequence
  MOD_RES (125): variable amino acid
MNIVDVNDVEKIDLAIDGADEVDSALNLIKGGGGALFREKVIDEMADRFVVVVDESKLVNYLGETFALPVEVDKFNWYQVAKKIERTYDIHVSRRVNEDVPFITDNGNYILDCSLQNRIPAYELX

SEQ ID NO: 3017 - DNA, 690 bp, Artificial Sequence
  Description of Artificial Sequence: synthetic nucleic acid sequence
gtgatatacatgattaaagtgaatgccatatctattggcaaaatagaaacattgtcttatggaaactataaaccaatgcaatcagcgttaaacaaaattccttttaaaggtcaaatgtggctcaatcgacttgggttcgtggacgatgaacaagcctatcataaccatggtggtatacataaagcgatatgttgttttagtaaatctaattatcaattatttaaagatgacttagatcaattacctgaatttgcaatgtttggagagaatttgacagttgaacatctagatgaagcagatgtttattttggtaatcagtatcaactaggcgatacaatcatagaagtatcagatatacgagaaccttgttggaaaattcaagctaaatatgcaatacctaatttagttcaaaaaatgtcgcaatctggtaaaactggattttattttagagttataaaagaaggatatgtacatcagagtgataatttaaaactcattaaaaaggcagaatcaaacacacgtctatctgtgaaagacttaaatcatctattctataatgagcgaaataatttaagattaatctatcatgcacttcgaaatccttatctttcacctgatcgaaagaaaaaactacagaaaatgaaaacgcgtgccgaaaatagaaaattcattaaatctgacgataaatag

SEQ ID NO: 3018 - protein, 229 aa, Artificial Sequence
  Description of Artificial Sequence: synthetic amino acid sequence
VIYMIKVNAISIGKIETLSYGNYKPMQSALNKIPFKGQMWLNRLGFVDDEQAYHNHGGIHKAICCFSKSNYQLFKDDLDQLPEFAMFGENLTVEHLDEADVYFGNQYQLGDTIIEVSDIREPCWKIQAKYAIPNLVQKMSQSGKTGFYFRVIKEGYVHQSDNLKLIKKAESNTRLSVKDLNHLFYNERNNLRLIYHALRNPYLSPDRKKKLQKMKTRAENRKFIKSDDK

SEQ ID NO: 3019 - DNA, 618 bp, Artificial Sequence
  Description of Artificial Sequence: synthetic nucleic acid sequence
gtgatatatttggactttataaatcagcagacaacccaaactgcaaaagctttattaggtgttaaaattatttaccaagatgactatcaaacatatactggatatattgtagaaactgaagcttatttaggtatacaagataaagctgcacatggttttggtggcaaaataacaccaaaagtgacttctttatataaaaaaggtggcacgatatatgcacatgtgatgcatacgcacttattaatcaattttgttacacggactgagggcataccagaaggtgtacttattcgtgctattgaaccagatgaaggtatcggcgctatgaacgtcaatcgtggaaaatctggatacgagctcactaatggtccaggaaagtggactaaagctttcaatattccacgatcaattgatggctcaaccttaaatgactgcaaattatctatagataccaatcatcgcaaatatccaaaaactattatagaaagtggtcgtatcggtattcctaataaaggagaatggacaaataaaccactacgtttcactgttaaaggcaatccatatgtctctagaatgcgcaaatcagattttcaaaatcccgacgatacatggaaataa

SEQ ID NO: 3020 - protein, 205 aa, Artificial Sequence
  Description of Artificial Sequence: synthetic amino acid sequence
VIYLDFINQQTTQTAKALLGVKIIYQDDYQTYTGYIVETEAYLGIQDKAAHGFGGKITPKVTSLYKKGGTIYAHVMHTHLLINFVTRTEGIPEGVLIRAIEPDEGIGAMNVNRGKSGYELTNGPGKWTKAFNIPRSIDGSTLNDCKLSIDTNHRKYPKTIIESGRIGIPNKGEWTNKPLRFTVKGNPYVSRMRKSDFQNPDDTWK

SEQ ID NO: 3021 - DNA, 2154 bp, Artificial Sequence
  Description of Artificial Sequence: synthetic nucleic acid sequence
gtggataatcaggagattcaaaatctatttgaaggcactaacattagtcatgattatatgttattaagtgatatgcaaaaagccattgatcgtattaaattagctatcgatcaaaatgaacgaatactagtatatggtgactatgatgcagatggtgttacatctactacaattctagtgtctactttacgtctacttggcgctcaggtggggtggtatattcccaatagatttacagaaggatatggacctaatgaattagcatttaaaaatgcttatgacgaagggatttccttaataataactgtagataatggtatacagggacatcatgaaataagtaccatacaagaattaggtgtagatgttatagtgacagatcatcatgaaataggagaaactttacctgatgcttttgcaattgtacatccgatgcatcctaattttgaatatccttttaaatatttatgtggtgcgggtgttgcttataaattggcccaaggattgatagagcatccacctcaacatttcatagcattagctgccataggtacaattgcagatttagtatcattgacagatgagaatagatatattgtaaagcaaggagtaaagatattaaacaatcatacaccatcgtccataaaggctatcttaaatcaagcgggttttaatgatgaaataacagaagaaacaattggttttattattggacctcgattaaatgcggttggtagactagaagatgcatcattagctgctgaacttttattgtccgatgaatttgaagaggcggaatttttagctgaacaagttgaacattttaatcatgaacgtaaagatatagtatctaaaattactaatgaagcattgttattagcagaggaacaaatcaagcaaggccatttgtttcttttacttgccaaagaggggtggcatgagggtgtattaggtattgttgcatctaaaattgtagaaacatatgcactacctacattaattttaaatattgatgaaaatcaaaatcatgccaagggttctgcgaggtcgattgaacaagtttccatgtttgatattttaaatgatcatcaacagttaattgataagtttggtggtcatcacatggctgcaggaatgacaatgtctatcgataatattgaacatttacataaagagctagatatgtggatgaaagaactaactgttaccacttcattagagccttcaataaaggtggatgcacaacttgaagaaaaagaaattaacattaaaaatattaaagatatatttcaattaaggccttttggtacggactttaatagtcctctttttatggttagagatctaattgtcaagtcaacaaagggaattggacaggataataagcatcttaagttaacgcttggtcattcaggtttaactgctttattttggaatcatggacatttggcaagtgaacttgaaccaggtcaaccgattcatataataggaacattgcaaattaatgaatggaatggtaatcaaacacctcaatttatcatcaaagacattgctatagaccaattacaaattttagattatcgtagtaaacgtaaaaatatacaatttaaagaaactgaatcaaatgttgcctatgtcattcatccgaaacttaaaaaaagcaattcacattactatcattatggtgaggttattgatagaccttatgataaaatagtgtttagagatttacctaatactatggttgaaattgaacaaaccttagaacattcacaaatttctcaactatatttagttctgcagcatgaaaagtcaatatattttgaaggtatccctagcaagtcgctttttaaaaagtgttacaaagctttaataaacaaaaaagaaactgacttaattaaagaaggtatgctgctttgtgagtacttaaatattaagccagaaatattaacattcatgcttaaagtctttaaagaattggagtttatttacgacgaaaagggattgattaagataaatccagcgccaaataaacaagatatagaaaatagtcgtatttaccaaatgagacgagcacgtatggaagtagaagaacgtcttctctatgatgattttttaaatataaaagaatggataatatcaaagttaacatag

SEQ ID NO: 3022 - protein, 717 aa, Artificial Sequence
  Description of Artificial Sequence: synthetic amino acid sequence
VDNQEIQNLFEGTNISHDYMLLSDMQKAIDRIKLAIDQNERILVYGDYDADGVTSTTILVSTLRLLGAQVGWYIPNRFTEGYGPNELAFKNAYDEGISLIITVDNGIQGHHEISTIQELGVDVIVTDHHEIGETLPDAFAIVHPMHPNFEYPFKYLCGAGVAYKLAQGLIEHPPQHFIALAAIGTIADLVSLTDENRYIVKQGVKILNNHTPSSIKAILNQAGFNDEITEETIGFIIGPRLNAVGRLEDASLAAELLLSDEFEEAEFLAEQVEHFNHERKDIVSKITNEALLLAEEQIKQGHLFLLLAKEGWHEGVLGIVASKIVETYALPTLILNIDENQNHAKGSARSIEQVSMFDILNDHQQLIDKFGGHHMAAGMTMSIDNIEHLHKELDMWMKELTVTTSLEPSIKVDAQLEEKEINIKNIKDIFQLRPFGTDFNSPLFMVRDLIVKSTKGIGQDNKHLKLTLGHSGLTALFWNHGHLASELEPGQPIHIIGTLQINEWNGNQTPQFIIKDIAIDQLQILDYRSKRKNIQFKETESNVAYVIHPKLKKSNSHYYHYGEVIDRPYDKIVFRDLPNTMVEIEQTLEHSQISQLYLVLQHEKSIYFEGIPSKSLFKKCYKALINKKETDLIKEGMLLCEYLNIKPEILTFMLKVFKELEFIYDEKGLIKINPAPNKQDIENSRIYQMRRARMEVEERLLYDDFLNIKEWIISKLT

SEQ ID NO: 3023 - DNA, 873 bp, Artificial Sequence
  Description of Artificial Sequence: synthetic nucleic acid sequence
atgcctgaactacctgaagttgaacatgttaaaagaggtattgagccatttataaaaagtgcaaaaatagagaaagtaacttttgctaaaaatgtaattaacggtaagaataataaccgtgagacgattataaaaggtatggaattagatacttttaaaaaacttactgaaggttatgttataaaaaaagttgaaagaagaagtaagtacattattttttatatagcggatcatgacgatgatagaatcttagttagtcatttaggtatggcaggcggattctttgttgttaataaccttgatgagataagtacaccgaattatcgaaagcattggcaagtcattttcgatttggataataaacaaaaattagtctattctgatatcagacggtttggagaaattagaaatatagtcaattttgatagttatccatctttattagaaatcgctccagaaccatttgaagaggtggcatttgaacactatttagaatgtttgacaatgaaaaaatataagaataaaccaataaaacaaacgattcttgatcatcgtgttatagcaggagctggaaatatctatgcctgtgaagctttattcagagctggtattactccggataaaattactaattcactcactaaacaagaaagaaaatccctcttttattatgttcgagaagttttagaagagggtataaaatatggaggtactagtatttcagattataggcatgcagatggtaaaactggacaaatgcaattacatttaaatgtatataaacaaaaaaagtgcaaggtttgtggtcattcgattgaaacaaaagtgatagctggtagaaatagtcatttttgcccaaactgtcagagataa

SEQ ID NO: 3024 - protein, 290 aa, Artificial Sequence
  Description of Artificial Sequence: synthetic amino acid sequence
MPELPEVEHVKRGIEPFIKSAKIEKVTFAKNVINGKNNNRETIIKGMELDTFKKLTEGYVIKKVERRSKYIIFYIADHDDDRILVSHLGMAGGFFVVNNLDEISTPNYRKHWQVIFDLDNKQKLVYSDIRRFGEIRNIVNFDSYPSLLEIAPEPFEEVAFEHYLECLTMKKYKNKPIKQTILDHRVIAGAGNIYACEALFRAGITPDKITNSLTKQERKSLFYYVREVLEEGIKYGGTSISDYRHADGKTGQMQLHLNVYKQKKCKVCGHSIETKVIAGRNSHFCPNCQR

SEQ ID NO: 3025 - DNA, 498 bp, Artificial Sequence
  Description of Artificial Sequence: synthetic nucleic acid sequence
gtgattaaacttgggagggtgacatatatgaaatgcccaaaatgtaattctacacattccagagtggttgattcaagacatgcagatgaggccaatgcgattagacgtagaagagaatgtgaaaattgcggaacgcgttttacaacatttgaacatattgaagttagtccattaatagtagtgaagaaagatgggactagagaacaatttttaagagaaaaaatattaaatggtttagtaagatcttgcgagaaacgaccagtacgttatcaacaacttgaagacataactaataaagtggagtggcaacttagagatgagggacaaactgaaatttcttctagagaaattggagagcatgttatgaatttgttaatgcatgttgaccaagtttcctatgtaagatttgcatctgtatataaagaattcaaagatgttgatcaactcttagagtcaatgcaaggtatcttgagtgataataaacggagtgataaatag

SEQ ID NO: 3026 - protein, 165 aa, Artificial Sequence
  Description of Artificial Sequence: synthetic amino acid sequence
VIKLGRVTYMKCPKCNSTHSRVVDSRHADEANAIRRRRECENCGTRFTTFEHIEVSPLIVVKKDGTREQFLREKILNGLVRSCEKRPVRYQQLEDITNKVEWQLRDEGQTEISSREIGEHVMNLLMHVDQVSYVRFASVYKEFKDVDQLLESMQGILSDNKRSDK

SEQ ID NO: 3027 - DNA, 624 bp, Artificial Sequence
  Description of Artificial Sequence: synthetic nucleic acid sequence
atgtctgttgtaccatggcaacaattgaatcctgctgacagtccatacgttaaaatgtttggattagttggaatcccttttgcagcaggtattattaactttgttgtacttacagctgcagcctcttcttgtaatagtggtatatttgctaatagccgtacgatgtttggattagctggaagaaagcaaggtccagcattcttacatagaaccaataagcacggcgtaccacattatgctattttagtgacatgtggcttattaagtatttcagtcgtgttaaatgcaatttttaaagatgcgactaaagtgttcgtacaaattacaacattttcaactgttttaaatattatgatttggacaattattatgatcgcgtatctaggttatttaagacatgaaccgaaacagcataaagaaagtaactataaaatgtggggcggaaaatacatggcttacagtattttagggttctttgcatttatttttattatactattgattaatagtgcaacgcgttatgccgtactttctgcacccgtatggtttgttatcatgctattgatgtatcaaaaatataaaaaagaatctcgcaaagctaaaattaaaaatgaggaagagtaa

SEQ ID NO: 3028 - protein, 207 aa, Artificial Sequence
  Description of Artificial Sequence: synthetic amino acid sequence
MSVVPWQQLNPADSPYVKMFGLVGIPFAAGIINFVVLTAAASSCNSGIFANSRTMFGLAGRKQGPAFLHRTNKHGVPHYAILVTCGLLSISVVLNAIFKDATKVFVQITTFSTVLNIMIWTIIMIAYLGYLRHEPKQHKESNYKMWGGKYMAYSILGFFAFIFIILLINSATRYAVLSAPVWFVIMLLMYQKYKKESRKAKIKNEEE

SEQ ID NO: 3029 - DNA, 488 bp, Artificial Sequence
  Description of Artificial Sequence: synthetic nucleic acid sequence
atgtttgcttttttcggtattgttttgggattcgctacattatttaaaaatccaaccattatgggaggattagctgatcagcaaacattttggtttaaattttggtctgttattgaatcaggtggttgggtaatatttacacatatggaaattgtctttgtagttggcttaccattatctcttgctaaaaaagcaccaggacatgcagctttagcagctctaatgggatatttaatgtttaatacttttatcaatgcaattttaactcaatggccacatacttttggcgctaatttaaaaaaaggtgtagaaaacacaacaggattaaaatcgattgcaggtattgaaacgttagataccaatattttaggtgcaatcattatctcaggaataataacgtggatacataatagatattacagtaagcgtttacctgaaatgttaggtgtatttcaaggattaacattcgttgtaacaatctctttctt

SEQ ID NO: 3030 - protein, 163 aa, Artificial Sequence
  Description of Artificial Sequence: synthetic amino acid sequence
  MOD_RES (163): variable amino acid
MFAFFGIVLGFATLFKNPTIMGGLADQQTFWFKFWSVIESGGWVIFTHMEIVFVVGLPLSLAKKAPGHAALAALMGYLMFNTFINAILTQWPHTFGANLKKGVENTTGLKSIAGIETLDTNILGAIIISGIITWIHNRYYSKRLPEMLGVFQGLTFVVTISFX

SEQ ID NO: 3031 - DNA, 417 bp, Artificial Sequence
  Description of Artificial Sequence: synthetic nucleic acid sequence
atggaagcacaaatggaaaaagatggtaattactatatggaaggaatattagatgatattcaacaagatggatatggtttcttaagaaccgttaactattctaaaggtgagaaggatatttatatttctgcaagccaaattcgacgttttgaaataaaacgtggtgataaagtaacgggtaaagttcgtaaaccaaaagataatgaaaaatattatggtctacttcaagttgattttgtaaacgaccataatgcagaagaagtcaaaaaacgtccttcacttccaagctttaacacctctttatccggaagaaagaatcctattagaaacgcaatctacaaattattccactcgtattatggatttagtcacaccaataggtcttggtcaacgtggtcttatagttgcaccacctaa

SEQ ID NO: 3032 - protein, 138 aa, Artificial Sequence
  Description of Artificial Sequence: synthetic amino acid sequence
MEAQMEKDGNYYMEGILDDIQQDGYGFLRTVNYSKGEKDIYISASQIRRFEIKRGDKVTGKVRKPKDNEKYYGLLQVDFVNDHNAEEVKKRPSLPSFNTSLSGRKNPIRNAIYKLFHSYYGFSHTNRSWSTWSYSCTT

SEQ ID NO: 3033 - DNA, 879 bp, Artificial Sequence; identical to SEQ ID NO: 2813
  Description of Artificial Sequence: synthetic nucleic acid sequence

SEQ ID NO: 3034 - protein, 292 aa, Artificial Sequence; identical to SEQ ID NO: 2814
  Description of Artificial Sequence: synthetic amino acid sequence

SEQ ID NO: 3035 - DNA, 2622 bp, Artificial Sequence
  Description of Artificial Sequence: synthetic nucleic acid sequence
atgaaagctagtgaaattaggcaaaaatatttgaatttctttgtagaaaaaggacatatgattgaaccgtctgcaccacttgtacctatcgatgatgattcattattgtggatcaattctggtgtagctaccttgaaaaaatactttgacggacgcgaaactcctaaaaaaccaagaattgtcaattctcaaaaagctatacgaacaaacgatatagaaaacgtcggttttactgctcgccatcatactttttttgagatgctaggtaatttttcaatcggtgactactttaaacatgaagcgattgaatttgcttgggaatttctaacaagtgataaatggatgggcatggaacctgagaagctatatgtgactattcatcctgaagatactgaagcttttagaatttggcatgaagacattggtttagaggaaagtcgcatcattcgaatagaaggcaatttttgggatatcggggaaggaccatctggaccaaatacagaaattttctatgatcgtggatcggcttatggaaaagatgatcctgctgaagaaatgtatcctggtggtgaaaatgaaagatatttagaagtttggaatctagtgtttagtgagtttaatcacaataaagacaatacttacacaccactaccaaataaaaatattgatactggcatgggattagaacgtatgacgtctatctcacaaaatgtaagaacaaattatgaaacagacttatttatgcctataattaaggaagtagaacatgtttcaggaaaaaaatatttaattgatgatgcacaagatgttgcatttaaagttatcgcagaccacattagaacgatttctttcgcaattgctgatggcgcattaccagctaatgagggtagaggatatgtattaagaagattattacgcagagcagttcgctttagccaatcattaggaattaatgaaccatttatgtataaacttgttgatatagtcgctgatatcatggaaccatattatccaaatgtcaaagacaaatccaactttattaaacgtgtcattaaatcagaggaagaacgcttccatgaaacgcttgaggaaggtcttacgattttaaatgaactgataaaagaagcgaagaatagtgatcaggttattaaaggtcatgatgcttttaagttatatgatacttatggattcccaatagaattaactgaagaattagcaactcaagaaaatttgtctgttgatatgcctacttttgaacaggaaatgcaacaacagagagatcgagctagacaagctcgacagaattctcaatcaatgcaagttcaaagtgaagtactaaaaaatattcaagatgaaagtcaatttgttggctatgaaactacggactatcaatcattaataactcatatcatatacaatggtgaagaagttaaacatgttgaagcaggagaaacaatttactttattttaagagaaacgcctttctatgcagtaagtggtggacaggtcgcagataagggaacagttggtaatgagagctttgaaataaatgtaactgacgtaactaaagcgcctaatggccaaaacttacacaaaggtattgtgcaatttggtgaagcaacacagaacgcgaaagtagaagcacgtgttaacaaagaggatagacgacttattcaaaaaaatcatagtgctacacatttattacatgctgcattaaaagaagtattaggagatcatgttaatcaggctggttcgttagtagaacctgaaagactacgttttgatttctcacattttggtcctatgacacaagaagaaattaatttagtagaacgtagagtaaatgaagaaatttggagagctatcgacgtccgtattcaagaaatgagtattgaagaagccaaatcaataggcgctatggctttatttggtgaaaaatatggagatattgttcgcgttgtcaatatggcaccattttcaatagaattgtgcggtggaatacatgtgaataatactgcggaaattggtctctttaagattgtgagtgaatctggaacaggtgccggtgttagaagaattgaagctttaacaggtaaaggtgcattcttacatcttgaagaaattgaaacacagtttaataatattaaaaatcatttaaaagttaaatccgataaccaagtagttgaaaaagttaaacaacttcaagaagaagaaaaaggactgcttaaacaattagaacaacgcaacaaagaaataacatcactaaagatggggaacattgaagaacaggttgagttgattaataatttgaaagttttagcaacagaagtagaaattccaaatccaaaagcgatacgttcaactatggatgactttaaatctaaacttcaagatactattatagtgttagtcggacaagttgatggaaaggtttctgtaattgctacagtaccaaaatcacttacaaatcaagtaaaagctggagatcttatcaaaaacatgacaccaattattggtggaaaaggtggaggtcgtcctgatatggctcaaggtggcggaactcaacctgaaaaaataacagaagcattacgctttattaaagattacattaaaaatctataa

SEQ ID NO: 3036 - protein, 873 aa, Artificial Sequence
  Description of Artificial Sequence: synthetic amino acid sequence
MKASEIRQKYLNFFVEKGHMIEPSAPLVPIDDDSLLWINSGVATLKKYFDGRETPKKPRIVNSQKAIRTNDIENVGFTARHHTFFEMLGNFSIGDYFKHEAIEFAWEFLTSDKWMGMEPEKLYVTIHPEDTEAFRIWHEDIGLEESRIIRIEGNFWDIGEGPSGPNTEIFYDRGSAYGKDDPAEEMYPGGENERYLEVWNLVFSEFNHNKDNTYTPLPNKNIDTGMGLERMTSISQNVRTNYETDLFMPIIKEVEHVSGKKYLIDDAQDVAFKVIADHIRTISFAIADGALPANEGRGYVLRRLLRRAVRFSQSLGINEPFMYKLVDIVADIMEPYYPNVKDKSNFIKRVIKSEEERFHETLEEGLTILNELIKEAKNSDQVIKGHDAFKLYDTYGFPIELTEELATQENLSVDMPTFEQEMQQQRDRARQARQNSQSMQVQSEVLKNIQDESQFVGYETTDYQSLITHIIYNGEEVKHVEAGETIYFILRETPFYAVSGGQVADKGTVGNESFEINVTDVTKAPNGQNLHKGIVQFGEATQNAKVEARVNKEDRRLIQKNHSATHLLHAALKEVLGDHVNQAGSLVEPERLRFDFSHFGPMTQEEINLVERRVNEEIWRAIDVRIQEMSIEEAKSIGAMALFGEKYGDIVRVVNMAPFSIELCGGIHVNNTAEIGLFKIVSESGTGAGVRRIEALTGKGAFLHLEEIETQFNNIKNHLKVKSDNQVVEKVKQLQEEEKGLLKQLEQRNKEITSLKMGNIEEQVELINNLKVLATEVEIPNPKAIRSTMDDFKSKLQDTIIVLVGQVDGKVSVIATVPKSLTNQVKAGDLIKNMTPIIGGKGGGRPDMAQGGGTQPEKITEALRFIKDYIKNL

SEQ ID NO: 3037 - DNA, 429 bp, Artificial Sequence
  Description of Artificial Sequence: synthetic nucleic acid sequence
atgctaaagcataaaattttaggactagatgttggaagtaaaactgttggcattgctataagtgaccttatgggttggactgctcaagggttagacacactccgtatcaacgaagaacaagatgatttaggaattgatcaactcgtgaagattattaaagataatcaagttggaactgttgttattggcttgcccaagaatatgaacaattcaataggttttcggggagaggcttcaataaaatataaagaaaagttacaagagtctatcccttctattgatattgttatgtgggacgaacgtttaagtacaatggctgctgaaagatctttacttgaagcagatgtttcaagacaaaaaagaaaaaaggtaatagataaaatggcagctgtatttattttacaaggctatttagattctattcaataa

SEQ ID NO: 3038 - protein, 142 aa, Artificial Sequence
  Description of Artificial Sequence: synthetic amino acid sequence
MLKHKILGLDVGSKTVGIAISDLMGWTAQGLDTLRINEEQDDLGIDQLVKIIKDNQVGTVVIGLPKNMNNSIGFRGEASIKYKEKLQESIPSIDIVMWDERLSTMAAERSLLEADVSRQKRKKVIDKMAAVFILQGYLDSIQ

SEQ ID NO: 3039 - DNA, 495 bp, Artificial Sequence
  Description of Artificial Sequence: synthetic nucleic acid sequence
atgaatagaactaaaaatattttagaaattggtacagccattggttatagttcaatgcaattcgctaatatttcgaaagatataaatgtaacaacaattgaacgaaatgaagacatgattcatcttgcaaaaaagttcataaaaaagtatcgataccagaatcaaatccgtttaattgaatacgatgctttgaatgcatttgaacaagtcaatgacaaacaatatgatatgatatttatcgacgcagctaaagcacaatcaatgaaatttttccaactatatacaccgttattaaaaaaaggtggaattgtggttactgataatgttttatatcatggatttgtttcaaatatagacgttgttcgttcgagaaatgtgaaacaaatggttaagaaagtgcaacagtacaatgaatggttgatggagcaatctcaatttacaacaaactttataaatatggatgatggattagcaatatctataaaaggagaatga

SEQ ID NO: 3040 - protein, 164 aa, Artificial Sequence
  Description of Artificial Sequence: synthetic amino acid sequence
MNRTKNILEIGTAIGYSSMQFANISKDINVTTIERNEDMIHLAKKFIKKYRYQNQIRLIEYDALNAFEQVNDKQYDMIFIDAAKAQSMKFFQLYTPLLKKGGIVVTDNVLYHGFVSNIDVVRSRNVKQMVKKVQQYNEWLMEQSQFTTNFINMDDGLAISIKGE

SEQ ID NO: 3041 - DNA, 1329 bp, Artificial Sequence
  Description of Artificial Sequence: synthetic nucleic acid sequence
atgatgccatcagcaaaattaacgcaggctagctttgaagatatggatgcattgttagcagataattttgcgcgtgcggcgcaaaagcagggtgttaagcatattgtctacatgagtggtttaataccagaaaatgatgagctatctgcacatttaagaagtcgacttgaatgtgaaaaaattcttggtgattacggtataccagttagcacattacgtgcaggtttaattattggtgcaaaaggaagttcttatccaattcttaaacgactagttaagagattgccagcaatggttttgcctagttgggcttacaataaaattgcacctgttgccattgacgatgtgatagatggtttagcagcattggtgaatcgaacacccaaagataacgaagcaattgatatcacaggtcctgaagtgatgaattataaaacgctgatacagcgcacagctaacgtacttgataagcgactgcctatgcttgatttacctattatacccattatcataagtcggtattgggtacaactgatttcaaatgtaccgaaagaaatggtatatccattaatgaatagtttaactcacgatatggtaccacatcgaaaacgcgttgtgtctaacttgtccgtaggaaatatcacctttgaagatagtgtgaaaagagcactaagagaagaacaaaagacttctaagaaaaagtcggattcgaaaaattctcaatcatttgggcgtatgcatcaagaaattaaagatgtacgagccattacacggtttaaaattccggaaggttattcgattaaagatgtgactaaagaatatgcaaaattcatcaataatatcacactacatctcgttaaaggtacgataaatgaacgagaatttaatatgaatttgcccttcattaataaatttattttaaaaatggaacgtgatgaagctgactctacagaagatatggtggtatataatattgtgggtggcgatttagcacattcaaatgatggtggaaatgcacgctttgaattccgaagaataagaaacaccaatgagggtattattgctttacaagaatatgaacctacattaccttgggtagtatataaactaactcaagctaaagcacacaagactgttatgaatatttttaaaaataaaatggcacgtttatcgcaacaaaaaaatgtgaaagatgaaacatatatgtctaatcgtgtaactattggagtaacagtagcatcagcgttcgttattggaagcgcagtagggttccaactttttaaaaagcatcaaatcaaaaagaacacaatgtcgaatgcagaattataa

SEQ ID NO: 3042 - protein, 442 aa, Artificial Sequence
  Description of Artificial Sequence: synthetic amino acid sequence
MMPSAKLTQASFEDMDALLADNFARAAQKQGVKHIVYMSGLIPENDELSAHLRSRLECEKILGDYGIPVSTLRAGLIIGAKGSSYPILKRLVKRLPAMVLPSWAYNKIAPVAIDDVIDGLAALVNRTPKDNEAIDITGPEVMNYKTLIQRTANVLDKRLPMLDLPIIPIIISRYWVQLISNVPKEMVYPLMNSLTHDMVPHRKRVVSNLSVGNITFEDSVKRALREEQKTSKKKSDSKNSQSFGRMHQEIKDVRAITRFKIPEGYSIKDVTKEYAKFINNITLHLVKGTINEREFNMNLPFINKFILKMERDEADSTEDMVVYNIVGGDLAHSNDGGNARFEFRRIRNTNEGIIALQEYEPTLPWVVYKLTQAKAHKTVMNIFKNKMARLSQQKNVKDETYMSNRVTIGVTVASAFVIGSAVGFQLFKKHQIKKNTMSNAEL

SEQ ID NO: 3043 - DNA, 420 bp, Artificial Sequence
  Description of Artificial Sequence: synthetic nucleic acid sequence
atgcaacaaagtgagttaatcggttatacaattgaagataatatgaaatttcctgctgaggctagaagtgaagcttttgaccgtgataaagcgaaacaactcatctctcaagtaggattaggtaattatcagttagatgctcaaattgagcacatgtctgggggagagcaacaacgtattaccatcgctagacaactcatgtatgaacctgaagttttattattggacgaagctactagcgctttagatacacataataaaaagaaaattgaagaaattatatttaaactagcagataaagggattgccattttgtggattacgcatagtgatgaccaaagtatgcgtcattttaagcgtagaatcacaattactgacggtaagatatcgagtgatgaggagttgaatggtaatgagtaa

SEQ ID NO: 3044 - protein, 139 aa, Artificial Sequence
  Description of Artificial Sequence: synthetic amino acid sequence
MQQSELIGYTIEDNMKFPAEARSEAFDRDKAKQLISQVGLGNYQLDAQIEHMSGGEQQRITIARQLMYEPEVLLLDEATSALDTHNKKKIEEIIFKLADKGIAILWITHSDDQSMRHFKRRITITDGKISSDEELNGNE

SEQ ID NO: 3045 - DNA, 405 bp, Artificial Sequence; identical to SEQ ID NO: 3005
  Description of Artificial Sequence: synthetic nucleic acid sequence

SEQ ID NO: 3046 - protein, 134 aa, Artificial Sequence; identical to SEQ ID NO: 3006
  Description of Artificial Sequence: synthetic amino acid sequence

SEQ ID NO: 3047 - DNA, 441 bp, Artificial Sequence
  Description of Artificial Sequence: synthetic nucleic acid sequence
atgataacaatgaaagatattataagagatggtcatccaacacttcgtgaaaaagcgaaagaattaagcttcccactttctaacaatgataaagaaacattgcgcgcaatgcgtgaatttctaatcaatagtcaggatgaagaaaccgcaaaacgttatggtttacgttctggcgtaggtttagctgctccacaaattaatgaaccaaaacgtatgattgctgtctacttacctgatgatggaaacggtaaatcgtatgattatatgctcgtaaatcctaaaataatgagttacagtgtacaagaagcttatttaccaactggcgaaggttgtctaagtgttgatgaaaacatcccaggtttagtgcatcgtcatcatttcttaatatcactttcggttttaaaaccacaaaatttaactatcatagagattcttctttaa

SEQ ID NO: 3048 - protein, 146 aa, Artificial Sequence
  Description of Artificial Sequence: synthetic amino acid sequence
MITMKDIIRDGHPTLREKAKELSFPLSNNDKETLRAMREFLINSQDEETAKRYGLRSGVGLAAPQINEPKRMIAVYLPDDGNGKSYDYMLVNPKIMSYSVQEAYLPTGEGCLSVDENIPGLVHRHHFLISLSVLKPQNLTIIEILL

SEQ ID NO: 3049 - DNA, 756 bp, Artificial Sequence
  Description of Artificial Sequence: synthetic nucleic acid sequence
gtgaatgtggaagatatagtgatagtaggtagacacgcagttaaagaagcaattatatcaggtcacgccataaataagattttgattcaagacggtataaaaaagcaacaaattaacgacattttaaaaaatgcaaaatcacaaaaattaattgtacaaacggtaccaaaatctaaattagattttttagcaaatgcacctcaccagggtgtggctgctttagtagccccatatgaatatgcaaacttcgatgaatttttacaaaaacaaaagaaaaaagcccgttattcaactgttatcattttagatggtttagaagacccgcataatcttggctctatattaagaacagcagatgcttctggtgttgatgcggttattatacctaaaagacgatcagttgcgctaacacagaccgttgcaaaagcttctacaggagcgattcagcatgttccggttataagggttactaatctttcgaaaactatcgacgaattaaaagacaacggcttttggattgcggggacagaagctaataatgcaacggattatagagatttacaagcagatatgtcactaggtattgtaataggtagtgaggggcaaggtatgagtcgtttagtgagtgataagtgtgattttcatattaagattccaatggttggacatgtcaatagcttgaacgcgtctgtggctgcaagtttaatgatgtatgaagtatatcgtaaacgtcatcagttagaggaaaagtcatga

SEQ ID NO: 3050 - protein, 251 aa, Artificial Sequence
  Description of Artificial Sequence: synthetic amino acid sequence
VNVEDIVIVGRHAVKEAIISGHAINKILIQDGIKKQQINDILKNAKSQKLIVQTVPKSKLDFLANAPHQGVAALVAPYEYANFDEFLQKQKKKARYSTVIILDGLEDPHNLGSILRTADASGVDAVIIPKRRSVALTQTVAKASTGAIQHVPVIRVTNLSKTIDELKDNGFWIAGTEANNATDYRDLQADMSLGIVIGSEGQGMSRLVSDKCDFHIKIPMVGHVNSLNASVAASLMMYEVYRKRHQLEEKS

SEQ ID NO: 3051 - DNA, 540 bp, Artificial Sequence
  Description of Artificial Sequence: synthetic nucleic acid sequence
atggattatttttttgctcaagttgaaatgagagataatcctaaactaaaaggaaaacctgtcatcgttggcggtaaagcgagtcatcgaggcgtagtttctacggcatcatacgaagcaagagcttatggtgttcactctgctatgcctatgactcaagcacataagctatgccccaatggatattatgtaacaagccgttttgatacttatagagaggtatctggtcaaatcatgaaaatattcagaagttatacagaattagtagaacccatgtctttagatgaagcttatttagatattacacatttagtgagaccggatttaccagcatcaaccattgcaaattatattcgcagagatatatacgaagtaacacgtttaactgcgtcagctggcgtgtcttataataagtttttagcaaagttagcgagtggtatgaacaagccgaatggtttgacagtaattgattacaataatgtacatgaaatattaatgcaattagatattggagattttccaggggtaaaaagcatatag

SEQ ID NO: 3052 - protein, 179 aa, Artificial Sequence
  Description of Artificial Sequence: synthetic amino acid sequence
MDYFFAQVEMRDNPKLKGKPVIVGGKASHRGVVSTASYEARAYGVHSAMPMTQAHKLCPNGYYVTSRFDTYREVSGQIMKIFRSYTELVEPMSLDEAYLDITHLVRPDLPASTIANYIRRDIYEVTRLTASAGVSYNKFLAKLASGMNKPNGLTVIDYNNVHEILMQLDIGDFPGVKSI

SEQ ID NO: 3053 - DNA, 699 bp, Artificial Sequence
  Description of Artificial Sequence: synthetic nucleic acid sequence
atggcctttttcatttcaagaggatttgtaaaaacagggctaggtcgacgtattgctctgcaattcgttaaattatttggaaagaaaacgcttggtttggcttattcacttgttggtgttgaccttatcttagctcctgctacgccaagtaatacagcacgtgctggtggtattatgtttccaatcattaagtccttgtcagagtcatttggttcatcgccgagagatggttctgagagaaaaatgggtgcgtttttaatctttactgagttccaaggtaatttaattacttcagctatgtttttaacagctatggccggtaaccctatagcgcaaagtttagctgaaaaaacggcacacgttcaaattacatggatgaattggtttgttgctgctattatacccggattgatttctctcatcgttgtccctttcattatttataaattatacccacctactgttaaagaaacgcctaacgctaaaaaatgggctactgaacaactagaagaaatgggacatatgtctatagccgaaaaattgatggttggtgtctttatcatagcattggctttgtgggtattaggaagcttcattaatgttgatgccacgctcactgcatttattgctttagcattgttactattaacaggtgtattagcgtggtcagatattttaaatgaaacagattctgcctaa

SEQ ID NO: 3054 - protein, 232 aa, Artificial Sequence
  Description of Artificial Sequence: synthetic amino acid sequence
MAFFISRGFVKTGLGRRIALQFVKLFGKKTLGLAYSLVGVDLILAPATPSNTARAGGIMFPIIKSLSESFGSSPRDGSERKMGAFLIFTEFQGNLITSAMFLTAMAGNPIAQSLAEKTAHVQITWMNWFVAAIIPGLISLIVVPFIIYKLYPPTVKETPNAKKWATEQLEEMGHMSIAEKLMVGVFIIALALWVLGSFINVDATLTAFIALALLLLTGVLAWSDILNETDSA

SEQ ID NO: 3055 - DNA, 1146 bp, Artificial Sequence
  Description of Artificial Sequence: synthetic nucleic acid sequence
atgttctcacatgatggtatgaagtcatttatggaatatgtattcgaagtcggtaaggtagatcataacgaaatctatttaaaaaccacaaaagataagtcattcctagatatggacaccatttcaaatttgtataactcaaaatttataggttacggattctttgaaagatatcaacaagatttgctcaatctttatcaaatagagcgtacgcaaaacgtattacaagaattcaattctgatccgaatatacaaaattttgatgaaatgcttaacaaactacaaaaggtcagtttaattagtgcaagtgaagaaagtgggactaaaaaaattgtagatcactttgtcgaagaattatatagcgaagaaccaaaacaaaaaatcaatacaggttataaactggtggattacaaaataggtggtttagaacctacacagttgattgtaatcgctgcgagaccgtcagtaggtaaaacggggtttgcgcttaatatgatgcttaatatagcgtctcaaggctataaaacttcattcttcagtctagagacaactggcgtgtctgtattgaaaaggatgttatcagcagaaactgggatagaactaactcgtatcaaagaaattaaagatttagaaccggatgaattaacacgtttaacaactgcagcagacagaatactcaaacttgatatagatatacacgataaaagcaatattactacacatgatgtacgtaaacaagcgatgaagaacaaagatgtgcaacaggttatcttcattgactacttacaacttatgcagacagacagtaagttagatcgtcgtaatggtatcgaaaagatatcgcgagatttgaagattattgcaaatgaaacaggtgcaattattgtgttgctatctcaattgagcagaggtgtagaaacaagaaatgacaaaagacctatgctatctgacatgaaagaagcaggtggaattgaagcagatgcaagtttagctatgttgttatatcgagatgattactacaaccgtgatgatgttgatgactcaggcaagtcaattgttgaatgtaacatcgcaaagaataaagacggagaaacaggtgtagttgagtttgagtactacaagaaaacgcagaggttcttcacatga

SEQ ID NO: 3056 - protein, 381 aa, Artificial Sequence
  Description of Artificial Sequence: synthetic amino acid sequence
MFSHDGMKSFMEYVFEVGKVDHNEIYLKTTKDKSFLDMDTISNLYNSKFIGYGFFERYQQDLLNLYQIERTQNVLQEFNSDPNIQNFDEMLNKLQKVSLISASEESGTKKIVDHFVEELYSEEPKQKINTGYKLVDYKIGGLEPTQLIVIAARPSVGKTGFALNMMLNIASQGYKTSFFSLETTGVSVLKRMLSAETGIELTRIKEIKDLEPDELTRLTTAADRILKLDIDIHDKSNITTHDVRKQAMKNKDVQQVIFIDYLQLMQTDSKLDRRNGIEKISRDLKIIANETGAIIVLLSQLSRGVETRNDKRPMLSDMKEAGGIEADASLAMLLYRDDYYNRDDVDDSGKSIVECNIAKNKDGETGVVEFEYYKKTQRFFT

SEQ ID NO: 3057 - DNA, 657 bp, Artificial Sequence
  Description of Artificial Sequence: synthetic nucleic acid sequence
atgagtattttagttattggagcaaatggaggcgtaggttctaaactagtaagtcaattaaatgaagaacacgttgattttacagctggtgtacgtaaggaagatcaagttaaagaattagaaaataaagggattaaagctatattaatagatgtagaaaaaaatagtattaatgatttaaaaaatatctttacagattatgataaagttatcttttcagttggatctggtggaagcactggagcggataaaacaatcattgttgatttagatggtgctgtaaaaacaattaaagctagtaaagaagcgggtatcaaacattatgttatggtatcaacatacgattctagacgtgaagcattcgatgcgagtggagatttaaaaccgtatacaattgcaaagcattatgctgatgattacttaagaacatcagatcttaattatacaattgtacatccaggttcacttacagatgatgctggaactggaaaaatagaagctgatttatatttcgacaaagcaggatcaattccacgtgaagatgttgctacagttttaaaagaagtagtaacttctgatggttttaataatcaagaattccaaattttaagtggcaatcatggtgttaaagatgcattgaaaaactatgaatcttaa

SEQ ID NO: 3058 - protein, 218 aa, Artificial Sequence
  Description of Artificial Sequence: synthetic amino acid sequence
MSILVIGANGGVGSKLVSQLNEEHVDFTAGVRKEDQVKELENKGIKAILIDVEKNSINDLKNIFTDYDKVIFSVGSGGSTGADKTIIVDLDGAVKTIKASKEAGIKHYVMVSTYDSRREAFDASGDLKPYTIAKHYADDYLRTSDLNYTIVHPGSLTDDAGTGKIEADLYFDKAGSIPREDVATVLKEVVTSDGFNNQEFQILSGNHGVKDALKNYES

SEQ ID NO: 3059 - DNA, 939 bp, Artificial Sequence
  Description of Artificial Sequence: synthetic nucleic acid sequence
atgccgttatttttaaaacccatttttctggataaagtatggggcagtgataatcttcgtcaatttgggtatcaactacctaataatcacataggtgaatgttggggaatttcagcacatccacacggaaaaagtgtgattgaaaatggtatatttgctggtcaaacattggatcaagtatggaacaatcatagagaaatatttggagattttccaagtaaagattttccattaatggctaaaattgtagatgctgctgcgccattgtctattcatgtacatcccgacgattcttatgcatatgaacacgaagaaggtcaatatggaaaatctgaatgttggtacatcattgaagctgatgaaggtgcaaagattactataggtacgtatgcgaaatctcgtgatgaatttgaagagcaattggagcaaggtacatttgaaaattatttgagaacaatacaagtgcaaccaggtgatttttactttataccagctggaacgatacattccataggtgcaggcattatggcgtatgaagtcatgcaatcatcagatatttcatatagaatttatgattatcatagaaaaactgataatagtgaggaacgtgaattaaatatagataaggcattagatgttattaattattcaaatgaactacctaatatcactcctcaaaatgaagtgatagaaaatcacaattgtacacatattgtatctagtgatttttttactatggttaagtgggatatttctggtactctaaattatatgaagcctagagaattttgtcttgtttctgttttagatggacaaggtaaacttattgtagatggtgatatatatgatatatctaaaggttcaaactttgtgttaacttctgaagatttagatagtgttttcgaaggagattttaaactaatcattagttacatttaa

SEQ ID NO: 3060 - protein, 312 aa, Artificial Sequence
  Description of Artificial Sequence: synthetic amino acid sequence
MPLFLKPIFLDKVWGSDNLRQFGYQLPNNHIGECWGISAHPHGKSVIENGIFAGQTLDQVWNNHREIFGDFPSKDFPLMAKIVDAAAPLSIHVHPDDSYAYEHEEGQYGKSECWYIIEADEGAKITIGTYAKSRDEFEEQLEQGTFENYLRTIQVQPGDFYFIPAGTIHSIGAGIMAYEVMQSSDISYRIYDYHRKTDNSEERELNIDKALDVINYSNELPNITPQNEVIENHNCTHIVSSDFFTMVKWDISGTLNYMKPREFCLVSVLDGQGKLIVDGDIYDISKGSNFVLTSEDLDSVFEGDFKLIISYI

SEQ ID NO: 3061 - DNA, 909 bp, Artificial Sequence
  Description of Artificial Sequence: synthetic nucleic acid sequence
gtgattgtaattggatcaacaaatgtagataaatttcttaatgttaaaaggtttccaaaacccggtgagacattacatattaatcaagctcaaaaggagtttggtgggggcaagggagccaatcaagccatagcagctagtagattagcagcagatacaacatttatcagtaaagttggtaaagatggcaatgccaactttatattggaagatttcaaaaaagcaggtattcatacacaatatattttaacttcagaaagtgaagaaactgggcaagcatttatcactgttgatgaagcaggacaaaatacgattcttgtttacggtggtgcgaatatgacattaagtgcaactgatgttgagatgagtgcggatgcgtttattggtgcagactttgttgtagcgcagcttgaagttccatttgaggcgatagaacaagcatttaaaattgctcgtaaacaaaatatcactactgtattaaatcctgcaccggcaattgaattgcctaagtcacttttagagttaactgatataattattccaaacgaaacggaagcagaattattaacaggtatttcaatcaataatgaaagtgatatgaaagaaacagcaacatattttctcgatttaggtatatctgcagtattaattactttaggggagcaaggcacgtattgtgcatatcaagaacaatacaaaatgattcctgcgtgtaatgtaaaagcaatagatacgacagcagcaggagatacatttataggtgcttttttaagtgagttaaataaagatttgagtaatatagaatcggctattcgacttgcaaatcaagcgtcgtctctaacggtacaacgaaaaggagcacaagcttctataccaacacgtaaagaagtagaggcagaatataattaa

SEQ ID NO: 3062 - protein, 302 aa, Artificial Sequence
  Description of Artificial Sequence: synthetic amino acid sequence
VIVIGSTNVDKFLNVKRFPKPGETLHINQAQKEFGGGKGANQAIAASRLAADTTFISKVGKDGNANFILEDFKKAGIHTQYILTSESEETGQAFITVDEAGQNTILVYGGANMTLSATDVEMSADAFIGADFVVAQLEVPFEAIEQAFKIARKQNITTVLNPAPAIELPKSLLELTDIIIPNETEAELLTGISINNESDMKETATYFLDLGISAVLITLGEQGTYCAYQEQYKMIPACNVKAIDTTAAGDTFIGAFLSELNKDLSNIESAIRLANQASSLTVQRKGAQASIPTRKEVEAEYN

SEQ ID NO: 3063 - DNA, 558 bp, Artificial Sequence
  Description of Artificial Sequence: synthetic nucleic acid sequence
gtgagtggtatcgaaccaggacaatggttaggcgtatttggtgtgggaggattaggtaatttagcattgcaatacgccaaaaacgtaatgggcgcgaaagtcgttgcatttgacattaatgatgataaattaaattttgctaaagagcttggtgctgatgcaatcataaattcaactaatgttgatcctattgaggaagttaatcgtctaacgaataataaaggattagatgcaacggtgattactgctgtagctaaaacaccttttaatcaagcagttgatgttgttaaggcgggtgcacgtgtggtagcagtaggacttccagtagataaaatggatttagatattccacgtttagtgcttgatggaattgaagtcgttggttcattagttggtaccagacaagatttaagagaagcatttcaatttgctgccgaaaataaagttattcctaaaatccaattaagacaattatctgaaattaacgatatttttgatgaaatggaaaaaggaacaattacgggtcgaatggtaattgatatgaaaagcacgcactga

SEQ ID NO: 3064 - protein, 185 aa, Artificial Sequence
  Description of Artificial Sequence: synthetic amino acid sequence
VSGIEPGQWLGVFGVGGLGNLALQYAKNVMGAKVVAFDINDDKLNFAKELGADAIINSTNVDPIEEVNRLTNNKGLDATVITAVAKTPFNQAVDVVKAGARVVAVGLPVDKMDLDIPRLVLDGIEVVGSLVGTRQDLREAFQFAAENKVIPKIQLRQLSEINDIFDEMEKGTITGRMVIDMKSTH

SEQ ID NO: 3065 - DNA, 732 bp, Artificial Sequence
  Description of Artificial Sequence: synthetic nucleic acid sequence
atgctaatagataaagcaagatcatttattcagaccatgtatagcgaattaaaatataatactaatgaaattgaaaatagaatgaaagagattgagcaagaaattaacttgactggtagttacacacatacttatgaagaattatcttacggtgcaaaaatggcatggagaaactcaaatcgttgtattggtagactgttttggaattctttaaatgttaaagatgcccgagatgtatgtgacgaaaaagaatttataaaatttatacatacacatattaaagaagctactaacggcggaaaaatcaaaccatatattacaatttttagtcctgaagatacacctaaaatttataataatcagttgattcgttatgctggttatgaaaatgttggcgatccatctgaaaaaaaggttactcgtttagctgaacatctaggttggaaaggtaaaggttcaaattttgatattttacctctgatttatcaattgcctaacgacactataaaaatacacgaacttccaaatgatattgtaaaagaagtttctatacatcatgaacactatcccaagctttcaaaattaggtttaaaatggtatgcggtacctattatttcaaatatggatttaaaaatcggtggtattacttaccctacagcaccttttaatggatggtatatggtaaccgaaattgctgtacgtaatttcacagacacctatcgtcttatgtaa

SEQ ID NO: 3066 - protein, 243 aa, Artificial Sequence
  Description of Artificial Sequence: synthetic amino acid sequence
MLIDKARSFIQTMYSELKYNTNEIENRMKEIEQEINLTGSYTHTYEELSYGAKMAWRNSNRCIGRLFWNSLNVKDARDVCDEKEFIKFIHTHIKEATNGGKIKPYITIFSPEDTPKIYNNQLIRYAGYENVGDPSEKKVTRLAEHLGWKGKGSNFDILPLIYQLPNDTIKIHELPNDIVKEVSIHHEHYPKLSKLGLKWYAVPIISNMDLKIGGITYPTAPFNGWYMVTEIAVRNFTDTYRLM

SEQ ID NO: 3067 - DNA, 1470 bp, Artificial Sequence
  Description of Artificial Sequence: synthetic nucleic acid sequence
gtgtaccaatataacgacgatagcttaatgttacacaatgatttatatcaaattaatatggctgaaagctactggaatgatggtatccatgaaagaatagcagtgtttgatttgtattttcgaaaaatgccatttaatagtggatatgcggtattcaacggattgaaacgcgttgtgaatttcatcgaaaactttgggtttacaaatgaagatatcacatatttaaaatcgataggttatgaagaagattttctaaattacctaaaagatttgaaatttacagggaatattaaatctatgcaagaaggtgaaatttgttttggtaatgagccattattaagagttgaagcacctttaatccaagcgcaacttattgaaactattttgttaaatatcattaatttccaaacattaattgcaactaaagccagccgaattcgtcaaatagcaactcatgacactttgatggaatttggtacaagaagagctcaagagatcgatgctgcactgtggggcgctagagcagcctttattggagggtttgattctacaagtaatgttagagcaggaaaactttttaatatacctgtatctggcacacatgcacacgcactagtacaaacatatggtgatgagtatatagcattcaaaaagtatgctgagcgacataaaaattgtgtgttcttagttgatacttttcatactttaaaatcaggagtaccaaccgcaattaaggttgcaaaagagttaggagatactattaattttataggtatcagattagattctggtgatattgcgtacctatctaaagaagctcgtagaatgttagatgaggctggttttacagaagctaaaattatcgcatcaaatgatttggatgagcagactattacaagtttaaaagcacaaggcgctaaagttgacggatggggagtaggtacaaaactgattacaggatatgatcaaccagccttaggtgcagtttataaattggtttctattgaaacagatgatggcacaatgagtgatcgcattaaattatcaaataatgctgagaaagttactacaccaggcaaaaaaaatgtttatcgtattattaataataaaacaggcaaggctgagggcgactatattacgctagaaggtgaaaatcctaatgacgaatctccattgaaaatgttccatcctgttcacacttacaaaatgaagtttattaaatcatttaaagcggttaatctacatcaatctatatttgaaaatggcaaacttgtataccatcttccagatgaatatgaagctcaggactatcttaaaaataatttaagtattttatgggaagaaaataaacgatatcttaacccgcaagattatccagtagatttaagcactaaatgttgggaaaataagcataagcgtatttttgaagttgctgaacacgttaaagagatggaggatgaaaatgagtag

SEQ ID NO: 3068 - protein, 489 aa, Artificial Sequence
  Description of Artificial Sequence: synthetic amino acid sequence
VYQYNDDSLMLHNDLYQINMAESYWNDGIHERIAVFDLYFRKMPFNSGYAVFNGLKRVVNFIENFGFTNEDITYLKSIGYEEDFLNYLKDLKFTGNIKSMQEGEICFGNEPLLRVEAPLIQAQLIETILLNIINFQTLIATKASRIRQIATHDTLMEFGTRRAQEIDAALWGARAAFIGGFDSTSNVRAGKLFNIPVSGTHAHALVQTYGDEYIAFKKYAERHKNCVFLVDTFHTLKSGVPTAIKVAKELGDTINFIGIRLDSGDIAYLSKEARRMLDEAGFTEAKIIASNDLDEQTITSLKAQGAKVDGWGVGTKLITGYDQPALGAVYKLVSIETDDGTMSDRIKLSNNAEKVTTPGKKNVYRIINNKTGKAEGDYITLEGENPNDESPLKMFHPVHTYKMKFIKSFKAVNLHQSIFENGKLVYHLPDEYEAQDYLKNNLSILWEENKRYLNPQDYPVDLSTKCWENKHKRIFEVAEHVKEMEDENE

SEQ ID NO: 3069 - DNA, 591 bp, Artificial Sequence
  Description of Artificial Sequence: synthetic nucleic acid sequence
gtgaaattaccttatggtgtgcaacaagacgctcatgaagtagaagatgcacttgagtttattaatcctgacacaacatatacagttaatattaaaccagcagttgatcagagtgttcaatcacttagtgaagcaggcatcaaacttactgattttcaaaagggtaatgaaaaagcacgtgaacgaatgaaagttcaattttcaattgcttctaatactcaaggtatagttttaggaactgatcactctgccgaaaatattacaggattttacactaaatatggagatggtgctgcggacattgcgcctatctttgggttaaataaaagacaaggtaaacaattactagcttatctaggagcacctaaacacctttatgaaaaagtgccaacagctgatttagaagatgataaacctcagttaccagacgaggaagcactaggcgtatcttatcatgatattgatgattatttagaaggtaaagaaattcctgcaactgctcgtgaaacaatcgaaaaacattatgttagaaatgcacataagcgtgaacttgcttatacacgatattcatggcctaaatataacaaatga

SEQ ID NO: 3070 - protein, 196 aa, Artificial Sequence
  Description of Artificial Sequence: synthetic amino acid sequence
VKLPYGVQQDAHEVEDALEFINPDTTYTVNIKPAVDQSVQSLSEAGIKLTDFQKGNEKARERMKVQFSIASNTQGIVLGTDHSAENITGFYTKYGDGAADIAPIFGLNKRQGKQLLAYLGAPKHLYEKVPTADLEDDKPQLPDEEALGVSYHDIDDYLEGKEIPATARETIEKHYVRNAHKRELAYTRYSWPKYNK

SEQ ID NO: 3071 - DNA, 560 bp, Artificial Sequence
  Description of Artificial Sequence: synthetic nucleic acid sequence
atggttaaaattttaccatcacttttatctatagattttttaaatttaaaagaagagcttcaattgttagaaacagcaaaggtagacggattacactttgatgtaatggacggtaaatttgtccctaatatttcaatcggtattccgattttggatgctgttagacaacaatctcatttgccaatagatgttcatttaatgattgagcaacctgaaaattatattaatctttttgccgaacatggtgctgatatgatttctgttcatgttgagtcgacaacacatatacatagagcaattgaacaaattaaacaattagggaaaaaagcaggtgtcgtcatcaatcctggaacatctgtagaaacaattttacctatattgagtattgttgattatgttctagtaatgactgtaaatcctggttttggtggacaaacattcatagaacaatgcgtgactaagattgagcaattaaatcaacttaaacatgaaaatcatttaacttttgatattgaggtagatggaggcattaacgatcaaacgagtaaacgatgtgtaga

SEQ ID NO: 3072 - protein, 187 aa, Artificial Sequence
  Description of Artificial Sequence: synthetic amino acid sequence
  MOD_RES (187): variable amino acid
MVKILPSLLSIDFLNLKEELQLLETAKVDGLHFDVMDGKFVPNISIGIPILDAVRQQSHLPIDVHLMIEQPENYINLFAEHGADMISVHVESTTHIHRAIEQIKQLGKKAGVVINPGTSVETILPILSIVDYVLVMTVNPGFGGQTFIEQCVTKIEQLNQLKHENHLTFDIEVDGGINDQTSKRCVX

SEQ ID NO: 3073 - DNA, 345 bp, Artificial Sequence; identical to SEQ ID NO: 2795
  Description of Artificial Sequence: synthetic nucleic acid sequence

SEQ ID NO: 3074 - protein, 114 aa, Artificial Sequence; identical to SEQ ID NO: 2796
  Description of Artificial Sequence: synthetic amino acid sequence

SEQ ID NO: 3075 - DNA, 1095 bp, Artificial Sequence
  Description of Artificial Sequence: synthetic nucleic acid sequence
atgataactgcagaaaaaaagaagaaaaacaaattcttacctaatttcgaaaaacaatcgatctactccttaagatatgacgagatgcaacaatggcttattgatcacggacaacaaaaattcagagcaaaacaaatttttgaatggttataccaaaagcgtgtgaatactattgatgaaatgactaacctgtctaaagagttacgtcaaattctcaaagatcattttgcaatgacgacattgaccactgttgttaaacaagaaagtaaagatggaacaattaagttcttatttgaattacaagatggttatactattgaaactgttttaatgagacatgaatatggaaattctgtctgtgtaacaacacaagtaggatgtagaattggttgtacgttttgtgcttccactttgggcggattaaagcgtaatttagaggccggagagattgtctctcaagtattaactgtacaaaaggcactagacgaaacgaatgaacgtgtatcacaaattgtcattatgggcataggtgaacctttcgagaattatgatgaaatgatggatttcttaagaattgttaatgatgataacagtttaaatattggtgcacgtcatattactgtatctacttcaggaattattccaagaatttatgattttgccgaagaagatatacaaataaattttgctgtgagtcttcatggtgctaaagacgaaataagatcaagattaatgcctatcaatcgtgcttataacgttgataagttaatggaagctattcgttattatcaagaaaagacaaatcgccgtgttacttttgaatatggattgtttggtggtgttaatgaccaacttgaacatgcgagagatttggcacatttaattaagaatctcaattgccacgttaatttaataccagttaaccatgtcccagaaagaaattatgtaaagacaccaaaagatgatatttttaaattcgagaaggaattaaagagattaggaattaatgctacaattagacgtgagcaagggtcagatattgatgctgcgtgtggacaattaagagcgaaggaacgacaagtagaaacgaggtaa

SEQ ID NO: 3076 - protein, 364 aa, Artificial Sequence
  Description of Artificial Sequence: synthetic amino acid sequence
MITAEKKKKNKFLPNFEKQSIYSLRYDEMQQWLIDHGQQKFRAKQIFEWLYQKRVNTIDEMTNLSKELRQILKDHFAMTTLTTVVKQESKDGTIKFLFELQDGYTIETVLMRHEYGNSVCVTTQVGCRIGCTFCASTLGGLKRNLEAGEIVSQVLTVQKALDETNERVSQIVIMGIGEPFENYDEMMDFLRIVNDDNSLNIGARHITVSTSGIIPRIYDFAEEDIQINFAVSLHGAKDEIRSRLMPINRAYNVDKLMEAIRYYQEKTNRRVTFEYGLFGGVNDQLEHARDLAHLIKNLNCHVNLIPVNHVPERNYVKTPKDDIFKFEKELKRLGINATIRREQGSDIDAACGQLRAKERQVETR

SEQ ID NO: 3077 - DNA, 672 bp, Artificial Sequence
  Description of Artificial Sequence: synthetic nucleic acid sequence
atggttaaaattttaccatcacttttatctatagattttttaaatttaaaagaagagcttcaattgttagaaacagcaaaggtagacggattacactttgatgtaatggacggtaaatttgtccctaatatttcaatcggtattccgattttggatgctgttagacaacaatctcatttgccaatagatgttcatttaatgattgagcaacctgaaaattatattaatctttttgccgaacatggtgctgatatgatttctgttcatgttgagtcgacaacacatatacatagagcaattgaacaaattaaacaattagggaaaaaagcaggtgtcgtcatcaatcctggaacatctgtagaaacaattttacctatattgagtattgttgattatgttctagtaatgactgtaaatcctggttttggtggacaaacattcatagaacaatgcgtgactaagattgagcaattaaatcaacttaaacatgaaaatcatttaacttttgatattgaggtagatggaggcattaacgatcaaacgagtaaacgatgtgtagaacagggtgctacaatgttagtcactggttcatacttctttaaacaagaggattatgcaaaagtaactagaaactttatgtcatattacagttttatcatatatcatttatag

SEQ ID NO: 3078 - protein, 223 aa, Artificial Sequence
  Description of Artificial Sequence: synthetic amino acid sequence
MVKILPSLLSIDFLNLKEELQLLETAKVDGLHFDVMDGKFVPNISIGIPILDAVRQQSHLPIDVHLMIEQPENYINLFAEHGADMISVHVESTTHIHRAIEQIKQLGKKAGVVINPGTSVETILPILSIVDYVLVMTVNPGFGGQTFIEQCVTKIEQLNQLKHENHLTFDIEVDGGINDQTSKRCVEQGATMLVTGSYFFKQEDYAKVTRNFMSYYSFIIYHL

SEQ ID NO: 3079 - DNA, 936 bp, Artificial Sequence
  Description of Artificial Sequence: synthetic nucleic acid sequence
atgcacttatctaaaatattaaaacaaggtaaaatcaaagctggagaaccaatggctaaaacaggtaattcaggtcaatggactactggtccacacgtacacttccaagttgaaagaggtcgccatgatgacatcacaaacagagggacagtaaaccctgctaaatggctcaaaggtcacggtggtggaaaagttggtggtagtggttctgtaaacgcacgtagagcaattcaaagagcacaatctattttaggtggacgttataaatcgtcttatattaccgaacaaatgatgagagttgccaaacgtgagtctaacttccaatcagatgcggttaataactgggacatcaacgcacaaaaaggaacgccttctaaaggtatgttccaaatgattgaaccatcttttagagcatatgctaaaccaggacacggaaacatcttaaatccaactgacgaagctatatctgctatgcgttacattgtaggtaagtgggttcctattatggggagttggagaagtgcatttaaacgtgctggagattatgcttatgctacaggcggggttattaacactgctggattatataatttggcagaagatggataccctgagatagtaatccctacagatccaagcagacaatcagatgcgatgaaattgttacatcttgctgcaagtaaaattagtggaaataacagaaataaacgacctaaccaattacgtacacctaatgttactagtaatacagttgataatgcagaattactactacaaatgatagaaaatcaacagaaacaaataaacgtgttaatggaaatagcacgaagtaataaaactattgaaaaacaaccgaaaggtttttcagaacgcgatgtaagtcaggcacaaggttcaaggttaagactcgctgcttatagccagggaggtttataa

SEQ ID NO: 3080 - protein, 311 aa, Artificial Sequence
  Description of Artificial Sequence: synthetic amino acid sequence
MHLSKILKQGKIKAGEPMAKTGNSGQWTTGPHVHFQVERGRHDDITNRGTVNPAKWLKGHGGGKVGGSGSVNARRAIQRAQSILGGRYKSSYITEQMMRVAKRESNFQSDAVNNWDINAQKGTPSKGMFQMIEPSFRAYAKPGHGNILNPTDEAISAMRYIVGKWVPIMGSWRSAFKRAGDYAYATGGVINTAGLYNLAEDGYPEIVIPTDPSRQSDAMKLLHLAASKISGNNRNKRPNQLRTPNVTSNTVDNAELLLQMIENQQKQINVLMEIARSNKTIEKQPKGFSERDVSQAQGSRLRLAAYSQGGL

SEQ ID NO: 3081 - DNA, 2175 bp, Artificial Sequence
  Description of Artificial Sequence: synthetic nucleic acid sequence
gtgagagaattcatacaattgaactattcattatatgaaggtgacgatgaatttttagaaggtcctacaaaagcaactgaaactttatgggatcaagtaatgcaattatcaaaagaagaacgtgagcgcggtggcatgtgggacatggatactaaagtggcatcgacaatcacttctcatgacgctggttacttagacaaagatttagaaaaagttgttggtgttcaaactgaaaaaccattcaaacgttctatgcaaccattcggtggtattcgtatggcaaaagcagcatgtgaagcgtatggttacgaattagatccagaaacagaaaaaatcttcactgaatatcgtaaaacacacaaccaaggtgtattcgatgcatattcaagagaaatgttaaactgtcgtaaagctggtattattactggtttgccagatgcttacggacgtggacgtattatcggagactatcgtcgtgttgctttatacggtgtagatttcttaatggaacaaaaacttaaagactttaacacaatgtctactgaaatgtctgaagatgtaattcgtttacgtgaagaattatcagagcaatatcgttcacttcaagatttaaaagaattaggtcaaaaatatggatttgatattagccgtcctgctactaacttcaaagaagctgtgcaatggttatacttagcatatttagctgctatcaaagaacaaaatggtgcagcaatgagtttaggacgtacttcaacattcttagatatttatgctgaacgtgatttacaaaatggtgacatcactgaacaagaagttcaagaaatcattgaccacttcattatgaaattgcgtatcgttaaattcgcgcgtacgcctgaatataatgaattattctctggagatccaacttgggtaactgaatctatcggtggtgtaggtattgacggacgtccaatggtaactaaaaactcattccgtttcttacactcattagataatttaggtccagcaccagaaccaaacttaacagtgttatggtctactcgcttacctgaaaacttcaaaatctattgtgctaaaatgagtattaaaacgagctcaatccaatatgaaaatgatgacttaatgcgtgaaagctatggcgatgattatggtatcgcttgctgtgtatctgccatgaagattggtaaacaaatgcaattcttcggtgcacgtgctaacttagctaaagcattactttacgctatcaatggtggtaaagatgaaaaatctggtaaacaagttgggccaagttatgaaggtattaaatcagacgtactagattatgatgaagtcttcgaaagatatgaaaaaatgatggactggttagctggcgtatatatcaactcattaaatatcattcactatatgcatgataaatatagctatgaacgtcttgaaatggctttacatgatacagaaattattcgcacaatggcaactggtattgccggattgtctgtagcagctgactctttatcagcgattaaatatgcacaagttaaacctatccgtaacgaagaaggtcttgtaactgactttaaaatcgaaggcgacttccctaaatatggtaataatgacagtcgtgttgatgaaattgcagtagatttagttgaacgtttcatgactaaattacgtagccataaaacataccgtaattctgaacacacaatgagtgtattaacaattacttcaaacgttgtttatggtaagaaaactggtaacacaccagatggacgtaaagctggcgaaccatttgcacctggcgcaaacccaatgcatggtcgtgaccaaaaaggtgcattatcttcactaagttcagtagctaaaataccttacgattgctgtaaagatggtatctcaaatacatttagtatcgtaccgaaatcactaggtaaagaagaagcagatcaaaataaaaacttaactagtatgttagatggttatgcaatgcaacatggtcatcacctcaacattaacgtatttaatagagaaacattaattgatgcaatggaacatccagaagagtatccacaattaacgattcgtgtatctggatacgctgtaaacttcattaaattaacacgtgaacaacaattagatgttatttcacgtacattccacgaatctatgtaa

SEQ ID NO: 3082 - protein, 724 aa, Artificial Sequence
  Description of Artificial Sequence: synthetic amino acid sequence
VREFIQLNYSLYEGDDEFLEGPTKATETLWDQVMQLSKEERERGGMWDMDTKVASTITSHDAGYLDKDLEKVVGVQTEKPFKRSMQPFGGIRMAKAACEAYGYELDPETEKIFTEYRKTHNQGVFDAYSREMLNCRKAGIITGLPDAYGRGRIIGDYRRVALYGVDFLMEQKLKDFNTMSTEMSEDVIRLREELSEQYRSLQDLKELGQKYGFDISRPATNFKEAVQWLYLAYLAAIKEQNGAAMSLGRTSTFLDIYAERDLQNGDITEQEVQEIIDHFIMKLRIVKFARTPEYNELFSGDPTWVTESIGGVGIDGRPMVTKNSFRFLHSLDNLGPAPEPNLTVLWSTRLPENFKIYCAKMSIKTSSIQYENDDLMRESYGDDYGIACCVSAMKIGKQMQFFGARANLAKALLYAINGGKDEKSGKQVGPSYEGIKSDVLDYDEVFERYEKMMDWLAGVYINSLNIIHYMHDKYSYERLEMALHDTEIIRTMATGIAGLSVAADSLSAIKYAQVKPIRNEEGLVTDFKIEGDFPKYGNNDSRVDEIAVDLVERFMTKLRSHKTYRNSEHTMSVLTITSNVVYGKKTGNTPDGRKAGEPFAPGANPMHGRDQKGALSSLSSVAKIPYDCCKDGISNTFSIVPKSLGKEEADQNKNLTSMLDGYAMQHGHHLNINVFNRETLIDAMEHPEEYPQLTIRVSGYAVNFIKLTREQQLDVISRTFHESM

SEQ ID NO: 3083 - DNA, 426 bp, Artificial Sequence; identical to SEQ ID NO: 2885
  Description of Artificial Sequence: synthetic nucleic acid sequence

SEQ ID NO: 3084 - protein, 141 aa, Artificial Sequence; identical to SEQ ID NO: 2886
  Description of Artificial Sequence: synthetic amino acid sequence

SEQ ID NO: 3085 - DNA, 396 bp, Artificial Sequence
  Description of Artificial Sequence: synthetic nucleic acid sequence
gtgaaagaaatgatatataactataagtggatgaccaatattataacatcacaaatttacgatgcagacagtacatctattgcacaatatggtatagaatctgttatgcctaaggctaaaggacaagcaggcgataaagtgtttttgaaggttatgaatagaaataaagcgtggagacgtaatttaaaactcatagagaagattgagtttattgacaagtatgaggagtacataactaacgagatgaactttcatatattgcagatgattaagttaggtacgaaacttaaaactgttatggacttaatggaaataaaaagtaaatcaacattctatggttgtttaaatgaaatagtaaacgtatatatggatgcacagaaaggatattacgattag

SEQ ID NO: 3086 - protein, 131 aa, Artificial Sequence
  Description of Artificial Sequence: synthetic amino acid sequence
VKEMIYNYKWMTNIITSQIYDADSTSIAQYGIESVMPKAKGQAGDKVFLKVMNRNKAWRRNLKLIEKIEFIDKYEEYITNEMNFHILQMIKLGTKLKTVMDLMEIKSKSTFYGCLNEIVNVYMDAQKGYYD

SEQ ID NO: 3087 - DNA, 468 bp, Artificial Sequence
  Description of Artificial Sequence: synthetic nucleic acid sequence
atgccgccaagaaaattattatctcaacaaaaaggtaatttaacagtcgaacaacaagaaaataaagaaaatgcagaaaaagcgatggcgcaactcactgagatagatgaaaaacctcctgaatggcttgataaagatgcaataaaagaatggcatcgcatattacctttgattcaagaactaccaatagcagctttagatatggggttattagccacctattgtcaaacatatagcaattacaagaacgccacgatccaattagaaaaagagggtatgatcgtcgaaaccgaaagaggaacgaaattatctagttattacacagtacaaagagatagcgtaaatgctatgaactccatttgtcctaaattaggattgacagttgagtcacgtttaaaaatattgtcgccagatacaaagaaagaaaagaaagatgaatttgaggacttaatgaatggcaaagattag

SEQ ID NO: 3088 - protein, 155 aa, Artificial Sequence
  Description of Artificial Sequence: synthetic amino acid sequence
MPPRKLLSQQKGNLTVEQQENKENAEKAMAQLTEIDEKPPEWLDKDAIKEWHRILPLIQELPIAALDMGLLATYCQTYSNYKNATIQLEKEGMIVETERGTKLSSYYTVQRDSVNAMNSICPKLGLTVESRLKILSPDTKKEKKDEFEDLMNGKD

SEQ ID NO: 3089 - DNA, 1575 bp, Artificial Sequence
  Description of Artificial Sequence: synthetic nucleic acid sequence
gtgaaagcctgtcaacgccatttagatgacttgaacgattcggaactcccttatcattttgatgtaaagaaagctaatcacattattaagtttcttgaaatgttgccagatcctaaaactggtaaacaattatcgttaggcggttttcaaaaattcattgctggtagcttaaatggttggtacgacagacatgggtacaaaagatttacaaaagcctatatatcaatgagcagaaaaaatggtaaaacattattgatctctggaatggcattgtacgatttattgatgggtaaagatccgttgaatgaacggttgattggtttgagcgccaattcaagagaccaagctggtatagcatacgatatgacattggcacaactgaaagctattagaagcgtttctcctaaggttaaatcgatgactaagataacgccaagtgcaaaagaaatattgaatattaatgatcgaagtaaagttaaagccgtttcaaatgaagctgcaaatttagaaggtcatcagtttagctacgcaatcatcgatgaatatcatgaagctaaagataaaaagatttatgaaacgttaagacgtgggcaagtgctactgcacaaccctatattaattattatctcaacagctggaactaatttgaatggtccgatgtatgaagaatatttatatattgataagatacttgacggcatagcaaaaaatgaaaactactttgttttctgtgctgaacaagatgatgagaaagaagtatatgacgttaaaacttggattaaatccaatccacttatggagttgccagaaatggcacaattgttaactaagaatattcaaccagaagttaaaactgcaattgatagtggttcaggattaaatgggatattaataaagaatttcaatatgtggcgtgcagcaagcacagaatcttatttagatttcaatgattggaagaaaaatgaaatagactttgatataaatggctctaaaacttatatcggtttagacttatcgcgtgctgacgacttaaccgcagtatcgtttgttcatcttgatgaagataatcaagagtattatgtaactagtcattcgtttgtggctactaaaggtggattagatggcaagattgatagagactttattgattacagacaacttgcagaaagtggttattgtacgattaccgatttacaaagtggaattatcaatactgaccaagttttaaattacattgagaattatatcgaccaatataaattagacgtacaagcgttatgttatgatccttactcaatacatggtgttattgcagaaattgagcgtagagattggccttatgatttagtagaaatcagacaagggccacaaacactatctaatccgatactggattttagactgaaagtgattaatggggacatcaagcatcataaaaatccgttactagacattgcagtcaaaaatgctgtggcaaaagataccaatgactcattaatgattgaaaagaagatgaaccgagaaaaaatagatccactcatggctaccatatttgcttatgttataaatagctga

SEQ ID NO: 3090 - protein, 524 aa, Artificial Sequence
  Description of Artificial Sequence: synthetic amino acid sequence
VKACQRHLDDLNDSELPYHFDVKKANHIIKFLEMLPDPKTGKQLSLGGFQKFIAGSLNGWYDRHGYKRFTKAYISMSRKNGKTLLISGMALYDLLMGKDPLNERLIGLSANSRDQAGIAYDMTLAQLKAIRSVSPKVKSMTKITPSAKEILNINDRSKVKAVSNEAANLEGHQFSYAIIDEYHEAKDKKIYETLRRGQVLLHNPILIIISTAGTNLNGPMYEEYLYIDKILDGIAKNENYFVFCAEQDDEKEVYDVKTWIKSNPLMELPEMAQLLTKNIQPEVKTAIDSGSGLNGILIKNFNMWRAASTESYLDFNDWKKNEIDFDINGSKTYIGLDLSRADDLTAVSFVHLDEDNQEYYVTSHSFVATKGGLDGKIDRDFIDYRQLAESGYCTITDLQSGIINTDQVLNYIENYIDQYKLDVQALCYDPYSIHGVIAEIERRDWPYDLVEIRQGPQTLSNPILDFRLKVINGDIKHHKNPLLDIAVKNAVAKDTNDSLMIEKKMNREKIDPLMATIFAYVINS

SEQ ID NO: 3091 - DNA, 1359 bp, Artificial Sequence
  Description of Artificial Sequence: synthetic nucleic acid sequence
gtgagtcaacccggcgaagaaagttcaaatgtttggaataatgcgggaacaggtcattcagcattgtgtgaattgaactatacgaaagaaggtaaagatggttcagtagatattactaaagcaattcatattaacgagcaatttcaaatatctaaacagttttgggcttatttaatacgtgaaggtcatattgaaagtccagataaatttattcaatcagtgccacatatgagctttgttaaaggggaagaaaatgttaaatttttaaaaagtcgagtggcgagtttacagaaaaatgtattatttgaaaaaatgaaaatttctcaagatccagaaaaaattaactcatgggttcctttaatgatggaaggacgccaatcagatgaagcaattgccattacgtatgacgagacaggtacagatgttaactttggtgctttgactaaaaagttaatagctaatttacaacaaaaaaatgttggcattaattataaacatgaagttttagatataaaaaaattaaataatggtaactggcaagttgtggttaaagatttaaatacatcaaatgtaatgaattatgaatctaagttcgtcttcatcggagctggtggtgcaagtttacctttattacaaaaaacaaagattaaggaatctaaacacattggtggtttcccagtaagtggattatttttacgatgtaaaaatccagatgtcatacatagacatcatgcaaaagtctacggtaaagccgaggttggtgcacctccaatgtcagttccacatttagatacacgatttgttaatggtgaaaaatcattactatttggaccttttgcagggttttcgccaaaattcttaaaaaacggttcatatttagatttagttaaatctgtgaaacccaataatatgataacaatgttaagtgctggcgtaaaagaatttaatttgacgaaatatttagtttctcaattaatgctttcaaatgaagaacggatcaatgatttgcgtgtattcttaccagaagcgaaagatgaagattgggaagtaattactgcaggtcaacgtgttcaagtaattaaagatacagataagtctaaaggtcaattacaatttggtacggaagtaataacatcagaagatggttcacttgctgcattattaggtgcttcacctggtgcttcgactgctgttgatatcatgtttgatgtcttgcaacgttgttacaaatcagagtttaagtcatgggaaccaaaaattaaagaaatggtcccatcatttggtttaaaattgtcagagcatgaagatatgtaccattcaataaacgaagaagtaaaaaaatacttgaatgtaaagtag

SEQ ID NO: 3092 - protein, 452 aa, Artificial Sequence
  Description of Artificial Sequence: synthetic amino acid sequence
VSQPGEESSNVWNNAGTGHSALCELNYTKEGKDGSVDITKAIHINEQFQISKQFWAYLIREGHIESPDKFIQSVPHMSFVKGEENVKFLKSRVASLQKNVLFEKMKISQDPEKINSWVPLMMEGRQSDEAIAITYDETGTDVNFGALTKKLIANLQQKNVGINYKHEVLDIKKLNNGNWQVVVKDLNTSNVMNYESKFVFIGAGGASLPLLQKTKIKESKHIGGFPVSGLFLRCKNPDVIHRHHAKVYGKAEVGAPPMSVPHLDTRFVNGEKSLLFGPFAGFSPKFLKNGSYLDLVKSVKPNNMITMLSAGVKEFNLTKYLVSQLMLSNEERINDLRVFLPEAKDEDWEVITAGQRVQVIKDTDKSKGQLQFGTEVITSEDGSLAALLGASPGASTAVDIMFDVLQRCYKSEFKSWEPKIKEMVPSFGLKLSEHEDMYHSINEEVKKYLNVK

SEQ ID NO: 3093 - DNA, 312 bp, Artificial Sequence
  Description of Artificial Sequence: synthetic nucleic acid sequence
atgttaaaaaataacgacatgtctgatggttatttaaaaattaaagtaaatggtggaggatgcacaggattaacttatggtatgtcagccgaagcagaacctggtgaaaatgatgaaattctcgaatactatggtttgaaagttctagtagaccgaaatgatgctcctgtattaaatggaacaacaattgattttaaacagtcacttatgggtggaggatttcaaataaacaatcctaatgctattgcctcatgtggttgtggaagttcatttaaaacagctaaagtcgctggaaatccagagcaatgttaa

SEQ ID NO: 3094 - protein, 103 aa, Artificial Sequence
  Description of Artificial Sequence: synthetic amino acid sequence
MLKNNDMSDGYLKIKVNGGGCTGLTYGMSAEAEPGENDEILEYYGLKVLVDRNDAPVLNGTTIDFKQSLMGGGFQINNPNAIASCGCGSSFKTAKVAGNPEQC

SEQ ID NO: 3095 - DNA, 1125 bp, Artificial Sequence
  Description of Artificial Sequence: synthetic nucleic acid sequence
atggctcaagatcgtaagaaagtgctcgtattaggtgcaggttatgctggtttacaaactgtaactaaattacaaaaagaactttctgctgatgcagcggaaattactttaattaataagaatgaatatcattatgaatcaacttggttgcatgaagcttctgccggtacgattaattatgaagatttattgtatcctgttgagaaaactgtcaacaaaaataaagtgaattttgttgttgctgaggtaacaaaaattgatcgtaatgctaaacgtgtagaaactgataagggtgtttatgactttgatatcttagttgttgcactaggttttgttagcgaaacatttggtattgatggtatgaaagaacatgctttccaaattgagaacgttttaacttctcgtaagttgtctcgtcacattgaagataagttcgcaaattatgctgcttctaaagaaaaagatgataaagatttatctattttagttgggggagctggatttacaggaattgaatttctaggtgaattaactgatagaattcctgaattatgcagtaaatatggtgttgatcaaagtaaagtgaagttaacatgtgttgaagcagcacctaaaatgttaccgatgttctcagacgacttagttagttatgcagtaaaatatttagaagaccgtggagtagaattcaaaattgcaacacctattgtcgcttgtaatgaaaaaggtttcgttgttgaagtcaatggagaaaaacaacaattagaagccggaacttctgtatggactgctggagtgcgtggaagtcatttaatggaagaatcatttgaaggtgttaaacgtggacgtattatcaataaacaagatttaacaattgaaggtcataatgacatctttgttataggagattgttcagcgtttattccagctggtgaagagcgtccattaccaacaacagctcaaattgctatgcaacaaggtgagcatactgctagcaacattaaacgtttattaaatggtgaatcaacacaagatttccaatatgttaacctaacgatcaagatgcagttgaaaggaaagagaaagaaactgagtttcaaaaacaacaagatgaagaaattgctttaa

SEQ ID NO: 3096 - protein, 374 aa, Artificial Sequence
  Description of Artificial Sequence: synthetic amino acid sequence
MAQDRKKVLVLGAGYAGLQTVTKLQKELSADAAEITLINKNEYHYESTWLHEASAGTINYEDLLYPVEKTVNKNKVNFVVAEVTKIDRNAKRVETDKGVYDFDILVVALGFVSETFGIDGMKEHAFQIENVLTSRKLSRHIEDKFANYAASKEKDDKDLSILVGGAGFTGIEFLGELTDRIPELCSKYGVDQSKVKLTCVEAAPKMLPMFSDDLVSYAVKYLEDRGVEFKIATPIVACNEKGFVVEVNGEKQQLEAGTSVWTAGVRGSHLMEESFEGVKRGRIINKQDLTIEGHNDIFVIGDCSAFIPAGEERPLPTTAQIAMQQGEHTASNIKRLLNGESTQDFQYVNLTIKMQLKGKRKKLSFKNNKMKKLL

SEQ ID NO: 3097 - DNA, 1065 bp, Artificial Sequence
  Description of Artificial Sequence: synthetic nucleic acid sequence
atgaaaaacttagtattactaggcgggggctatggtaatatgcgaattatgtcgcgcattttacctcattcaattcctgagggatatcacttaactttaatcgaccgcatgccattccacggtttaaaacctgaattttatgcacttgcagcaggaactaaatctgacaaagaggtgcgaatccaatttccagatagcagtcaaattaatacggtttatggggaaatcagtgatatagatttggacgaacaaatgataacagttggaaattcaaaaatagattatgacgaacttatcattggtctagggtgtgaggataaatatcataatgtccctggtgctgaagcatatacacatagcattcaaacattatctaaatcgcgtgaaacataccatagaattagcgagttacctaaaggggcacgtgtaggtatcgttggggcaggtttaagtggcattgaattagcgagcgagctacgtgaaagtcgatcagacttggaaattttgttatatgatagagggcctcgaattttaaggaattttccagagaaactgagtaaatacatatctaattggttttctaaacacaatgttactgtagtacctaattcagtcatcgacagagtagaacccggaaaaatttataataatggtaaaccagaaaatattgatttagtcgtttggacagcaggcatacaacctgttgaaattgtgcgtaatcttcctattgatatgagtaccactggacgcgtaattattaatcagtaccatcaagtcccaacctatagaaatgtttatgtcgtaggtgactgtgctaatttaccacatgcacccagtgctcaactagcagaactacaaggtgaacagattgctgaggtgttgaagaagcaatggaataacgaaccacttccagataaaatgcctgaaattaaagtacaaggctttttaggctctttaggtgacaaacaaggttttgcttatatcatggatcgaacagttaccggacgattagcctctattctaaaatcaggtgttctgtggcgctataaatatcataatggttaa

SEQ ID NO: 3098 - protein, 354 aa, Artificial Sequence
  Description of Artificial Sequence: synthetic amino acid sequence
MKNLVLLGGGYGNMRIMSRILPHSIPEGYHLTLIDRMPFHGLKPEFYALAAGTKSDKEVRIQFPDSSQINTVYGEISDIDLDEQMITVGNSKIDYDELIIGLGCEDKYHNVPGAEAYTHSIQTLSKSRETYHRISELPKGARVGIVGAGLSGIELASELRESRSDLEILLYDRGPRILRNFPEKLSKYISNWFSKHNVTVVPNSVIDRVEPGKIYNNGKPENIDLVVWTAGIQPVEIVRNLPIDMSTTGRVIINQYHQVPTYRNVYVVGDCANLPHAPSAQLAELQGEQIAEVLKKQWNNEPLPDKMPEIKVQGFLGSLGDKQGFAYIMDRTVTGRLASILKSGVLWRYKYHNG

SEQ ID NO: 3099 - DNA, 537 bp, Artificial Sequence
  Description of Artificial Sequence: synthetic nucleic acid sequence
atgagtcgtgttggtaagaaaattattgacattcctagtgacgtaacagtaacttttgacggaagtcatgtcactgtaaaaggtccaaaaggtgaattagaaagaactttaaatgaaagaatgacatttaaacaagaagaaaacactgttgaagttgtaagaccatctgattctaaagaagacagaacagatcatggtacaactcgtgctttattaaataatatggtactaggtgtttctcaaggttacgaaaaaacacttgagcttgttggtgtaggttaccgtgcacaaatgcaaggtaaagatttagtacttaatgttggatactctcacccagttgaaattaaagcagaagaaggcattactttcgctgttgagaaaaatacaactgttaaagtatctggtgtttctaaagaacaagttggtgcgattgcttctaacattcgttctgtaagacctccagaaccttataaaggtaaaggtattcgctaccaaggtgaatatgtacgccgtaaagaaggtaaaactggtaaataa

SEQ ID NO: 3100 - protein, 178 aa, Artificial Sequence
  Description of Artificial Sequence: synthetic amino acid sequence
MSRVGKKIIDIPSDVTVTFDGSHVTVKGPKGELERTLNERMTFKQEENTVEVVRPSDSKEDRTDHGTTRALLNNMVLGVSQGYEKTLELVGVGYRAQMQGKDLVLNVGYSHPVEIKAEEGITFAVEKNTTVKVSGVSKEQVGAIASNIRSVRPPEPYKGKGIRYQGEYVRRKEGKTGK

SEQ ID NO: 3101 - DNA, 942 bp, Artificial Sequence
  Description of Artificial Sequence: synthetic nucleic acid sequence
atgaccaaagtatattttaatcatgatggtggcgttgatgatctagtgtcactatttttattattacaaatggaaaatatagaacttgttggcgtaagtacgattggtgcagactgctatttagagccttcattaagtgcttcattaaagattataaatcgtttttcagacgttgaaattaatgtagcaccatcatatgaaagagggaaaaatccttttccaaaagaatggagaatgcatgctttctttatggatgccttaccagtgctaaatgagtcttgtatacccaaaagatgcaaggctagtgaggacgaggcgtatatagatattattcgtaaagtgaagagttgtgatgagaaagttacattgttatttactggaccgcttacagatttagctaaagctataaaatatgacaactcaattttaaaaaatatagagaaattagtttggatgggtggaacgtttttagacaaaggaaatgttgaagaaccagaacatgatggtacagctgaatggaatgcattttgggatcctgaggctgtaaaagttgtattagatagtgatatgaatgtcgatattgttgctttagaaagtacaaatcaagtccctctaacaatggaagttcgtcaaatgtgggcagataaaagacaatatttaggcgttgattttctgggcacaagttacgcagcagtaccaccactcacacattttgtgaccaattcaacatactttttatgggatgtattaactactgcttatgtgggttctccaaatttagttgaatcaacgaaattgaaaattgatgtagtcagtcaaggacctagtcaagggagaacattccaatctgaatatggacgtgaagttcaagtcattacggatgtaaataaacaagcattttttaactacataacggatttagcaaagaaaatcgagtcctaa

SEQ ID NO: 3102 - protein, 313 aa, Artificial Sequence
  Description of Artificial Sequence: synthetic amino acid sequence
MTKVYFNHDGGVDDLVSLFLLLQMENIELVGVSTIGADCYLEPSLSASLKIINRFSDVEINVAPSYERGKNPFPKEWRMHAFFMDALPVLNESCIPKRCKASEDEAYIDIIRKVKSCDEKVTLLFTGPLTDLAKAIKYDNSILKNIEKLVWMGGTFLDKGNVEEPEHDGTAEWNAFWDPEAVKVVLDSDMNVDIVALESTNQVPLTMEVRQMWADKRQYLGVDFLGTSYAAVPPLTHFVTNSTYFLWDVLTTAYVGSPNLVESTKLKIDVVSQGPSQGRTFQSEYGREVQVITDVNKQAFFNYITDLAKKIES

SEQ ID NO: 3103 - DNA, 939 bp, Artificial Sequence
  Description of Artificial Sequence: synthetic nucleic acid sequence
gtggaaagggggagtcaaaaggtgaaaacgctaatgattaaagcaatggggacggtgatacgtttatcgattgagcatcaacatccggatacattacttcaagaagctgaaataaaaattcgtgcttgggaatcacaatttagtgctaatgatccgaaatcagatttgatgaatgtgaatcagcatgcaggtatcgcaccagtcaaggttagttctgagatgtttaacatgatacgttttggttacgaaactacattatcttctaattttaagatgaacattttgatagggccactagtcaaattatggaaaattggttttaaagatgcattgaaacctaaagaagaggatatacaacgtgctttattgtgtatggatcctgaaaatcttgttctaaattcaaaaacacatgaagtatttcttacacaatcaggaatggagattgatttaggagctatagttaaaggctattttgctgatcaattacagcaatactttttagctcatggtgtatcttctggcattatcgatttaggtggtaatgttttaacaattggtagacaacccgaaacattagaaaaatggcatgtaggtgtacgtaatccatttcataaggatacactaccactcgttacattaagcgtagagcatcaatcagttgtcacatcaggtatctacgaacgctacttcatacaggaaaatcaattatttcatcatatattggattcaacaacaggttatcctgtagataatgatatcgctagcgtgacaatcatatctgatcatgggattgatggcgaggtatggagtacaatttgtagttttggtcagtcacaaaaaaatattgaattattaaatctcattgacggtattgaaggcattattgtgacaagagatggaagcgttttaatgacttcgaaaatgcaaaagtatttataa

SEQ ID NO: 3104 - protein, 312 aa, Artificial Sequence
  Description of Artificial Sequence: synthetic amino acid sequence
VERGSQKVKTLMIKAMGTVIRLSIEHQHPDTLLQEAEIKIRAWESQFSANDPKSDLMNVNQHAGIAPVKVSSEMFNMIRFGYETTLSSNFKMNILIGPLVKLWKIGFKDALKPKEEDIQRALLCMDPENLVLNSKTHEVFLTQSGMEIDLGAIVKGYFADQLQQYFLAHGVSSGIIDLGGNVLTIGRQPETLEKWHVGVRNPFHKDTLPLVTLSVEHQSVVTSGIYERYFIQENQLFHHILDSTTGYPVDNDIASVTIISDHGIDGEVWSTICSFGQSQKNIELLNLIDGIEGIIVTRDGSVLMTSKMQKYL

SEQ ID NO: 3105 - DNA, 3084 bp, Artificial Sequence
  Description of Artificial Sequence: synthetic nucleic acid sequence
atgaagagtattttatttttaagtaataatgtgaaaatattcacaaaaaaactaggaggatttgctatgagtaaggaaatattcgatacttttaaatttaaatgtggtgccgaattaaaaaatagagtattaatggcacccatgactatccaagctgggtattttgatggaagtgttacatcagaaatgattgattattatcaatttagagctggtgatgcttcagcaatcattgttgaaagttgttttgttgaaaatcacggacgaggatttccgggagctataggtattgataatgatgacaaaatacctggactcaaacgtttagcagaagcgattcaagctaagggatcaaaagcgattttgcaactttatcatgccggaagaatggcaaatcctaaatttaatgaaggagagcagccgatatctgcgagccccattgcagcattaagacctgatgctgtaccacctagagaaatgacacatgctcaaatcaatcagatgattgatgactttggagaggctacacgtcgcgctatagaagcggggtttgatggtgtcgaaattcatggcgccaacacatacttattacaacaatttttctctccacattctaatcggagacaagattcatggggaggcagtcgtgaaaaacgtacacgatttccaatcgaagttttgacaaaggttcaacacgtcgttgctgaaaaagaggcttctcattttattataggatatcgattctcacctgaagaaattgaagaaccaggcatacgttttgaagataccatgtttttactaaatacattagcagaatatgaacctgattacttccatatatcagcaaacagttatcaacgtacatctattgtgaatcaagaagatacagaacctttaattaataagtacatcaaaatgcaaagtgcacagttggcaaaaattccattaattggtgtaggtagtattgcccaacgacaagatgcagaacatgcccttgaactaggatatgatcttttaagtgttgggaaagcctatttagtggaaccacaatggacagataaaatttcacaaaacgaagaagtagaacaatttgtcgatatacatgatcagaaagtacttcacataccatcccctttatggaaagtaatggactttatgattttagataaagaagaagagcatcgtaaatatgaaaaattaaaagcacttcaaaataaaaaagttaaatttaacaaaggtacgtatcatgtctatgcaaaaggtcataatggcaacttacctatgaaagtccaattatcagaagataagattgtaagtatcgaggtagatgatagcggagagtctgaaggcatagcgaacccagtgtttgaacgtttacctcaagatattatcaatgggcaaacactgaatgtagatgtcatttcaggtgcgacagtaacaagtgaaggcatcgtgcaaggtattgcagatgcaattgaacaagcaggagaagacccagatattttacgggcgcgtcctaaaccagtcgttcagtggtctgatgaggttgttgaagagacgactgatgtcgttgtgattggtacaggaggtgccggactcagtgcagctgctacggcattagatgaaggaaaagaagtcatcatgcttgagaaatttgcagctataggtggcaatactatccgtacaggtggtcaagtcaacgctgctgagcctaaatggcaaaatgcattcccggcacttgctggtgaaaaagagacactcatacagttattaaatcatgatgaaaatgatatagatgaagcttacattgaagatttcaatactttaaaacgtcaaattaaagactatcttgaaaatagcagtaatgaagatgaatatctttttgattctgtcgaattacatcgtattcaaacatatttaggtggtaaacgtaaagatcgtaataatgtcgaaatttcaggtgattatgatttagttaaaacactcacagataacgttttggaatcagtatattggttgaaagacaaaggtgtacattttgatcgttcgtttgtagatatgcctgtgggtgctttatggcgtcgtggtcataaaccaatgaaagcacaaggtttagagtacattgaaaatttaggagactacgttaaacataatcatggtcgtatttttacagaaactactgcagaaaagttaattaaagaaggtaatcaagttgttggtattgaagcacgtaaagcaaatggtgctaaagtgaagattcatacacgtcatggtgtagtgttggctactggtggctttggagcgaatacaaaaatgctacaacaatataatacgtattgggataatattcctgatgacattaagacaacgaattctcctgcaattacaggtgatggtatacgtttaggtgtgcaggcaggcgctgacatcgtaggtatgggattctctcaaatgatgccgatttctgatccgaagacaggtgcattgtttactggattaattgtaacaccttcaaactttgtcttcgttaataaggaaggacagcgttttgttaacgaatttgaaagtagagatgtattatctaaggcagcattagaacaaaaagacggtatcttctatattattgcagatgcaaatattaaagcactagctatgaatacaactgaggataaaattaatcaagaattagaagacggcactttagtaaaagcagataccttagaagcattagcccaaaaattaaacattgatacaactacttttgtgaacacgattgaaagatataataccttcgtagaacaaggacaagatgaggatttcaataaaaatgcatttgatttaaaaattgaaaaagcaccattctacgcgacaccacgtaaacctgcaatacatcatactatgggtggtttaaaaataaacacgcatgcacaagttatagatgttgaaggtcatatcattgaaggtttatatgcggctggtgaagttgccggtggtattcatgctggtaaccgtttaggcggaaatgcactggcagatatttttacttttggtcgcattgccggtcaaagtgctgtaacgaaataa

SEQ ID NO: 3106 - protein, 1027 aa, Artificial Sequence
  Description of Artificial Sequence: synthetic amino acid sequence
MKSILFLSNNVKIFTKKLGGFAMSKEIFDTFKFKCGAELKNRVLMAPMTIQAGYFDGSVTSEMIDYYQFRAGDASAIIVESCFVENHGRGFPGAIGIDNDDKIPGLKRLAEAIQAKGSKAILQLYHAGRMANPKFNEGEQPISASPIAALRPDAVPPREMTHAQINQMIDDFGEATRRAIEAGFDGVEIHGANTYLLQQFFSPHSNRRQDSWGGSREKRTRFPIEVLTKVQHVVAEKEASHFIIGYRFSPEEIEEPGIRFEDTMFLLNTLAEYEPDYFHISANSYQRTSIVNQEDTEPLINKYIKMQSAQLAKIPLIGVGSIAQRQDAEHALELGYDLLSVGKAYLVEPQWTDKISQNEEVEQFVDIHDQKVLHIPSPLWKVMDFMILDKEEEHRKYEKLKALQNKKVKFNKGTYHVYAKGHNGNLPMKVQLSEDKIVSIEVDDSGESEGIANPVFERLPQDIINGQTLNVDVISGATVTSEGIVQGIADAIEQAGEDPDILRARPKPVVQWSDEVVEETTDVVVIGTGGAGLSAAATALDEGKEVIMLEKFAAIGGNTIRTGGQVNAAEPKWQNAFPALAGEKETLIQLLNHDENDIDEAYIEDFNTLKRQIKDYLENSSNEDEYLFDSVELHRIQTYLGGKRKDRNNVEISGDYDLVKTLTDNVLESVYWLKDKGVHFDRSFVDMPVGALWRRGHKPMKAQGLEYIENLGDYVKHNHGRIFTETTAEKLIKEGNQVVGIEARKANGAKVKIHTRHGVVLATGGFGANTKMLQQYNTYWDNIPDDIKTTNSPAITGDGIRLGVQAGADIVGMGFSQMMPISDPKTGALFTGLIVTPSNFVFVNKEGQRFVNEFESRDVLSKAALEQKDGIFYIIADANIKALAMNTTEDKINQELEDGTLVKADTLEALAQKLNIDTTTFVNTIERYNTFVEQGQDEDFNKNAFDLKIEKAPFYATPRKPAIHHTMGGLKINTHAQVIDVEGHIIEGLYAAGEVAGGIHAGNRLGGNALADIFTFGRIAGQSAVTK

SEQ ID NO: 3107 - DNA, 2733 bp, Artificial Sequence
  Description of Artificial Sequence: synthetic nucleic acid sequence
gtggatgaaatcgttcattatggtggcgaagaaatcaagccaggccataaggatgaatttgatccaaatgcaccgaaaggtagtcaaacaacgcaaccaggtaagccgggggttaaaaatcctgatacaggcgaagtagttactccacctgtggatgatgtgacaaaatatggtccagttgatggagatccgatcacgtcaacggaagaaattccattcgacaagaaacgtgaattcaatcctgatttaaaaccaggtgaagagcgtgttaaacaaaaaggtgaaccaggaacaaaaacaattacaacaccaacaactaagaacccattaacaggggaaaaagttggcgaaggtgaaccaacagaaaaaataacaaaacaaccagtagatgaaatcacagaatatggtggcgaagaaatcaagccaggccataaggatgaatttgatccaaatgcaccgaaaggtagccaagaggacgttccaggtaaaccaggagttaaaaaccctgatacaggcgaagtagtcacaccaccagtggatgatgtgacaaaatatggtccagttgatggagatccgatcacgtcaacggaagaaattccattcgacaagaaacgtgaattcaatcctgatttaaaaccaggtaaagagcgcgttaaacagaaaggtgaaccaggaacaaaaacaattacaacaccaacaactaagaacccattaacaggggaaaaagttggcgaaggtgaaccaacagaaaaagtaacaaaacaaccagtagatgaaatcacagaatatggtggcgaagaaatcaagccaggccataaggatgaatttgatccaaatgcaccgaaaggtagccaagaggacgttccaggtaaaccaggagttaaaaatcctgatacaggcgaagtagttactccaccagtggatgatgtgacaaaatatggtccagttgatggagatccgattacgtcaacggaagaaattccgtttgataaaaaacgcgaatttgatccaaacttagcgccaggtacagagaaagtcgttcaaaaaggtgaaccaggaacaaaaacaattacaacaccaacaactaagaacccattaacaggggaaaaagttggcgaaggtgaaccaacagaaaaagtaacaaaacaaccagtggatgaaatcgttcattatggtggcgaagaaatcaagccaggccataaggatgaatttgatccaaatgcaccgaaaggtagccaagaggacgttccaggtaaaccaggagttaaaaaccctgatacaggcgaagtagtcacaccaccagtggatgatgtgacaaaatatggtccagttgatggagatccgatcacgtcaacggaagaaattccgtttgataaaaaacgcgaatttgatccaaacttagcgccaggtacagagaaagtcgttcaaaaaggtgaaccaggaacaaaaacaattacaacaccaacaactaagaacccattaacaggggaaaaagttggcgaaggtgaaccaacagaaaaagtaacaaaacaaccagtagatgaaatcgttcattatggtggcgaagaaatcaagccaggccataaggatgaatttgatccaaatgcaccgaaaggtagccaagaggacgttccaggtaaaccaggagttaaaaatcctgatacaggcgaagtagtcacaccaccagtggatgatgtgacaaaatatggtccagttgatggagatccgattacgtcaacggaagaaattccattcgacaagaaacgtgaattcaatcctgatttaaaaccaggtgaagagcgtgttaaacagaaaggtgaaccaggaacaaaaacaattacaacaccaacaactaagaacccattaacaggggaaaaagttggcgaaggtgaaccaacagaaaaaataacaaaacaaccagtagatgaaatcacagaatatggtggcgaagaaatcaagccaggccataaggatgaatttgatccgaacgcaccgaaaggtagccaagaggacgttccaggtaaaccaggagttaaaaatcctgatacaggcgaagtagtcacaccaccagtggatgatgtgacaaaatatggtccagttgatggagatccgattacgtcaacggaagaaattccgtttgataaaaaacgcgaatttgatccaaacttagcgccaggtacagagaaagtcgttcaaaaaggtgaaccaggaacaaaaacaattacaacaccaacaactaagaacccattaacaggagaaaaagttggcgaaggtgaaccaacagaaaaaataacaaaacaaccagtggatgagatcgttcattatggtggcgaagaaatcaagacaggccataaggatgaatttgatccgaacgcaccgaaaggtagtcaaacaacgcaaccaggtaagccaggagttaaaaatcctgatacaggcgaagtagtcacaccaccagtggatgatgtgacaaaatatggtccagttgatggagatccgattacgtcaacggaagaaattccgtttgataaaaaacgcgaatttgatccaaacttagcgccaggtacagagaaagtcgttcaaaaaggtgaaccaggaacaaaaacaattacaacgccaacaactaagaacccattaacaggggaaaaagttggtgaaggtgaaccaactctaaagacacctgttaagagtgatgtcagactgaccgcaatattaacaatactcatatctacatga

SEQ ID NO: 3108 - protein, 910 aa, Artificial Sequence
  Description of Artificial Sequence: synthetic amino acid sequence
VDEIVHYGGEEIKPGHKDEFDPNAPKGSQTTQPGKPGVKNPDTGEVVTPPVDDVTKYGPVDGDPITSTEEIPFDKKREFNPDLKPGEERVKQKGEPGTKTITTPTTKNPLTGEKVGEGEPTEKITKQPVDEITEYGGEEIKPGHKDEFDPNAPKGSQEDVPGKPGVKNPDTGEVVTPPVDDVTKYGPVDGDPITSTEEIPFDKKREFNPDLKPGKERVKQKGEPGTKTITTPTTKNPLTGEKVGEGEPTEKVTKQPVDEITEYGGEEIKPGHKDEFDPNAPKGSQEDVPGKPGVKNPDTGEVVTPPVDDVTKYGPVDGDPITSTEEIPFDKKREFDPNLAPGTEKVVQKGEPGTKTITTPTTKNPLTGEKVGEGEPTEKVTKQPVDEIVHYGGEEIKPGHKDEFDPNAPKGSQEDVPGKPGVKNPDTGEVVTPPVDDVTKYGPVDGDPITSTEEIPFDKKREFDPNLAPGTEKVVQKGEPGTKTITTPTTKNPLTGEKVGEGEPTEKVTKQPVDEIVHYGGEEIKPGHKDEFDPNAPKGSQEDVPGKPGVKNPDTGEVVTPPVDDVTKYGPVDGDPITSTEEIPFDKKREFNPDLKPGEERVKQKGEPGTKTITTPTTKNPLTGEKVGEGEPTEKITKQPVDEITEYGGEEIKPGHKDEFDPNAPKGSQEDVPGKPGVKNPDTGEVVTPPVDDVTKYGPVDGDPITSTEEIPFDKKREFDPNLAPGTEKVVQKGEPGTKTITTPTTKNPLTGEKVGEGEPTEKITKQPVDEIVHYGGEEIKTGHKDEFDPNAPKGSQTTQPGKPGVKNPDTGEVVTPPVDDVTKYGPVDGDPITSTEEIPFDKKREFDPNLAPGTEKVVQKGEPGTKTITTPTTKNPLTGEKVGEGEPTLKTPVKSDVRLTAILTILIST

SEQ ID NO: 3109 - DNA, 1152 bp, Artificial Sequence
  Description of Artificial Sequence: synthetic nucleic acid sequence
atgtcaccatataaagttatcattgcacctgattcttttaaagaaagtatgtcggcgaaggaagctgctttagctattaaagatggattccaagaggtgttcgattccagtacaatatatgacattattcctatggctgatggtggcgagggaacaaccgaagtattgaaagaagccttaaatgctacctcttattgtgtagaagtaaaagatccacttaatagaaatatcatggctagttatgcgagaagcgacgaacaccaaacagctatcattgaaatggcagctgcttcaggactagcattattgagtaaagatgaaagagatccatctattacaacttcgtacggtaccggccaactcattaatgatgcacttaatcacgatgttaataaaattattttaggaataggtggaagtgccacgaatgatggtggtgtaggaatgttaaaggctttaggtgtctcttttaaagataaaaacaatcaagagattcgcgatggaggtttagccctatctcaaatagaatacattgatattactcgtataaacccacgattgaaagatgtgaatattaaagtagcctgtgatgtaactaatccattattaggagacaatggagcaacaatagtttatggtccacaaaaaggcgctcagcaaaagatgataccaaagttggattcagcattacgtcactatcatgataaaattgaaagagaattaaatatgaatgtaaaagatatcccgggcgctggtgctgcaggaggcatgggaactgcattaatcgcgtttctaaacgctaaattacgtcctggaattgatgtagttcttgaagagactcaatttaaacaaaggataaaagatgcgaatttagttgttactggcgaaggtaaaatggataaacaaacaatctatggcaaaacacccattggcgtagccaaagttgcaaaatcatatgatatacccgtcattgctatttgtggtagtttaggaaaagattacgaagcaatttatcaccacggtatcgatagcgtgtttagtatcatggaacgtccatgccaccttgacgaagctttgaaagaaggcgcacttcatgttaaacatacaacaataaatatcgcacgacttttacaagtaaaaattgaaaaatga

SEQ ID NO: 3110 - protein, 383 aa, Artificial Sequence
  Description of Artificial Sequence: synthetic amino acid sequence
MSPYKVIIAPDSFKESMSAKEAALAIKDGFQEVFDSSTIYDIIPMADGGEGTTEVLKEALNATSYCVEVKDPLNRNIMASYARSDEHQTAIIEMAAASGLALLSKDERDPSITTSYGTGQLINDALNHDVNKIILGIGGSATNDGGVGMLKALGVSFKDKNNQEIRDGGLALSQIEYIDITRINPRLKDVNIKVACDVTNPLLGDNGATIVYGPQKGAQQKMIPKLDSALRHYHDKIERELNMNVKDIPGAGAAGGMGTALIAFLNAKLRPGIDVVLEETQFKQRIKDANLVVTGEGKMDKQTIYGKTPIGVAKVAKSYDIPVIAICGSLGKDYEAIYHHGIDSVFSIMERPCHLDEALKEGALHVKHTTINIARLLQVKIEK

SEQ ID NO: 3111 - DNA, 936 bp, Artificial Sequence
  Description of Artificial Sequence: synthetic nucleic acid sequence
atgtatcaacttgcacaatctaatctatggacaggtcgtttagatagtgaaactgatcctacacaatttagacacttccaaactgttaaattcggtgatttaagtcaattagatttttcggatgaacacaaaggcgtgggcttattaggatatgcaattgataaaggagtagaattaaacaaaggacgtgtaggtgcaaaagaaggtcccaatgccattaagcgagcttttgctggattgccagatttgaatcaatgtgaagagattatagattatggtaatgtagaacacaatcatgagttgctaatagatacacagcgcgaattcgcagatcttgctgctaagtctatcaaacgacataaacaaacatttttacttggtggcggtcatgatatagcatatgcacaatatttagctactcgtaaagtttatcctgagtcgtcaataggtgtgattaatatagatgcgcactttgacacacgcgatgagggttattcaacctctggtactagttttagacagattctagaagaagatgataatgcagattatttagtgttaggtatatctcaaggtggtaatacacaagctttatttaattatgctaaagaaaaagatattcaatttgtatatgcagatgaattactacatcaggtatctccccccattaaagatatgatagaacgttttatccataatcatgatacggttatgttcacaatttgcatggatgtagtagatagtgcatttgcaccaggagtcagtgcaccagctgtcctaggaatatatccacatacagttttcgaacttgctaaacgggtcattccaagtgaaaaagtaaaatctataagtatagctgaaatgaatccgacgtatgattcagatcaaagaactgctaaattagttgctaatttagtacatcattgtttaatttaa

SEQ ID NO: 3112 - protein, 311 aa, Artificial Sequence
  Description of Artificial Sequence: synthetic amino acid sequence
MYQLAQSNLWTGRLDSETDPTQFRHFQTVKFGDLSQLDFSDEHKGVGLLGYAIDKGVELNKGRVGAKEGPNAIKRAFAGLPDLNQCEEIIDYGNVEHNHELLIDTQREFADLAAKSIKRHKQTFLLGGGHDIAYAQYLATRKVYPESSIGVINIDAHFDTRDEGYSTSGTSFRQILEEDDNADYLVLGISQGGNTQALFNYAKEKDIQFVYADELLHQVSPPIKDMIERFIHNHDTVMFTICMDVVDSAFAPGVSAPAVLGIYPHTVFELAKRVIPSEKVKSISIAEMNPTYDSDQRTAKLVANLVHHCLI

SEQ ID NO: 3113 - DNA, 675 bp, Artificial Sequence
  Description of Artificial Sequence: synthetic nucleic acid sequence
atgaactatttcagatataaacaatttaacaaggatgttatcactgtagcggttggctactatctaagatatgcattgagttatcgtgatatatctgaaatattaagggaacgtggtgtaaacgttcatcattcaacggtctaccgttgggttcaagaatatgccccaattttatatcaaatttggaagaaaaagcataaaaaagcttattacaaatggcgtattgatgagacgtacatcaaaataaaaggaaaatggagttatttatatcgtgccattgatgcagagggacatacattagatatttggttgcgtaagcaacgagataatcattcagcatatgcgtttatcaaacgtctcattaaacaatttggtaaacctcaaaaggtaattacagatcaggcaccttcaacgaaggtagcaatggctaaagtaattaaaggttttaaacttaaacctgactgtcattgtacatcgaaatatctgaataacctcattgagcaagatcaccgtcatattaaagtaagaaagacaaggtatcaaagtatcaatacagcaaagaatactttaaaaggtattgaatgtatttacgctctatataaaaagaaccgcaggtctcttcagatctacggattttcgccatgccacgaaattagcatcatgctagcaagttaa

SEQ ID NO: 3114 - protein, 224 aa, Artificial Sequence
  Description of Artificial Sequence: synthetic amino acid sequence
MNYFRYKQFNKDVITVAVGYYLRYALSYRDISEILRERGVNVHHSTVYRWVQEYAPILYQIWKKKHKKAYYKWRIDETYIKIKGKWSYLYRAIDAEGHTLDIWLRKQRDNHSAYAFIKRLIKQFGKPQKVITDQAPSTKVAMAKVIKGFKLKPDCHCTSKYLNNLIEQDHRHIKVRKTRYQSINTAKNTLKGIECIYALYKKNRRSLQIYGFSPCHEISIMLAS

SEQ ID NO: 3115 - DNA, 1203 bp, Artificial Sequence
  Description of Artificial Sequence: synthetic nucleic acid sequence
gtgtatcagtcagaaaatcaatcattactttttattgttattttaggttcattaacagcatttggcccattggctattgatatgtttttacctggactacctaatattagtcatgattttgatatttctgcatctacaactcagcttactatctccttttttatgattggattagcgttaggaaattttttggctggccccatatctgatattactggtagaaaaaaaccattaattttctcactgattatttttactattgcgagtttaggtattatattcgtcacaaatatatggattatgattattttacgatttattcaaggattaactggtggtgcaggtgcagtcatctcaagagccattgctagtgatatgtactcaggtaatgcgctaactaaatttttatcattattaatgcttgtcaatggcattgcgccaattatcgcacctgcgcttggcggtatcattttaaattatgggccatggcgaattgtatttgtaatactaacaatgtttgggattgtcatgttaataggaactttatttaaagttcctgagtcgcttgaaaagagcctaagggaaagtagtaacataggtacgatgctaattaatttcaaagaactttttaaaacaccccgttttgtattacccatgttgatacaaggggtgtcatttgtattactatttacttatatttctgcatctccttttatagttcaaacaatttatggtttaacgccattaaacttcagtattatgtttgcttttataggcgttacactcattatttcaagccaattaaccggaaaacttgttgactatatagatagattactgttgctgagaatcatgtctactatacaagttattggtgttataatcgtatcactaactttactcaaccattggactttttggatactttcttgtggctttgtgattttagtggcaccagttacagggattgcaacgttaggattttcgatagcaatggatgagagtaaaggggccaaaggtagttcttcaagtttgttgggattgtttcaaactttacttggtggcgtcatctctccacttgttggtattaagggagacagtaatgcgataccttatataatcgttatcgttattacagcaataattcttatggttttacagttgattaatgtgaagatatttaaaaaagctaaaattcattga

SEQ ID NO: 3116 - protein, 400 aa, Artificial Sequence
  Description of Artificial Sequence: synthetic amino acid sequence
VYQSENQSLLFIVILGSLTAFGPLAIDMFLPGLPNISHDFDISASTTQLTISFFMIGLALGNFLAGPISDITGRKKPLIFSLIIFTIASLGIIFVTNIWIMIILRFIQGLTGGAGAVISRAIASDMYSGNALTKFLSLLMLVNGIAPIIAPALGGIILNYGPWRIVFVILTMFGIVMLIGTLFKVPESLEKSLRESSNIGTMLINFKELFKTPRFVLPMLIQGVSFVLLFTYISASPFIVQTIYGLTPLNFSIMFAFIGVTLIISSQLTGKLVDYIDRLLLLRIMSTIQVIGVIIVSLTLLNHWTFWILSCGFVILVAPVTGIATLGFSIAMDESKGAKGSSSSLLGLFQTLLGGVISPLVGIKGDSNAIPYIIVIVITAIILMVLQLINVKIFKKAKIH

SEQ ID NO: 3117 - DNA, 957 bp, Artificial Sequence
  Description of Artificial Sequence: synthetic nucleic acid sequence
atgttactttttttatgttttctaattgaattattacttattgttttattatatacgaagcaatcgtttactcttaatttatttagttttatcttatataccatcattggttttgttatgatgacttatcatatggtaactgtatcaataccatatgatatgtttatcattgtaattgtagcaatgatactgttattgattaaatatcgttatattttcaagttgcaaacaggacgtttttttattttacaacttagtcatcatttttatactgtggggctatttgctgtgagttgtttatatataagtactattcccctaattatcattaatagcttagctttatgggccgctatcattgcatttagtacaatttattcatttatcggatacttatcttggtctacagcttttgaaaatcatcaatattataaacacgtaaagttaattatggtgcttggagctggaattttctctgaagaagtgactacgcttcttgctgcaagacttgataaagctttatctgtttatcattcacaacggactaaacctatcatcattgtaagtggtggccaaggtcctgacgaaccaatttcagaagcacttgcgatgaaaagataccttatagctcacaacgttccggaaaaccatatatttatggagaatcaatccacgaatacacgaaccaatttcttatactctaaatctatcattcattcgatgatgcctacttcaagtcagatgttgtgtgtaacaagtcaatttcatgttttaagagcgcttaaatttgctaaaaaagctcatctttctttcgatggtattggaagtcgtacaccataccactttttggcacaatctatgattatagactttttgggtttaatgtatcaatataaaacaatacttactatttatttcgctatgttgttttggcttgcaatactacaaaccatataa

SEQ ID NO: 3118 - protein, 318 aa, Artificial Sequence
  Description of Artificial Sequence: synthetic amino acid sequence
MLLFLCFLIELLLIVLLYTKQSFTLNLFSFILYTIIGFVMMTYHMVTVSIPYDMFIIVIVAMILLLIKYRYIFKLQTGRFFILQLSHHFYTVGLFAVSCLYISTIPLIIINSLALWAAIIAFSTIYSFIGYLSWSTAFENHQYYKHVKLIMVLGAGIFSEEVTTLLAARLDKALSVYHSQRTKPIIIVSGGQGPDEPISEALAMKRYLIAHNVPENHIFMENQSTNTRTNFLYSKSIIHSMMPTSSQMLCVTSQFHVLRALKFAKKAHLSFDGIGSRTPYHFLAQSMIIDFLGLMYQYKTILTIYFAMLFWLAILQTI

SEQ ID NO: 3119 - DNA, 1089 bp, Artificial Sequence
  Description of Artificial Sequence: synthetic nucleic acid sequence
gtgaaaagaggtaaaaaaatgaaaatagctattgtaggttcaggtaatggtgcagtaactgctgcagtggatatggtagataaaggtcatgatgtacgattatattgtcgtaacgaatctattagtaaatttgatgtcgccctagaaaaaggtggctttgattttaataatgagggagaagagaagtttatagagtttactgatattagtgatgatatggagtatgttttagatggtgcagacattgttcaggtaattattccttcatcattcattgaatattatgctaaagtgatgtcaaaatttgtgacgaacgaccatctcattttctttaacattgctgcttcaatgggttcaatacgatttatgaatgtattagaagatcgtcatattgatgtccatccacactttgcagaagcaaatacattaacatatggtacacgtgttgactttaacaatgctaaagtagatttatctttaaatgttcgtcgggtgttcttttcaacatttgatcgtagtgagttaaatgaaagttatgaaaaggtatctaaaatttacgattatcttgtaaaagaagaaagtttacttaaaactaatcttgaaaatggtaacccagaagtacatcctggaccaacattattgaacgttggacgtattgattattcagaagagttttctttatataaagaaggcataacaaaacatactgtgagattattacatgctattgagatagaacgtttaaatttagggagaaaattaggttttgaattatcgactgccaaagaatcacgtattcaaaggggttatttagaacggaaagacgaggatgaaccgttaaatcgtctttttaatactagtcctgtgttttctcaaattccaggaccgaatcacgttgaaaaccgttatttaactgaagatatcgcatatggattagtattatggtctagtttaggacgtgtcattgatgtcccgacacctaatatcgatgctgttattatgatagcttcaactattcttgaacgcgatttctttgaagagggcctcactatcgaggaattaggcttagataaattaggattagagtaa

SEQ ID NO: 3120 - protein, 362 aa, Artificial Sequence
  Description of Artificial Sequence: synthetic amino acid sequence
VKRGKKMKIAIVGSGNGAVTAAVDMVDKGHDVRLYCRNESISKFDVALEKGGFDFNNEGEEKFIEFTDISDDMEYVLDGADIVQVIIPSSFIEYYAKVMSKFVTNDHLIFFNIAASMGSIRFMNVLEDRHIDVHPHFAEANTLTYGTRVDFNNAKVDLSLNVRRVFFSTFDRSELNESYEKVSKIYDYLVKEESLLKTNLENGNPEVHPGPTLLNVGRIDYSEEFSLYKEGITKHTVRLLHAIEIERLNLGRKLGFELSTAKESRIQRGYLERKDEDEPLNRLFNTSPVFSQIPGPNHVENRYLTEDIAYGLVLWSSLGRVIDVPTPNIDAVIMIASTILERDFFEEGLTIEELGLDKLGLE

SEQ ID NO: 3121 - DNA, 447 bp, Artificial Sequence
  Description of Artificial Sequence: synthetic nucleic acid sequence
atgctaattacgagacaacaacctattgccaaagatttacgtatgatgatggcagcactcaaaatctctactgactttgaacgaatgggggataatgctgctagtatcgctcatatacgtttaagagttaaaataaatgataactatgtgtttacacgtttaaaaaccatgggtaaattagcgatgctcatgttagaagatttaaataacgctattagaaataaagatttaccactgataaaagaagtcattgagagagatgaagatattgatgatttatacgttaacatcgtcaataccagttacttaattgataatgacccattcgtagctggtcaagcacacttagcagctagacacttagaacgaataggtgatcatataagcaatattgctgaaagtgtttattattatttaacaggccaacattttgaaacttttgattaa

SEQ ID NO: 3122 - protein, 148 aa, Artificial Sequence
  Description of Artificial Sequence: synthetic amino acid sequence
MLITRQQPIAKDLRMMMAALKISTDFERMGDNAASIAHIRLRVKINDNYVFTRLKTMGKLAMLMLEDLNNAIRNKDLPLIKEVIERDEDIDDLYVNIVNTSYLIDNDPFVAGQAHLAARHLERIGDHISNIAESVYYYLTGQHFETFD

SEQ ID NO: 3123 - DNA, 645 bp, Artificial Sequence
  Description of Artificial Sequence: synthetic nucleic acid sequence
gtggatttttatgacgctgagaaaaaagcgttttataatttagcgcagaaatacaatcatcagccaactcaacaggatttcgaacattttaagaaagtgaaccaagcgcattgggaagcatttcaacaaaataaattgactaaagatgaagtgctgtcacaacgatttattaattattttaatgactatcaaattcatgtaaatggaaaagaagctgatgagtgctttagagctgaattagcaaaggcaccagttaaattatttgatcatacattagaagttatacaacaattaaaattaaatcattctctctatatagtaaccaatggtgtaacagaaacacagctacgacgaattgctcagacacaatttaatgaaatatttcaagatgtctttatatctgaacaagctggatttcaaaagtcgatgacagagttcttcgattttgtgtttgaacatatcggagagaataacaggaatcaaactctaattgtgggagattctttaacgtctgacattttaggtggtaaaaatgctaatatatcaacatgttggtttaatattagacaaaaagaaaaccatacgtctattcaaccggattatatcattaatgatttatcagaaatgattcgcattgttgagtga

SEQ ID NO: 3124 - protein, 214 aa, Artificial Sequence
  Description of Artificial Sequence: synthetic amino acid sequence
VDFYDAEKKAFYNLAQKYNHQPTQQDFEHFKKVNQAHWEAFQQNKLTKDEVLSQRFINYFNDYQIHVNGKEADECFRAELAKAPVKLFDHTLEVIQQLKLNHSLYIVTNGVTETQLRRIAQTQFNEIFQDVFISEQAGFQKSMTEFFDFVFEHIGENNRNQTLIVGDSLTSDILGGKNANISTCWFNIRQKENHTSIQPDYIINDLSEMIRIVE

SEQ ID NO: 3125 - DNA, 717 bp, Artificial Sequence
  Description of Artificial Sequence: synthetic nucleic acid sequence
atgggacgtaaatggaacaacattaaagagaaaaaagcccaaaaagataaaaatactagtagaatatatgccaaatttggtaaagaaatatatgtagctgcaaagtctggtgagcctaatccagagtcaaatcaaactttaagattagtattagaacgtgcaaaaacatattcagtacctaatcatattatagatagagctattgataaggctaaaggcgctggtgacgaaaactacgatcacttaagatatgaaggttttggtccgaatggttcaatgcttatagttgacgcattaacaaacaatgtaaatcgtacagcatcagatgtacgtgctgcgttcggtaagaatggaggaaatatgggagtatctggttcagtagcttatatgtttgaccatactgcaacctttggtgtagaaggtaaatctgtagatgaagtcttagaaacactaatggagcaagatattgatgtaagagatgtaattgatgacaatggcttgactattgtttacgcagaaccagatcaatttgcacaagttcaggatgcattacgtgaagctggcgttgaggaatttaaagtagcagagtttgaaatgttacctcaaactgatattgagttgtctgaagaggatcaagctatttttgaaaaattaatcgatgcacttgaagacttggaagatgttcaaaatgttttccataatgtagatttaaaataa

SEQ ID NO: 3126 - protein, 238 aa, Artificial Sequence
  Description of Artificial Sequence: synthetic amino acid sequence
MGRKWNNIKEKKAQKDKNTSRIYAKFGKEIYVAAKSGEPNPESNQTLRLVLERAKTYSVPNHIIDRAIDKAKGAGDENYDHLRYEGFGPNGSMLIVDALTNNVNRTASDVRAAFGKNGGNMGVSGSVAYMFDHTATFGVEGKSVDEVLETLMEQDIDVRDVIDDNGLTIVYAEPDQFAQVQDALREAGVEEFKVAEFEMLPQTDIELSEEDQAIFEKLIDALEDLEDVQNVFHNVDLK

SEQ ID NO: 3127 - DNA, 1053 bp, Artificial Sequence
  Description of Artificial Sequence: synthetic nucleic acid sequence
atgtttgaggctaacccagaattattaaacatgtttaaccaaacaaaccaaaagaaaggtatgcaatctgctgcattagcacaagcagtactagctgcagcaatgaatattaataatttaggtgcaattaagccagcaattatgcctgtggcacataagcactgtgctttacaagtttatcccgaacattatccaattgtaggtgaaaatttacttgctgcaattcaagatgtgacagggttagaaagtgacgacccagtaattcaaacatgggcaaaagcgtatggagaaattgcagatgtatttatcaaattagagcaagaaatttacaaccatatgttatggaaaggttttaaaccatttaaaatcacaaacattacacaagaaacaagtgacatcaaatctttcacagttgaatctgaagaatatgatttaagtcaattcgaaccaggtcaatacattaccgtagatgtttctagtgaaaagttaccatatagagctaaacgtcattattcaatcatagatggagatgaaaatcacttagtatttggtgtcaaacgtgatgtgactactgaacatgaaggtgaagtttcaacaattttacatgatgaaatatcagaaggtgacatgattaatttatctgctcctgtaggtggcttttcaatagaaaatactgaaagaccgcaattgtttattggttctggcgtaggtatgacaccattagtttcaatgtttaaaaaagctgcatcattaaacgttccaactcaaatgattcaagcggttgtgacagaagatgaacgaccatttgctcaaaaacttgatagcattacagataattatgagcaagcacagctacatttacacgtgaaagataaagaaggttatttagaagctaaagaattagaacaatatttaagtgaacagcctgaaatttatatttgtggtggtacgaaattcttacattcaattataaattctcttaaagaattaaattatgatatgaatcatgttcattttgaaacatttattcctcgtttaagtgttcaagtatag

SEQ ID NO: 3128 - protein, 350 aa, Artificial Sequence
  Description of Artificial Sequence: synthetic amino acid sequence
MFEANPELLNMFNQTNQKKGMQSAALAQAVLAAAMNINNLGAIKPAIMPVAHKHCALQVYPEHYPIVGENLLAAIQDVTGLESDDPVIQTWAKAYGEIADVFIKLEQEIYNHMLWKGFKPFKITNITQETSDIKSFTVESEEYDLSQFEPGQYITVDVSSEKLPYRAKRHYSIIDGDENHLVFGVKRDVTTEHEGEVSTILHDEISEGDMINLSAPVGGFSIENTERPQLFIGSGVGMTPLVSMFKKAASLNVPTQMIQAVVTEDERPFAQKLDSITDNYEQAQLHLHVKDKEGYLEAKELEQYLSEQPEIYICGGTKFLHSIINSLKELNYDMNHVHFETFIPRLSVQV

SEQ ID NO: 3129 - DNA, 675 bp, Artificial Sequence
  Description of Artificial Sequence: synthetic nucleic acid sequence
atgaactatttcagatataaacaatttaacaaggatgttatcactgtagcggttggctactatctaagatatgcattgagttatcgtgatatatctgaaatattaagggaacgtggtgtaaacgttcatcattcaacggtctaccgttgggttcaagaatatgccccaattttatatcaaatttggaagaaaaagcataaaaaagcttattacaaatggcgtattgatgagacgtacatcaaaataaaaggaaaatggagctatttatatcgtgccattgatgcagagggacatacattagatatttggttgcgtaagcaacgagataatcattcagcatatgcgtttattaaacgtctcattaaacaatttggtaaacctcaaaaggtaattacagatcaggcaccttcaacgaaggtagcaatggctaaagtaattaaagcttttaaacttaaacctgactgccattgtacatcgaaatatctgaataacctcattgagcaagatcaccgtcatattaaagtaagaaagacaaggtatcaaagtatcaatacagcaaagaatactttaaaaggtattgaatgtatttacgctctatataaaaagaaccgcaggtctcttcagatctacggattttcgccatgccacgaaattagcatcatgctagcaagttaa

SEQ ID NO: 3130 - protein, 224 aa, Artificial Sequence
  Description of Artificial Sequence: synthetic amino acid sequence
MNYFRYKQFNKDVITVAVGYYLRYALSYRDISEILRERGVNVHHSTVYRWVQEYAPILYQIWKKKHKKAYYKWRIDETYIKIKGKWSYLYRAIDAEGHTLDIWLRKQRDNHSAYAFIKRLIKQFGKPQKVITDQAPSTKVAMAKVIKAFKLKPDCHCTSKYLNNLIEQDHRHIKVRKTRYQSINTAKNTLKGIECIYALYKKNRRSLQIYGFSPCHEISIMLAS

SEQ ID NO: 3131 - DNA, 1452 bp, Artificial Sequence
  Description of Artificial Sequence: synthetic nucleic acid sequence
atggttgaaaaattaaaacatgaatggtttaaccagccaggtaaaaatatacttgccggtatcgtggttgccttagctttaatccctgaagctatcgcattttcaattattgctggcgtagatccaatggttggtttgtatgcttcatttatcatcgctgttgttactgctattgttggtggtagacctgcaatgatatcaggtgcaacaggggctgttgccttattagttacaccacttgtgaaagattatggtgtagaatatcttttagctgccacgatattaatgggagtaattcaattagttttaggccttctcaaagtggggcgtttaatgaaatttatacctcattccgtcatgataggttttgtaaatgcattaggtattatgattttcatgtcccaaatagaacatatcttcggtatttcaatctcaacttatatatatgtaattgtaacattactcattgtatatataatccctaaatttttcaaagcaatacctgcaccattaatagctatcatcgtattgactgctctttatatgtatacaggttctgacgtgagaactgttggtgatttaggaaatattaagcaagctttaccgcactttttaattcctaatgttccctttaatttagaaacacttcaaatcatttttccatactcgctatctatggctattgtaggtctagtagaaagtttacttactgctaaaattgtagatgatgcaacagacacttatagtagtaaaaacagagaatctcgtggccaaggcattgctaatatgattacaggattattcggtggtatgggaggttgtgccatgattggacaatctgtaatcaatgtcaaatcaggtgcaaacagtagattatctactttttctgctggtgttgtcttaatattcatgattattgttcttggaggacttgttgttcaaattccaatgccaattttagcaggtattatggttatggtttcgattggtacatttgattggaattcttttaaatatattcaaaaagcaccaaaaacagatgcagttgttatgatacttacagtgataattgtactgatgacacataacttagctctcggcgtggtcgtaggtgttattttcagtgctttattctttgctactaaaatatcaaaagtagaagtaacatctgagaagtttggtaaaactaaccgtttatcttttaaaggtcaaatcttttttgtttctattgactctatgatggatcaaattagctttaatattgaaaatagtattatagaattaaactttaataatgctcatttatgggatgattcagcagtagatgctattgatacaatggtaaggaagttcgaagaaaaaaataacattgttcatgtagaaaaactaaattcagatagtcgtaaaatagtctcagaattaagcaaactaaatgaaaatcatttaaactaa

SEQ ID NO: 3132 - protein, 483 aa, Artificial Sequence
  Description of Artificial Sequence: synthetic amino acid sequence
MVEKLKHEWFNQPGKNILAGIVVALALIPEAIAFSIIAGVDPMVGLYASFIIAVVTAIVGGRPAMISGATGAVALLVTPLVKDYGVEYLLAATILMGVIQLVLGLLKVGRLMKFIPHSVMIGFVNALGIMIFMSQIEHIFGISISTYIYVIVTLLIVYIIPKFFKAIPAPLIAIIVLTALYMYTGSDVRTVGDLGNIKQALPHFLIPNVPFNLETLQIIFPYSLSMAIVGLVESLLTAKIVDDATDTYSSKNRESRGQGIANMITGLFGGMGGCAMIGQSVINVKSGANSRLSTFSAGVVLIFMIIVLGGLVVQIPMPILAGIMVMVSIGTFDWNSFKYIQKAPKTDAVVMILTVIIVLMTHNLALGVVVGVIFSALFFATKISKVEVTSEKFGKTNRLSFKGQIFFVSIDSMMDQISFNIENSIIELNFNNAHLWDDSAVDAIDTMVRKFEEKNNIVHVEKLNSDSRKIVSELSKLNENHLN

SEQ ID NO: 3133 - DNA, 1617 bp, Artificial Sequence
  Description of Artificial Sequence: synthetic nucleic acid sequence
atgaaaataagggatgaaaatatggatttcgttaaatcaaaaactgacttatttagactcatagacaatgaagcgcaaacatcgacatctaagatggttttattcttaatattaggaactatatttttagatgcatatgatattactattttaggtacaatgactgatcaactcactcaacagtttcacttatcaccatcaacgctatctatagtaatgacctctttacctattggtgcattatttggtgcattacttggtggtacattagcacatcagtttggacgcaagcatattttatcaattgccttactaacactcactgtaacctctcttggtgcggcactcgcaccaaatgtaattattctaataatatgtcgttgtataatggggtttgctattggaatggatagtccagttgctttcacttttattgcggaaataagtaatttaaagcacaaaggaagaaatgttaactattggcaagtcgtttggtatgttgcaatagttacttctgctttagtggtcattgcgttctttatgctaggggctggtgcacatttgtggagatatgcaattggatttggtgcacttattgcttttgtcttgtacatcttgcgaattaaatatttacacgaaagtccgacatgggtgattaatcattattctttagaaaaagcaactgaatttgtaagaaaatattatcataaagacatccacctagagggaacgcttgaagatgatttaagttctgatgtgacttcgccacataattcttggacagacttatttaaaccgagatatataaaaagaattatcctggcgactgcgatttcaacattacaaggtatgcagtactatggtgtcggtttatacatacctattattgcaacttatcttattagtaaggataaaataggtgtattattaggtactgctatagtcaatatagcaggtattctaggcgcatatttaggtgctcaattgacttataaattaggtacacgcaagcttacaatgataggcttcacacttgtattactttcaatggtatgtgtaggactcttttatcatcatctaccaatgcttcttaacactttccttattggattatttttatttggccattcaggaggtcctggtactcaaggaaaaacaattggtgccttatcattcccgactcatttacgttcacaagctactggctttgtagaatctgtaagtcgtactggtagtatcataggtacttttgtctttccaatcattcttgctgcagtaggtctaacgaatactatgttaatcttgtccattgtccctttactcggaattatcataacagtatctataaaatgggaagctgtcggtaaggaatacattgttgaatataacgctactttggcattaaacgatatagaaagatcgataattagaaaagaattaacattagcttttaaaagaagcgaagtcaaactcagtcgaatggaaagacgtatcattcgattactacttaatgattacaagccaaaggagattgctatggttttaaatttggaatccaaagttgtttataatgcgattcaacgtagtaaatgtaaacttaaaagaagttttgaataa

SEQ ID NO: 3134 - protein, 538 aa, Artificial Sequence
  Description of Artificial Sequence: synthetic amino acid sequence
MKIRDENMDFVKSKTDLFRLIDNEAQTSTSKMVLFLILGTIFLDAYDITILGTMTDQLTQQFHLSPSTLSIVMTSLPIGALFGALLGGTLAHQFGRKHILSIALLTLTVTSLGAALAPNVIILIICRCIMGFAIGMDSPVAFTFIAEISNLKHKGRNVNYWQVVWYVAIVTSALVVIAFFMLGAGAHLWRYAIGFGALIAFVLYILRIKYLHESPTWVINHYSLEKATEFVRKYYHKDIHLEGTLEDDLSSDVTSPHNSWTDLFKPRYIKRIILATAISTLQGMQYYGVGLYIPIIATYLISKDKIGVLLGTAIVNIAGILGAYLGAQLTYKLGTRKLTMIGFTLVLLSMVCVGLFYHHLPMLLNTFLIGLFLFGHSGGPGTQGKTIGALSFPTHLRSQATGFVESVSRTGSIIGTFVFPIILAAVGLTNTMLILSIVPLLGIIITVSIKWEAVGKEYIVEYNATLALNDIERSIIRKELTLAFKRSEVKLSRMERRIIRLLLNDYKPKEIAMVLNLESKVVYNAIQRSKCKLKRSFE

SEQ ID NO: 3135 - DNA, 1509 bp, Artificial Sequence
  Description of Artificial Sequence: synthetic nucleic acid sequence
gtgagcaaaaaaatggctaataaagagtcaaaaaatgttgttattattggcgctggtgtcttaagtacgacatttggttctatgattaaagaattagaacctgattggaacatcaaactctatgaacgcttagatcgtccaggtattgaaagttctaacgaaagaaacaatgccggtacaggacatgcggcgttatgtgaattgaactatacagtacaacaacctgatggttcaattgatatagaaaaagccaaagaaatcaacgaacaattcgagatttcaaaacaattctggggtcacttagtaaaaagtggtaacatcagtaaccctagagatttcattaatccacttcctcacattagtttcgtaagaggtaaaaataacgttaaattcttaaaaaaccgttacgaagcaatgcgtaacttccctatgttcgataacatcgaatatacagaagatatcgaagaaatgagaaaatggatgccattaatgatgacaggccgtactggtaacgaaatcatggcggctagtaaaatcgacgaaggtacagatgttaactacggtgaattaactcgtaaaatggcaaaaagtattgaaaaacatccaaatgctgatgttcaatacaaccacgaagtaattaatttcaatcgtcgtaaagacggtatttgggaagttaaagttaaaaaccgtaattctggagacgttgaaactgttctagctgattatgtatttatcggtgcaggcggtggcgctattccactattacaaaaaactggtatcccagaaagtaaacatcttggtggattccctatcagtggtcagttcttaatttgtacaaaccctgatgtaattaatgaacatgacgtcaaagtatatggtaaagaaccaccaggcacacctccaatgactgtaccacatttagatacacgttatatcgatggtgaaagaacattattatttggaccatttgcaaatattggccctaaattcttaagaaacggttctaacttagacttattcaaatcagttaaaccttataacatcacaacattactagcatctgcagttaaaaacttacctttaatcaaatactctatcgaccaagtattaatgactaaagaaggttgtatgaaccatctacgcacgttctaccctgaagctcgtgacgaagattggcaattatacactgcaggtaaacgtgttcaagttatcaaagatactaaagaacacggtaaaggattcattcaatttggtacagaagttgttaactctaaagaccactctgttatcgcactattgggtgaatcacctggagcatcaacttcagtatcagtagccctagaagttttagagaaaaactttgctgagtatgaaaaagattggactccaaaattacaaaaaatgatcccatcatatggtaaatctcttatcgatgatgttaagttaatgagagcaactcgtaaacaaacatctaaagatttagaattaaattattacgaatctaaataa

SEQ ID NO: 3136 - protein, 502 aa, Artificial Sequence
  Description of Artificial Sequence: synthetic amino acid sequence
VSKKMANKESKNVVIIGAGVLSTTFGSMIKELEPDWNIKLYERLDRPGIESSNERNNAGTGHAALCELNYTVQQPDGSIDIEKAKEINEQFEISKQFWGHLVKSGNISNPRDFINPLPHISFVRGKNNVKFLKNRYEAMRNFPMFDNIEYTEDIEEMRKWMPLMMTGRTGNEIMAASKIDEGTDVNYGELTRKMAKSIEKHPNADVQYNHEVINFNRRKDGIWEVKVKNRNSGDVETVLADYVFIGAGGGAIPLLQKTGIPESKHLGGFPISGQFLICTNPDVINEHDVKVYGKEPPGTPPMTVPHLDTRYIDGERTLLFGPFANIGPKFLRNGSNLDLFKSVKPYNITTLLASAVKNLPLIKYSIDQVLMTKEGCMNHLRTFYPEARDEDWQLYTAGKRVQVIKDTKEHGKGFIQFGTEVVNSKDHSVIALLGESPGASTSVSVALEVLEKNFAEYEKDWTPKLQKMIPSYGKSLIDDVKLMRATRKQTSKDLELNYYESK

SEQ ID NO: 3137 - DNA, 612 bp, Artificial Sequence
  Description of Artificial Sequence: synthetic nucleic acid sequence
atgatcataatgatatttccatcagcacctctatttgttcttcctttaggttcatttatcggtgctttgacaataagtattattctttcagttcttatttcaaaatttgatgtaaagggatcaaaattagcattgataggtttagcgataggtgcaatttgtacggccattgtccaattcttgcttatacgtaatcctcttgatgcaaataatgcgttattatggttgactggtagtttatacggtcataatatagtcaatttttatagtttattaccatggtttattatcactgtacctatagtattgttattagggtatcaacttgatattttaaatttaggtgatcatgtagccattgcactaggagcacgtgtaaaaatcttaaaaatgattttacttgtattagcagtaatgttagcaggtgcttccattgcggtagtagggggtattagttttttaggtcttatagcacctcatattgcacgtcaacttgtcggccataaaaatatacatgttataatcatgtcaggtttggtaggagcaatattattaacttttggtgatggtttagcaagaggtatacaacctcctcttgatattcctgtatga

SEQ ID NO: 3138 - protein, 203 aa, Artificial Sequence
  Description of Artificial Sequence: synthetic amino acid sequence
MIIMIFPSAPLFVLPLGSFIGALTISIILSVLISKFDVKGSKLALIGLAIGAICTAIVQFLLIRNPLDANNALLWLTGSLYGHNIVNFYSLLPWFIITVPIVLLLGYQLDILNLGDHVAIALGARVKILKMILLVLAVMLAGASIAVVGGISFLGLIAPHIARQLVGHKNIHVIIMSGLVGAILLTFGDGLARGIQPPLDIPV

SEQ ID NO: 3139 - DNA, 573 bp, Artificial Sequence
  Description of Artificial Sequence: synthetic nucleic acid sequence
atgctaccaccaggtctagcatttgttgcttatagcgatagagcaaaaaaacgatttgctgatgtaaaaacaccgagattctatttagatttaaataaatacataaaatcacaagagcaaaattcaacgcccttcacccctaatgttggtctatttagaggaataaatgcttatgtagaacttgtaaaaaaagaaggattaaatcacgttatttcacgccattttaaaatacgtaatgccttaagagcagcactaaaggcacttgaattagaattattagtaaaagatgatgctcatgcctcacctactgtgacctcatttgttccaaaaaatcaagaagaacttaatatcattaaaaatcaacttaaatctcaattcaatataactattgctgggggacaaggacacttaaaaggacaaattttgagaattggtcacatggggaaaatatctccttttgatattttagcagtcgtgtctgcattggaaattattttaacttctaatagaaatgtcaattatattggaacagggataactcaatttatggaggttattagacatgagtcataa

SEQ ID NO: 3140 - protein, 190 aa, Artificial Sequence
  Description of Artificial Sequence: synthetic amino acid sequence
MLPPGLAFVAYSDRAKKRFADVKTPRFYLDLNKYIKSQEQNSTPFTPNVGLFRGINAYVELVKKEGLNHVISRHFKIRNALRAALKALELELLVKDDAHASPTVTSFVPKNQEELNIIKNQLKSQFNITIAGGQGHLKGQILRIGHMGKISPFDILAVVSALEIILTSNRNVNYIGTGITQFMEVIRHES

SEQ ID NO: 3141 - DNA, 426 bp, Artificial Sequence
  Description of Artificial Sequence: synthetic nucleic acid sequence
gtgagaccgactgtaccgaatgctgatacgacttcgaagagtattttgattaaaggtatattggaattgattatggtaagtataaacgtaaccataccgataaatgcaatagaaatgagaatagttacgaaagacaactgtatgtatctttctgatatttctctattaaatatagagttgtttttttctttgcgtatcgtattaaaaatagcgattgttgcaataacaaaagttgtaacctttataccacctgcagcactcaatggtgcacctccaataaacatgagagccataagtaataaagctgtcggtgttttaatgtttccaacgtcaattgtgttaaatcctgcagtccttgttgtcactgattggaaaaatgcatttcctattttttcaattaatcccatgtgtaacatagagttttga

SEQ ID NO: 3142 - protein, 141 aa, Artificial Sequence
  Description of Artificial Sequence: synthetic amino acid sequence
VRPTVPNADTTSKSILIKGILELIMVSINVTIPINAIEMRIVTKDNCMYLSDISLLNIELFFSLRIVLKIAIVAITKVVTFIPPAALNGAPPINMRAISNKAVGVLMFPTSIVLNPAVLVVTDWKNAFPIFSINPMCNIEF

SEQ ID NO: 3143 - DNA, 483 bp, Artificial Sequence
  Description of Artificial Sequence: synthetic nucleic acid sequence
atgaatgaaataagtcctacacgacctataaacattaatatcattaatacagccttggtaatgtcgttgacatcgcttgtcacacctaagcttaaaccacatgtaccaaacgcagacattacttcaaagaaaatttgtaaaaaggacaacttgccttgttcagtggcagatataataatcatgctaataaatgtaattaatgacgccatagtaaatacggcaaatgatctttgtacatccataatatgtacttctctgttgaaaattttaatacctgttttgtcaccagtattattaaaattaataacaaacaaaattaaaatagcaaatgttgttgttctgattccacctcctacagaactgggagatgatcctataaacatcaataatcccattacaatatttgttgcgtcgctgaaatgtgacacatctatcgtttgcaaacctgcacttctggtcgttgatgattggaacaatgcataa

SEQ ID NO: 3144 - protein, 160 aa, Artificial Sequence
  Description of Artificial Sequence: synthetic amino acid sequence
MNEISPTRPININIINTALVMSLTSLVTPKLKPHVPNADITSKKICKKDNLPCSVADIIIMLINVINDAIVNTANDLCTSIICTSLLKILIPVLSPVLLKLITNKIKIANVVVLIPPPTELGDDPININNPITIFVASLKCDTSIVCKPALLVVDDWNNA

SEQ ID NO: 3145 - DNA, 942 bp, Artificial Sequence; identical to SEQ ID NO: 2891
  Description of Artificial Sequence: synthetic nucleic acid sequence

SEQ ID NO: 3146 - protein, 313 aa, Artificial Sequence; identical to SEQ ID NO: 2892
  Description of Artificial Sequence: synthetic amino acid sequence

SEQ ID NO: 3147 - DNA, 726 bp, Artificial Sequence
  Description of Artificial Sequence: synthetic nucleic acid sequence
atgcatcaaacgattaatgtcattcttccagaagataaaagttactttgatacaaatgaaaatgcgaaaccattaaaaactatgttattgctacatggtttatcaagtgatacttcctcttatatgagatatacgagtatagaacgctatgcgaatacccaccaactagcagtggtgatgcctaatgctgatcatagtttctattcaaatatggcttatggacatagttattatgactatatactagaagtttatgattatgttcatcaaatatttccattgtctaaaaagagagaagataattttatagcaggtcactctatgggaggttatggtgcaatcaaatttgcattaacgcaaagttatcgtttctcaaaagccgctatgctttcagcgccatatgatgtttctatgattggtcaatatcaatggtatgattttactccagaagcgattgtaggtaatacgcaacatgtcgcggggacatcttttgatccatactatttagttgaacaagcaatagacaatggacaaacgttaccacaactatatattacttgtggaactgaagatgaattgtatcaaggtaatattgattttgtgaactatttagatgaaaaaggtatttcatatcaatttaaaaaagcgccaggtcatcacgattatgcattttgggataaagcaatagaagatgtcattgaccgttttacatcatcacatatttaa

SEQ ID NO: 3148 - protein, 241 aa, Artificial Sequence
  Description of Artificial Sequence: synthetic amino acid sequence
MHQTINVILPEDKSYFDTNENAKPLKTMLLLHGLSSDTSSYMRYTSIERYANTHQLAVVMPNADHSFYSNMAYGHSYYDYILEVYDYVHQIFPLSKKREDNFIAGHSMGGYGAIKFALTQSYRFSKAAMLSAPYDVSMIGQYQWYDFTPEAIVGNTQHVAGTSFDPYYLVEQAIDNGQTLPQLYITCGTEDELYQGNIDFVNYLDEKGISYQFKKAPGHHDYAFWDKAIEDVIDRFTSSHI

SEQ ID NO: 3149 - DNA, 741 bp, Artificial Sequence
  Description of Artificial Sequence: synthetic nucleic acid sequence
atgcaagatttacaagtatttaattttgaagatttaccagtaagaaaaatagaagtagatggagaaccatattttttaggtaaagacgtggcagaaatattaggttacacaagatctgataatgcaattagaaatcatgttgatgatgaagataagctgacgcaccaagttagtgcatcaggtcaaaaacgaaacatggtaatcatcaacgaatctggtttatacagcttaatctttgacgctgctaaacaaagtaaaaacgaaagtattagaaagaaagctaaacgttttaaacgttgggtaaccgaagatgttttaccttccattcgtaaaacaggtacttatcaagttcctgataatccaatggacgcattgcaacttatgttcgacgcacaaaaacaaaccaaagaagaaatagcaactgttaaagcagatgttattgatatcaaagaaaatcaaaagctagatgcaggagaatacggattgataacaaaaacagttcatcaacgcgttgcttatatcagacaaattcacggactacctaataataaagaagttaacaaacctttatatagagatattaacagtaacgtaaatacgatggctggtattaaaacaagaacacaattaaaacaaaaacatttcgatgacgtaatgaatatgatcacaaattggtttccatctcaatcaacaatgtatgtcatcaaacaattagaaatggactttgaaaacgaagtataa

SEQ ID NO: 3150 - protein, 246 aa, Artificial Sequence
  Description of Artificial Sequence: synthetic amino acid sequence
MQDLQVFNFEDLPVRKIEVDGEPYFLGKDVAEILGYTRSDNAIRNHVDDEDKLTHQVSASGQKRNMVIINESGLYSLIFDAAKQSKNESIRKKAKRFKRWVTEDVLPSIRKTGTYQVPDNPMDALQLMFDAQKQTKEEIATVKADVIDIKENQKLDAGEYGLITKTVHQRVAYIRQIHGLPNNKEVNKPLYRDINSNVNTMAGIKTRTQLKQKHFDDVMNMITNWFPSQSTMYVIKQLEMDFENEV

SEQ ID NO: 3151 - DNA, 717 bp, Artificial Sequence; identical to SEQ ID NO: 3125
  Description of Artificial Sequence: synthetic nucleic acid sequence

SEQ ID NO: 3152 - protein, 238 aa, Artificial Sequence; identical to SEQ ID NO: 3126
  Description of Artificial Sequence: synthetic amino acid sequence

SEQ ID NO: 3153 - DNA, 3285 bp, Artificial Sequence
  Description of Artificial Sequence: synthetic nucleic acid sequence
atgactgaagcaacaattcaaaattataacgctaaacgtcaaaaagcagagcaagttatacaaaatgcaaataaaattattgaaaacgctcaacctagtgtacaacaagtgtctgatgagaaatctaaggtagagcaagcactcagtgaattgaacaacgccaaatcagcgcttagagctgataaacaagaattacagcaagcatataatcagttgattcaaccaacggatttaaataataagaaaccagcttctatcactgcgtacaatcaaagatatcaacaatttagtaacgaattgaacagcactaaaacaaatacagatcgcattttaaaagagcaaaatccaagtgtagctgatgtcaacaatgcactaaataaagtaagagaagtacaacaaaaattaaacgaagccagagcacttttacaaaataaagaagataatagtgcactagttcgagccaaagaacaacttcaacaggcagttgaccaagtcccttcaacagaaggtatgacgcaacaaactaaagatgattacaattcaaaacaacaagctgctcaacaagaaatatcaaaagcacaacaagttatcgataatggcgatgcgactacacaacaaatttctaacgccaaaacaaatgttgaacgcgctttagaagcattaaataatgcaaaaactggtttaagagcagataaagaggaacttcaaaatgcatataatcaattaactcaaaatattgatacgagcggtaaaacgcctgcaagtatcaggaaatacaatgaagctaagtcacgtattcaaactcaaattgattcagctaaaaataaagcaaacagtattttaacaaatgacaatcctcaagtatcacaagtgactgctgcgttaaacaaaataaaagctgttcaacctgaattagataaagcgatagcaatgcttaaaaataaagagaataataatgcattggttcaagcgaaacaacaacttcaacaaattgttaatgaagtagatccaacacaaggcatgacaacagatactgctaataactataaatcaaaaaaacgtgaagctgaagatgaaatacaaaaagctcaacaaatcattaacaatggcgatgccactgagcaacaaattactaacgaaacaaatagagtaaatcaagcgattaatgcaataaacaaagccaaaaacgatttacgtgctgataagtctcaattggaaaatgcttataaccaattaatacaaaatgttgatacaaatggtaaaaaacctgctagtattcaacaataccaagctgctcgacaagctattgagacgcaatacaataacgctaaatcagaagcacatcaaattcttgaaaatagtaacccttcagttaatgaagtagcacaagcattacaaaaagttgaagctgtacaacttaaagttaatgacgcgattcatatgcttcaaaataaagagaataatagtgcacttgtcacagctaaaaatcaacttcagcaagcagttaatgatcaaccattaacaacaggtatgactcaagattctattaataactatgtagctaagagaaatgaggctcaaagtgctatcagaaatgcagaagctgtcatcaacaatggcgatgcaactgcaaaacaaatttcagacgagaaatctaaagttgaacaagcactagcacatttgaatgatgctaaacagcaattaactgcagatactactgaattacaaacagcagttcaacaattaaacagaagaggcgatacaaataataaaaagccaagaagtatcaatgcatataataaagcaattcaatcattagaaacacaaattacttctgctaaagataatgccaacgctgtgatacaaaaacctatacgtactgttcaagaggtaaataatgcattacaacaagtaaatcagttgaatcaacaattaactgaagcaattaatcaacttcaaccgctatcaaataatgatgcattaaaagctgcaagattaaatttagaaaataaaattaatcaaactgtacaaactgatggtatgacacaacaatctatagaggcttatcaaaacgctaaacgcgtagcccaaaatgaatctaacactgctttagcattaattaataacggcgatgccgatgaacaacaaattacaactgaaacagaccgagtcaatcagcaaactacaaacttaactcaagcaattaacgggttaacagttaataaagaaccattagaaaccgctaaaacagcgttacaaaataacatcgaccaggtacctagtacagatggtatgactcagcaatctgttgcaaattataatcaaaaactacaaatagctaaaaacgaaattaacacaattaataacgttttagcgaacaatctagatgttaatgcaatcaaaacgaataaagcagaagcggaacgaatcagtaacgatttaacacaagctaagaataacttacaagttgatactcaacctttagaaaaaataaaaagacaacttcaagatgaaattgatcaaggtactaacacagatggaatgactcaagattcagtggataattacaatgatagcttaagtgcagcaattatagaaaaaggcaaagtaaataaattacttaaacgtaatccgacagtagaacaagttaaagagagcgttgctaatgcacaacaagtcatacaagatttacaaaatgctcgaacttcacttgttccagacaaaactcaacttcaagaagctaaaaatagattagaaaacagtattaaccaacaaacagatactgacggcatgactcaagattcgcttaacaattataatgataaattagcaaaagctagacaaaaccttgaaaaaatatctaaagttttaggtggtcaacctactgtagctgaaattagacaaaatacagatgaagcaaatgcacataaacaagcattagacactgcacgttctcaacttacattaaatagagagccatatatcaatcatattaataatgaaagtcatttaaataacgcgcaaaaagataattttaaagctcaagttaactcagcacctaatcataatactttagaaacgattaaaaataaggctgatactttaaatcaatctatgacagcattaagtggaagtattgcagattacgaaaatcaaaaacaacaagaaaattatttagatgcatctaacaataaacgtcaagactatgacaatgcagtcaatgcggctaaaggtattttaaaccaaactcaaagtccgacaatgagtgctgatgtgattgatcaa

SEQ ID NO: 3154 - protein, 1095 aa, Artificial Sequence
  Description of Artificial Sequence: synthetic amino acid sequence
MTEATIQNYNAKRQKAEQVIQNANKIIENAQPSVQQVSDEKSKVEQALSELNNAKSALRADKQELQQAYNQLIQPTDLNNKKPASITAYNQRYQQFSNELNSTKTNTDRILKEQNPSVADVNNALNKVREVQQKLNEARALLQNKEDNSALVRAKEQLQQAVDQVPSTEGMTQQTKDDYNSKQQAAQQEISKAQQVIDNGDATTQQISNAKTNVERALEALNNAKTGLRADKEELQNAYNQLTQNIDTSGKTPASIRKYNEAKSRIQTQIDSAKNKANSILTNDNPQVSQVTAALNKIKAVQPELDKAIAMLKNKENNNALVQAKQQLQQIVNEVDPTQGMTTDTANNYKSKKREAEDEIQKAQQIINNGDATEQQITNETNRVNQAINAINKAKNDLRADKSQLENAYNQLIQNVDTNGKKPASIQQYQAARQAIETQYNNAKSEAHQILENSNPSVNEVAQALQKVEAVQLKVNDAIHMLQNKENNSALVTAKNQLQQAVNDQPLTTGMTQDSINNYVAKRNEAQSAIRNAEAVINNGDATAKQISDEKSKVEQALAHLNDAKQQLTADTTELQTAVQQLNRRGDTNNKKPRSINAYNKAIQSLETQITSAKDNANAVIQKPIRTVQEVNNALQQVNQLNQQLTEAINQLQPLSNNDALKAARLNLENKINQTVQTDGMTQQSIEAYQNAKRVAQNESNTALALINNGDADEQQITTETDRVNQQTTNLTQAINGLTVNKEPLETAKTALQNNIDQVPSTDGMTQQSVANYNQKLQIAKNEINTINNVLANNLDVNAIKTNKAEAERISNDLTQAKNNLQVDTQPLEKIKRQLQDEIDQGTNTDGMTQDSVDNYNDSLSAAIIEKGKVNKLLKRNPTVEQVKESVANAQQVIQDLQNARTSLVPDKTQLQEAKNRLENSINQQTDTDGMTQDSLNNYNDKLAKARQNLEKISKVLGGQPTVAEIRQNTDEANAHKQALDTARSQLTLNREPYINHINNESHLNNAQKDNFKAQVNSAPNHNTLETIKNKADTLNQSMTALSGSIADYENQKQQENYLDASNNKRQDYDNAVNAAKGILNQTQSPTMSADVIDQ

SEQ ID NO: 3155 - DNA, 1236 bp, Artificial Sequence
  Description of Artificial Sequence: synthetic nucleic acid sequence
atgtctaagttatcaattggacaaaatgatgttgtcaaaacaagtactaaaagacgcaatttaatcttcaaagtcaatccgacttatcagcgacaaaaatttgttgtggattatgttgcaaatcatgaaggacaggcaggaatcatttattgttccactcgtaagcaggtagaagaattacacgaagctctaaatagtgaaaaaattaagagcacaatttatcatgctggtttaacgaataaagagagaattgaggcgcaaaatgatttcttgtatgatcgtgtagaggttgtcattgcgacaaatgcatttggtatgggtattgataaatcaaatgtacgttatgtcattcactataacatgcctggagatttggaatcttactatcaggaagctggacgcgcgggacgtgatggtttaaaaagtgagtgtatccttttgtttagtgaacgagataagggattacatgagtattttattactgtatcccaagctgatgatgactataaagataaaatgggcgaaaaattaacgaaaatgattcaatataccaaaacgaaaaagtgtttagaagcgacaattgttcattattttgaacccaatgaaaatttagaggaatgcaatcaatgtagtaattgtatacaggaaaataaaacgtatgatatgactcgtgaagcgaaaatgattattagctgtattgctcgaatgaagcaacaggaaaattatagtgttattatacaagttttacgtggagaagtgacagattatataaaacaccatcattataatgaattaacgacacatgggttgatgaaaaattatacaacatctgagttatcacacttaattgatgagctacgtttcaaaggatatttaaatgaaaatgatgaaattcttatgtgtgatacatcagtgaaacaattactaaataatcataccaaggtttataccactccgttcaaacaaaaaactaaagagaaggtatttatcaacactgttgaaggtgtggatagagcgttatatcgtgagcttgttgatgtacgtaaacagctaagtgataaacttggaatagcacctgtaagtatattttctgattacacgctcgaagaatttgctaagcgtaaacctgaatcgaaacaagaaatgattgctattgatggtgtaggtagttataaattaaagcattattgtcctaagtttatcgaaaccatacaaagctataaaactagaatataa

SEQ ID NO: 3156 - protein, 411 aa, Artificial Sequence
  Description of Artificial Sequence: synthetic amino acid sequence
MSKLSIGQNDVVKTSTKRRNLIFKVNPTYQRQKFVVDYVANHEGQAGIIYCSTRKQVEELHEALNSEKIKSTIYHAGLTNKERIEAQNDFLYDRVEVVIATNAFGMGIDKSNVRYVIHYNMPGDLESYYQEAGRAGRDGLKSECILLFSERDKGLHEYFITVSQADDDYKDKMGEKLTKMIQYTKTKKCLEATIVHYFEPNENLEECNQCSNCIQENKTYDMTREAKMIISCIARMKQQENYSVIIQVLRGEVTDYIKHHHYNELTTHGLMKNYTTSELSHLIDELRFKGYLNENDEILMCDTSVKQLLNNHTKVYTTPFKQKTKEKVFINTVEGVDRALYRELVDVRKQLSDKLGIAPVSIFSDYTLEEFAKRKPESKQEMIAIDGVGSYKLKHYCPKFIETIQSYKTRI

SEQ ID NO: 3157 - DNA, 789 bp, Artificial Sequence
  Description of Artificial Sequence: synthetic nucleic acid sequence
gtggttttgttgagtaactcaaaaaaagtagccgttgtcacaggtgcagcacaaggtattggcttgaaaattgctgagcgtctatttgaagacggatatagcatcgcgcttgtagactttaatgaagaggtagctaaagagtcagctgaaaaattatcaaaagaagggcaagaggcagttgcttttaaagcagacgtttcaaatcgcgatcaagtatttagtgtgttaaatcaagtcgttgaacactttggcgatttaaatgtcctagttaataatgctggtcttggaccaatgacaccaattgaatcagtaacacctgaacaatttaatcaagttgtaggtgttaacgtaggtggtgtattctggggtatccaagctgcaattgaacaatttgataaattaggacatggcggtaaaattatcaatgccacatctcaagcaggtgttgaaggtaatgctggcttatctctatatagcagtactaagtttgctgttagaggattgactcaagtagcagcacgtgatttagctgagaaaaatattacagtcaacgcattcgcacctggtattgttgaaacaccaatgatgaaaggtatcgctgaaaagcttgctgaggaaaataaccaaccaatggaatggggttggaaacaatttacagatcaaattgccttaaaacgcttatctaaacctgaagatgtagctaatgtagtaagcttcttagcaggtagcgattcagattatattactggccaaacaatcatcgttgacggtggtatgagattccactaa

SEQ ID NO: 3158 - protein, 262 aa, Artificial Sequence
  Description of Artificial Sequence: synthetic amino acid sequence
VVLLSNSKKVAVVTGAAQGIGLKIAERLFEDGYSIALVDFNEEVAKESAEKLSKEGQEAVAFKADVSNRDQVFSVLNQVVEHFGDLNVLVNNAGLGPMTPIESVTPEQFNQVVGVNVGGVFWGIQAAIEQFDKLGHGGKIINATSQAGVEGNAGLSLYSSTKFAVRGLTQVAARDLAEKNITVNAFAPGIVETPMMKGIAEKLAEENNQPMEWGWKQFTDQIALKRLSKPEDVANVVSFLAGSDSDYITGQTIIVDGGMRFH

SEQ ID NO: 3159 - DNA, 1268 bp, Artificial Sequence
  Description of Artificial Sequence: synthetic nucleic acid sequence
gtgctcacttctaaagaaatcaaagaagctgatggaatcatcattgctgccgatagacaggtagatttatcaaggtttaatggtaaacctctcatcaatgaaagtgtacgtgaaggtattcatagacccaaggaattaatacaacgtgtgattgaccaagatgcacaaatttaccatgatcaaaatatttcttcaaatatgtctagagaccaggaagaatctcataaaagtaatattcaaatggtatatcagcatttaatgaatggtgtttccttcatggttccatttatcgtcgttggcggtttactcatagctattgccttaactcttggaggacacaccactccaaaaggattagttatccccgaagattcattttggaaatctattgaaaatattggtagtttatcgtttaaattcatggttcccatccttgctggttatatcgcggtgagtattgctgataagcctggtcttgttccaggtatgattggtggtgccattgctgctgatggtagtttatatggaagtgaagcaggagccggtttccttggtggtatcgtcgcaggtttcttagcgggctatattgcaaaatggattaaacagattaaagttcctaaagctatggctcctattatgcctattattattatacctattctatcttctttaatagttggtctcatttttatatttgtaataggcgcaccaatttcaaatatatttggtgcattaacatcatggttaaaaggaatgcaaggtgctaacatcattattcttgctcttattattggcgcgatgattgcttttgatatgggaggtccagtaaacaaagtagcattcttattcggttctgcattaattgctgaaggcaactacactgtgatgggaatggttgctgtagcagtatgtacaccaccgattggtttaggtttagctacatttgttcgtaaacaccaattcaataaagcagaacaagaaatgggtaaggcatcatttacgatgggattatttggtattactgaaggggcaatcccttttgctgcacaagatcctctaagaatcattccagccaatatgattggcgcgatgattgcttcagtaatagcggcggttggaggtgtcggtgataaagttgctcatggaggtcctattgtcgctgtactaggtggaataagtaatattttatggttctttatagctgttgtcgttggaagcttagtaaccatgttcacagtcttgttatttaagcgtcacacccctgcttt

SEQ ID NO: 3160 - protein, 423 aa, Artificial Sequence
  Description of Artificial Sequence: synthetic amino acid sequence
  MOD_RES (423): variable amino acid
VLTSKEIKEADGIIIAADRQVDLSRFNGKPLINESVREGIHRPKELIQRVIDQDAQIYHDQNISSNMSRDQEESHKSNIQMVYQHLMNGVSFMVPFIVVGGLLIAIALTLGGHTTPKGLVIPEDSFWKSIENIGSLSFKFMVPILAGYIAVSIADKPGLVPGMIGGAIAADGSLYGSEAGAGFLGGIVAGFLAGYIAKWIKQIKVPKAMAPIMPIIIIPILSSLIVGLIFIFVIGAPISNIFGALTSWLKGMQGANIIILALIIGAMIAFDMGGPVNKVAFLFGSALIAEGNYTVMGMVAVAVCTPPIGLGLATFVRKHQFNKAEQEMGKASFTMGLFGITEGAIPFAAQDPLRIIPANMIGAMIASVIAAVGGVGDKVAHGGPIVAVLGGISNILWFFIAVVVGSLVTMFTVLLFKRHTPAX

SEQ ID NO: 3161 - DNA, 1182 bp, Artificial Sequence
  Description of Artificial Sequence: synthetic nucleic acid sequence
atgcaattcgatacaattgagttggctatagaggctttaagaaatggagagagcattattgtagttgacgatgaagatagagaaaatgaaggagatcttgtagctgttacggaatggatggatgataataccattaattttatggctaaagagggtcgtggtctgatttgtgcaccaattgataaatctatagctgaaagattaaaactacaatctatggagcaaaataacactgatatttatggcacacattttactgtaagcattgatcattataaaactactacaggaatcagtgcacatgaacgtacacaaacggctagagcactcatagatgaaaatactaatcctgaagattttcatcgtccggggcacttatttccacttatagcaaaagagaatggtgtgttaacacgtaatggtcatactgaagctgccgtagatttggcacggttaacaggagcacaaccagctggagtaatctgcgaaattatgaatgatgatgggacaatggctaagggtgaagatctccagtcatttaaagaacgccaccatttaaaaatgattactataaaaagtttggttgcttttcgtaaggctgttgaacttaatgttaatcttaaggcaaaggtcaagatgccaactgattttggtcattttgatatgtatggatttacaacggattatagcgatgaagaaatcgtagctattgttaaaggagatttaaaaagcaatcctaatgtacgtatgcattctgcttgtctgactggggatatttttcatagtcaaagatgtgattgcggggcacaacttgaagcgtcaatgaaatatattgacgaacatggtggaatgattatttatttacctcaagaaggtagaggaatagggttaattaataagttgcgcgcatatgagttgatagaaaaaggttatgatacagttactgcaaatcttgctcttggttttgatgaggatttgagagattatcatgttgcagctgaaatattaaagtattttgatataagtgaaattaacttgctcagcaataatcctaaaaaatttgaaggtttagaagattacggcattgagatcgtagatagaattgaacttatcgttccagaaacacaatataaccatagttatatggaaactaaaaaaaataaaatgggacatttaatatag

SEQ ID NO: 3162 - protein, 393 aa, Artificial Sequence
  Description of Artificial Sequence: synthetic amino acid sequence
MQFDTIELAIEALRNGESIIVVDDEDRENEGDLVAVTEWMDDNTINFMAKEGRGLICAPIDKSIAERLKLQSMEQNNTDIYGTHFTVSIDHYKTTTGISAHERTQTARALIDENTNPEDFHRPGHLFPLIAKENGVLTRNGHTEAAVDLARLTGAQPAGVICEIMNDDGTMAKGEDLQSFKERHHLKMITIKSLVAFRKAVELNVNLKAKVKMPTDFGHFDMYGFTTDYSDEEIVAIVKGDLKSNPNVRMHSACLTGDIFHSQRCDCGAQLEASMKYIDEHGGMIIYLPQEGRGIGLINKLRAYELIEKGYDTVTANLALGFDEDLRDYHVAAEILKYFDISEINLLSNNPKKFEGLEDYGIEIVDRIELIVPETQYNHSYMETKKNKMGHLI

SEQ ID NO: 3163 - DNA, 462 bp, Artificial Sequence
  Description of Artificial Sequence: synthetic nucleic acid sequence
atgaattttgaaggtaaattagttggtaaggatttaaaaattgcgattgttgttagtagatttaatgattttattactacacgtctacttgaaggggctaaagatacacttattcgtcatgaagtagaagatacaaatattgatgtagcttatgtgcctggcgcattcgaaattccactcgttgcaaaaaaattagctcaaaaaggtgaatatgatgctgtgattacattaggatgtgtgattagaggcgcaacttcacattatgactatgtatgtaatgaagtagctaaaggtgtttctaaagcaaacgacatttcagatactccggtgatttttggagttctaacaactgaaagtattgaacaagcagttgaaagagctggtactaaagctggaaataaaggttcagaagcagcagttagtgcaatcgaaatggctaatctaattaagcaaatcaattaa

SEQ ID NO: 3164 - protein, 153 aa, Artificial Sequence
  Description of Artificial Sequence: synthetic amino acid sequence
MNFEGKLVGKDLKIAIVVSRFNDFITTRLLEGAKDTLIRHEVEDTNIDVAYVPGAFEIPLVAKKLAQKGEYDAVITLGCVIRGATSHYDYVCNEVAKGVSKANDISDTPVIFGVLTTESIEQAVERAGTKAGNKGSEAAVSAIEMANLIKQIN

SEQ ID NO: 3165 - DNA, 336 bp, Artificial Sequence; identical to SEQ ID NO: 2995
  Description of Artificial Sequence: synthetic nucleic acid sequence

SEQ ID NO: 3166 - protein, 111 aa, Artificial Sequence; identical to SEQ ID NO: 2996
  Description of Artificial Sequence: synthetic amino acid sequence

SEQ ID NO: 3167 - DNA, 1038 bp, Artificial Sequence
  Description of Artificial Sequence: synthetic nucleic acid sequence
atgcataataaacaaaagatattagattttatagaaaataataaatatgattatgttgaaataagtcatcgtattcatgaacgccctgaattaggcaatgaagaaatttttgcatcgagaacattaattgaccaattaagagcaaatcgattcgaaatcgaaacggatattgcaggacatgcaacaggatttatagcaacgtatgattctgatatgactggaccggttataggatttctagctgaatatgatgctttacctggtcttggtcacgcatgcgggcataatattattggtactgctagcgtacttgctgcagtagcactaaaagaagtcgtcgatgaaattggtggtaaagtagtcgttttgggatgtcctgctgaagaaggtggggaaaatggctccgcaaaagcttcttatgttaaagcaggtgtcattgatgaaattgatgtagcattgatgattcatcctggaaatgaaacttatcgtacaattaatactttagctgtggatgttctagatattaaattctatggacgtagtgcgcatgcatctgaaaatgcagatgaagcattaaacgctttagatgcaatgatttcatatattaatggtatagcacagttaaggcaacacattaaaaaaggacaacgagttcacggggttattttagacggtggtaaagcggctaatattatacctgattttacacatgcgagattttacactcgagctacttcgcggagagaacttgatgttttaactgaaaaagtaaaccaaattgcaagaggtgctgctattcaaactgggtgtgattttgaatttggtcctatccagaatggtgtaaacgaatttatcaaagcacctaaacttgatgatttatttgaaaaatatgcaactgaattaggagaagaagtgattgatgatgattttggctatggatctacagatacaggtaatgtaagtcatgttgtaccaacaatacatccacatattaaaattggttctcgaaatcttgttaggacatacccaccgctttag

SEQ ID NO: 3168 - protein, 345 aa, Artificial Sequence
  Description of Artificial Sequence: synthetic amino acid sequence
MHNKQKILDFIENNKYDYVEISHRIHERPELGNEEIFASRTLIDQLRANRFEIETDIAGHATGFIATYDSDMTGPVIGFLAEYDALPGLGHACGHNIIGTASVLAAVALKEVVDEIGGKVVVLGCPAEEGGENGSAKASYVKAGVIDEIDVALMIHPGNETYRTINTLAVDVLDIKFYGRSAHASENADEALNALDAMISYINGIAQLRQHIKKGQRVHGVILDGGKAANIIPDFTHARFYTRATSRRELDVLTEKVNQIARGAAIQTGCDFEFGPIQNGVNEFIKAPKLDDLFEKYATELGEEVIDDDFGYGSTDTGNVSHVVPTIHPHIKIGSRNLVRTYPPL

SEQ ID NO: 3169 - DNA, 462 bp, Artificial Sequence
  Description of Artificial Sequence: synthetic nucleic acid sequence
atgaatgtagaaagctttaatttagaccatactaaggttgttgcaccttttattcgtctagccgggactatggaaggtcttaatggtgatgtcatacacaaatatgacattcgtttcaaacagcccaataaggaacatatggatatgcctggtctacattccttagagcatttaatggcagaaaacattagaaatcatactgataaagtagtagatttaagtcctatgggttgtcaaactggattctatgtttcatttattaatcatgacgactacgatgacgtattaaatattatcgatcaaacattgcatgatgtgttaaatgctagcgaagtcccagcttgtaatgaggttcaatgtggttgggctgcaagtcattctttagaaggtgctaaaacaattgctcaagcatttttagataaaagagagcaatggaatgacatctacggagaaggtaaataa

SEQ ID NO: 3170 - protein, 153 aa, Artificial Sequence
  Description of Artificial Sequence: synthetic amino acid sequence
MNVESFNLDHTKVVAPFIRLAGTMEGLNGDVIHKYDIRFKQPNKEHMDMPGLHSLEHLMAENIRNHTDKVVDLSPMGCQTGFYVSFINHDDYDDVLNIIDQTLHDVLNASEVPACNEVQCGWAASHSLEGAKTIAQAFLDKREQWNDIYGEGK

SEQ ID NO: 3171 - DNA, 1068 bp, Artificial Sequence
  Description of Artificial Sequence: synthetic nucleic acid sequence
atgctaatagataaagcaagatcatttattcagaccatgtatagcgaattaaaatataatactaatgaaattgaaaatagaatgaaagagattgagcaagaaattaacttgactggtagttacacacatacttatgaagaattatcttacggtgcaaaaatggcatggagaaactcaaatcgttgtattggtagactgttttggaattctttaaatgttaaagatgcccgagatgtatgtgacgaaaaagaatttataaaatttatacatacacatattaaagaagctactaacggcggaaaaatcaaaccatatattacaatttttagtcctgaagatacacctaaaatttataataatcagttgattcgttatgctggttatgaaaatgttggcgatccatctgaaaaaaaggttactcgtttagctgaacatctaggttggaaaggtaaaggttcaaattttgatattttacctctgatttatcaattgcctaacgacactataaaaatacacgaacttccaaatgatattgtaaaagaagtttctatacatcatgaacactatcccaagctttcaaaattaggtttaaaatggtatgcggtacctattatttcaaatatggatttaaaaatcggtggtattacttaccctacagcaccttttaatggatggtatatggtaaccgaaattgctgtacgtaatttcacagacacctatcgttataatcttttagaaaaagttgcagaagcttttgaatttgatacacttaaaaataattcatttaataaagatcgagcactcgtagagttaaatcatgctgtgtatcattcatttaaagctgatggtgtttctattgttgaccacttaactgcagcgaagcaatttgaaatgtttgaacgaaatgaacatcaacaaaacagaaatgttactggtaagtggtcttggctggcacctccactttcaccaactttaacttctaactatcatcatggatatgataatacaatgcatcatacgaatttcttctataaaaaagaagaacctatgaagtgccctttccattaa

SEQ ID NO: 3172 - protein, 355 aa, Artificial Sequence
  Description of Artificial Sequence: synthetic amino acid sequence
MLIDKARSFIQTMYSELKYNTNEIENRMKEIEQEINLTGSYTHTYEELSYGAKMAWRNSNRCIGRLFWNSLNVKDARDVCDEKEFIKFIHTHIKEATNGGKIKPYITIFSPEDTPKIYNNQLIRYAGYENVGDPSEKKVTRLAEHLGWKGKGSNFDILPLIYQLPNDTIKIHELPNDIVKEVSIHHEHYPKLSKLGLKWYAVPIISNMDLKIGGITYPTAPFNGWYMVTEIAVRNFTDTYRYNLLEKVAEAFEFDTLKNNSFNKDRALVELNHAVYHSFKADGVSIVDHLTAAKQFEMFERNEHQQNRNVTGKWSWLAPPLSPTLTSNYHHGYDNTMHHTNFFYKKEEPMKCPFH

SEQ ID NO: 3173 - DNA, 1290 bp, Artificial Sequence
  Description of Artificial Sequence: synthetic nucleic acid sequence
atgatgaatccattagcccaaaaattgaatgatgaaataaagcaatcaagtccagaagtattagatatgatgtcacaattaggtaaagatatgttttatccaaaaggaattttatcgcaatctgccgaagcaaaacgcacaacatataatgctactattggtatggcaaccaaaaaagaaggtaaaatgtacgcaaattcacttaaccaaatgtttaatgaccttacaccggatgaaattttcccatatgcacctcctcaaggtgtagaggaattacgtgatttatggcagaaaaaaatgcttaaagaaaatcccgacttaaagtctaaatctatctctcgtcccatcgttacaaatgctctcacgcacggtctttctctagtagctgatttatttgtagatacagatgataccgtcttattaccgacacacaactggggtaattataaacttgtatttagcacacgtcacggtgctcatatcaatacgtattctatttttgatgactcaggtcacttcactacatctgaacttgtaaaaacattaaaagaatataaaaaagacaaagtgattattattttaaattatcctaataacccaactggttacacaccaaataaaaaagaagttaatactattgtaaatgcaattgaagaactagctaataaaggtactaaagtagtaactgttgtcgatgatgcatactatgggttattttatgaagaagtttaccaacagtcaattttcacggctttaacacaggtgaaatcttctaaccttttaccagtgcgtttggatggagctactaaagaattcttctcttgggggttccgagttggctttatgacgtttggaattgatcatgaaacgttaaaaaatgcgctagaagctaaagtaaaaggattaattcgtagcaatatttcaagttctccactaccttctcaaagtgcaatcaaacatgtacttaaatatcatgagcaatttgataaagaaatcgatcaaaatatcaatattttaaaagaacgctacgaagtaactaaacaagtagtgtatgataataaatatgccaaatattggcaagcctatgactttaattcaggatactttatgtcattgaaattaaatcaagtcgatccagaagaattacgtaaacatttaattaataactattcaattggtattattgctttaaatagtacagatattcgtattgcctttagttgtgtagaaaaagaagatattccttatgtctttgagtctattgctaatgcaattgatgatattaaataa

SEQ ID NO: 3174 - protein, 429 aa, Artificial Sequence
  Description of Artificial Sequence: synthetic amino acid sequence
MMNPLAQKLNDEIKQSSPEVLDMMSQLGKDMFYPKGILSQSAEAKRTTYNATIGMATKKEGKMYANSLNQMFNDLTPDEIFPYAPPQGVEELRDLWQKKMLKENPDLKSKSISRPIVTNALTHGLSLVADLFVDTDDTVLLPTHNWGNYKLVFSTRHGAHINTYSIFDDSGHFTTSELVKTLKEYKKDKVIIILNYPNNPTGYTPNKKEVNTIVNAIEELANKGTKVVTVVDDAYYGLFYEEVYQQSIFTALTQVKSSNLLPVRLDGATKEFFSWGFRVGFMTFGIDHETLKNALEAKVKGLIRSNISSSPLPSQSAIKHVLKYHEQFDKEIDQNINILKERYEVTKQVVYDNKYAKYWQAYDFNSGYFMSLKLNQVDPEELRKHLINNYSIGIIALNSTDIRIAFSCVEKEDIPYVFESIANAIDDIK

SEQ ID NO: 3175 - DNA, 906 bp, Artificial Sequence
  Description of Artificial Sequence: synthetic nucleic acid sequence
gtgcaggctagtcgaccaattttaattgttgcggatgaagtagaaggcgatgcacttactaatattgttttaaaccgtatgcgtggaacatttactgctgtagcagttaaagccccaggatttggtgatcgacgtaaagcaatgttagaagacctagcaatattaactggtgctcaagtcattactgatgatttaggtttagaacttaaagatgcatctcttgatatgctaggtactgctaataaagttgaagtgactaaagatcatacaacagtcgtagatggtaatggtgatgaaaataatattgatgctcgtgtaggtcaaattaaagcacaaattgaagaaactgattcagagtttgataaagaaaaattacaggaacgtttggcaaaactagctggcggcgtagctgttatcaaagtaggggctgcaagtgaaacagagcttaaagaacgtaaattaagaattgaagacgcattaaattcaacacgtgcggcggtggaagaaggtatcgttgctggtggtggtactgcgttagtcaatatatatcaaaaagtaagtgaaattaaagcagaaggtgatgttgaaacgggtgttaatatcgtattaaaagcattacaagcacctgttagacaaattgctgaaaatgcaggattagagggttcaattattgttgaacgtttaaaacatgctgaagcgggcgttggtttcaatgcagcaacaaatgaatgggttaatatgttagaagaaggtatagtagatccaactaaagtaactcgttcagcgttacaacatgcagcaagtgtagctgctatgttcttaacaactgaagcagtcgttgctagtattccagagccagaaaataatgaacaacctggaatgggtggcatgccaggtatgatgtaa

SEQ ID NO: 3176 - protein, 301 aa, Artificial Sequence
  Description of Artificial Sequence: synthetic amino acid sequence
VQASRPILIVADEVEGDALTNIVLNRMRGTFTAVAVKAPGFGDRRKAMLEDLAILTGAQVITDDLGLELKDASLDMLGTANKVEVTKDHTTVVDGNGDENNIDARVGQIKAQIEETDSEFDKEKLQERLAKLAGGVAVIKVGAASETELKERKLRIEDALNSTRAAVEEGIVAGGGTALVNIYQKVSEIKAEGDVETGVNIVLKALQAPVRQIAENAGLEGSIIVERLKHAEAGVGFNAATNEWVNMLEEGIVDPTKVTRSALQHAASVAAMFLTTEAVVASIPEPENNEQPGMGGMPGMM

SEQ ID NO: 3177 - DNA, 1470 bp, Artificial Sequence; identical to SEQ ID NO: 3067
  Description of Artificial Sequence: synthetic nucleic acid sequence

SEQ ID NO: 3178 - protein, 489 aa, Artificial Sequence; identical to SEQ ID NO: 3068
  Description of Artificial Sequence: synthetic amino acid sequence

SEQ ID NO: 3179 - DNA, 1164 bp, Artificial Sequence
  Description of Artificial Sequence: synthetic nucleic acid sequence
gtgttcaataaaatgtttaaagttgatgaatacttaggtgtaagtagttcaactgctgtcattattatttcatctattattggtataattggcattatttacttatttataggtggtttatcgttaagtgcttttagtgattcgatttatggcatggctttaattatagctggacttgcgattacaatattaggtctaggtcaattaggagatggcaacttcctacatggtttcgacaaaatcgtgcaagacacgcctgagaaattgaatggttttggtaaggtggactcggatgttgtaccttggccaaccctattcttcggtatgttctttaacaatttattcttctggtgcgcaaaccagatgatagttcaaaaagcactcgcagctaaaaatttaaaagaatctcaaaaaggtgcaatatatttaagcttatttaaagtgttcggacctttatttacagtcttaccaggcgtagtagcatttaactattttaatggtagtcttgataaatcagataacgcttaccctgcacttgtaacttcagtattaccagaatgggcattcggcttatttggtgcggttatttttggtgcaatattgagctcatttgttggctcattgaatagtacaactacactattaacactcgatttctataaacctatttttggaaaaaataaatcagataaacatattgctcgagtaggccatattgctactgtagtcattggagttattgttgtagcacttgcaccagtcatctcattattccctagtggtctttatgcagtagttcaacagtttaatggtgtgtatagtatgccagtgctagctttaattttaatcgctttcttttctaaacgcacatctaaattgggcgctaaagtgacactcttcacacatataattttatacgctataatcagctttgtatttacagaaattaattatctatacacatttagtgtattattctttgtagatttaattattattttgatttttaacaaagttaaactatctagtgagtttgatttaagcacgcaccaaccgaaagtagatatgacgccatggaaatatcgttacgttgcaggtattattgttcttgctttagtagtagtaagttatattatcttctcaccactcgtgttggcaaaataa

SEQ ID NO: 3180 - protein, 387 aa, Artificial Sequence
  Description of Artificial Sequence: synthetic amino acid sequence
VFNKMFKVDEYLGVSSSTAVIIISSIIGIIGIIYLFIGGLSLSAFSDSIYGMALIIAGLAITILGLGQLGDGNFLHGFDKIVQDTPEKLNGFGKVDSDVVPWPTLFFGMFFNNLFFWCANQMIVQKALAAKNLKESQKGAIYLSLFKVFGPLFTVLPGVVAFNYFNGSLDKSDNAYPALVTSVLPEWAFGLFGAVIFGAILSSFVGSLNSTTTLLTLDFYKPIFGKNKSDKHIARVGHIATVVIGVIVVALAPVISLFPSGLYAVVQQFNGVYSMPVLALILIAFFSKRTSKLGAKVTLFTHIILYAIISFVFTEINYLYTFSVLFFVDLIIILIFNKVKLSSEFDLSTHQPKVDMTPWKYRYVAGIIVLALVVVSYIIFSPLVLAK

SEQ ID NO: 3181 - DNA, 345 bp, Artificial Sequence
  Description of Artificial Sequence: synthetic nucleic acid sequence
atgcagattgaagaaaccttccgagacttgaaaagtcctgcctacggactaggcctacgccatagccgaacgagcagctcagagcgttttgatatcatgctgctaatcgccctgatgcttcaactaacatgttggcttgcgggcgttcatgctcagaaacaaggttgggacaagcacttccaggctaacacagtcagaaatcgaaacgtactctcaacagttcgcttaggcatggaagttttgcggcattctggctacacaataacaagggaagactcactcgtggctgcaaccctgcttactcaaaatctattcacacatggttacgttttggggaaattatga

SEQ ID NO: 3182 - protein, 114 aa, Artificial Sequence
  Description of Artificial Sequence: synthetic amino acid sequence
MQIEETFRDLKSPAYGLGLRHSRTSSSERFDIMLLIALMLQLTCWLAGVHAQKQGWDKHFQANTVRNRNVLSTVRLGMEVLRHSGYTITREDSLVAATLLTQNLFTHGYVLGKL

SEQ ID NO: 3183 - DNA, 1704 bp, Artificial Sequence
  Description of Artificial Sequence: synthetic nucleic acid sequence
atgaaacaatctaaagtatttataccaacgatgagagaagtccctgcagaggcggaagcattaagccatcgtttattattaaaagcagggttaattaaacagagtacaagtggtatatatagttacttaccacttgctacacgtgtactaaataatatatctaaaatcatacgtgaagaaatggaaagtatagatgctgtagaaattcttatgccagctttacaacaagcagaattatgggaagagtcaggacgttggagtgcatatggtccagaactaatgcgtttaaaagacagaaacggacgtgaatttgcattaggacctactcatgaggaagtagtcacttctttagtaagagatgaattaaaatcatataaacagttaccccttactttatttcaaattcaatccaaatatagagatgagaaaagaccacgctttggattattaagaggacgcgaatttcttatgaaagatgcatattccttccattcagatgaagcttcattagatgcaacttatcaagatatgtatcaagcatatagtcgcatattcaaacgtgtaggcatcaatgcaagaccggttgtggcagattcaggtgcaatagggggaagtcatacacacgagtttatggcattgagtgaaattggggaagatacaatagtttatagtaatgagagtgactatgcagcgaatattgaaaaggctgaagttgtttatcatccttctcataagcattctgcacttgcggaattgactaaagttgagacgcccaatgttaaaacagctcaagaagttgcagaatatttaaagagaccattagatgaaattgtaaaaactatgatctttaaaatagatggcgaatttattatgtttctagttcgtggacatcatgaattaaatgaagtgaaattaaaatcatatttcggcacggaacatgttgaaatggctactccagatgaaattgttaatcttgtagatgccaatccggggtctcttggtcctatttttgataaagatattaaaatttatgccgataattacttacaagatttaaataactttgttgtaggagctaatgaagatcattatcactatataaatgtcaatattggtagagactttgatgtaacagaatacggtgactttagattcattacacaaggtgagatgttaagtgatggctcgggagtagcacaatttgctgaaggcattgaagtaggacaagttttcaaattagggacaaaatattctgaatcaatgaatgcaacttttctagataatcagggaaaagctcaaccactcattatgggctgttatggtattggagtatcaagaacattaagtgcaattgttgaacaaaacaatgacgagaatggaattatttggccaaaatcagtaacgcctttcgatatccatctaattactatcaatcctaaaaaggatgatcaacgtactttaggtgatcaactttatcaaaaattaatggattcatacgatgttttatatgatgaccgaaaagaacgtgctggtgttaaatttaatgattcagacctaattgggttaccggtacgagttgttgttggtaaaagagctgaagaaggtattgttgaggtaaaacaacgcattaacggtttaagtgaagaagtgcaaattgatgaattagagtattacttacaagaattatttaagaatattaagtaa

SEQ ID NO: 3184 - protein, 567 aa, Artificial Sequence
  Description of Artificial Sequence: synthetic amino acid sequence
MKQSKVFIPTMREVPAEAEALSHRLLLKAGLIKQSTSGIYSYLPLATRVLNNISKIIREEMESIDAVEILMPALQQAELWEESGRWSAYGPELMRLKDRNGREFALGPTHEEVVTSLVRDELKSYKQLPLTLFQIQSKYRDEKRPRFGLLRGREFLMKDAYSFHSDEASLDATYQDMYQAYSRIFKRVGINARPVVADSGAIGGSHTHEFMALSEIGEDTIVYSNESDYAANIEKAEVVYHPSHKHSALAELTKVETPNVKTAQEVAEYLKRPLDEIVKTMIFKIDGEFIMFLVRGHHELNEVKLKSYFGTEHVEMATPDEIVNLVDANPGSLGPIFDKDIKIYADNYLQDLNNFVVGANEDHYHYINVNIGRDFDVTEYGDFRFITQGEMLSDGSGVAQFAEGIEVGQVFKLGTKYSESMNATFLDNQGKAQPLIMGCYGIGVSRTLSAIVEQNNDENGIIWPKSVTPFDIHLITINPKKDDQRTLGDQLYQKLMDSYDVLYDDRKERAGVKFNDSDLIGLPVRVVVGKRAEEGIVEVKQRINGLSEEVQIDELEYYLQELFKNIK

SEQ ID NO: 3185 - DNA, 1308 bp, Artificial Sequence
  Description of Artificial Sequence: synthetic nucleic acid sequence
gtgaatgaagaccctgaacgtaaaatcattatcgtttcagctccaggcaaaaggcataatgacgacattaaaactactgatttattaattcgtctctatgaaaaagtacttaataaattaaattatgaaagtaaaaaacaagaaattatccaaagatatgctgatatagtagaagaattaggtataggaaatgacattttaataacaattaatgacactttagaggaatacattaaacatctttctgacaaacctaaccgtttatatgatgctttattatcttgtggcgaaaattttaatgctcaattaatagcccagtataataatagtcaaggtattcctactcgttatatttctcctaaagaagctggattaactgtaactgatttaccacagcaagctcaaattttagattccgcatataatgaaatatacaaattgcgtgattatgatgaaaagctaattattcctggttttttcggagtttcaaagcaaaattatatcgttacgtttccacgcggtggttctgacataactggtgctatcatagcacgtggcgtccgagcctcactttatgagaacttcactgatgtatcaggaatatataaagctaatccgaatatcataaataatcctgaactcatagaggaaataacttatagagaaatgcgagagctatcttatgcaggatttggagtttttcacgatgaagctctacaacctttatacaaagatcgaattcccgtagttatcaaaaatactaatcgtccaaatgataaagggacctacattttacatgaccgtgaaatcgattctaaaaatgtcattagtggaattagttgtgataaaggctttactgtgattaatattaaaaaatatttaatgaatagattagttggatttacacgaaagattcttggcgttttagaagaatttaatatatcatttgaccacatgccttctggtattgataacataagtattatcatgcgtacaaatcaaattcaaggtaaagaaagtcaagttcttaatgccatacgcaaacgttgtgaagttgatgaattaagtatcgaccatgatttagcagtactaatgattgttggtgaaggtatgaatcaagttgttggtacagctagtaaaattactcacgccctttcagaatcaaacattaatttaataatgattaaccaaggtgcttctgaaatttcaatgatgtttggaattcatgaagcagatgctgaaaaagcagtattatctacgtacgaattttgttacaacggtgtttgtttaaaaaatttgtgtaaataa

SEQ ID NO: 3186 - protein, 435 aa, Artificial Sequence
  Description of Artificial Sequence: synthetic amino acid sequence
VNEDPERKIIIVSAPGKRHNDDIKTTDLLIRLYEKVLNKLNYESKKQEIIQRYADIVEELGIGNDILITINDTLEEYIKHLSDKPNRLYDALLSCGENFNAQLIAQYNNSQGIPTRYISPKEAGLTVTDLPQQAQILDSAYNEIYKLRDYDEKLIIPGFFGVSKQNYIVTFPRGGSDITGAIIARGVRASLYENFTDVSGIYKANPNIINNPELIEEITYREMRELSYAGFGVFHDEALQPLYKDRIPVVIKNTNRPNDKGTYILHDREIDSKNVISGISCDKGFTVINIKKYLMNRLVGFTRKILGVLEEFNISFDHMPSGIDNISIIMRTNQIQGKESQVLNAIRKRCEVDELSIDHDLAVLMIVGEGMNQVVGTASKITHALSESNINLIMINQGASEISMMFGIHEADAEKAVLSTYEFCYNGVCLKNLCK

SEQ ID NO: 3187 - DNA, 3840 bp, Artificial Sequence
  Description of Artificial Sequence: synthetic nucleic acid sequence
gtgaaatctgaagctagacaagcagtacagaataaagcaaatgaacagattaatcatattcaaaacacgcctgatgcaactaatgaagaaaaacaagaggcaataaatagagtaagtgctgaattagcaagagttcaagcacaaataaatgcagaacatacaacccaaggtgtcaaaactatcaaagacgacgcgataacttctttatctcgaattaatgcacaagttgttgagaaagagtctgcaagaaatgcaatcgaacaaaaggcaacacaacaaacgcaatttattaataataatgataatgctacagatgaagaaaaagaggtcgccaacaatttagttatcgctacaaaacaaaaatcattagataatattaactccttatcttcaaataatgatgttgaaaatgctaaagtagcaggaataaatgaaatagctaacgttttaccagcaaccgctgttaagtcaaaagcaaaaaaagatattgatcaaaaactcgcgcaacagattaatcaaattcaaacgcatcaaactgctacaactgaggaaaaagaagcggctattcaattggcaaatcaaaaatcaaatgaagcaagaacagcaattcaaaatgaacatagtaacaatggtgtcgcacaagctaaatctaacggcattcatgaaattgaattagttatgccagatgcgcacaaaaaatctgatgctaaacaaagtatcgataataaatataatgagcaaagtaatactatcaacactacaccagatgcaacagatgaagaaaagcaaaaagcattagataaattaaaaatagctaaagatgcaggatacaacaaagttgatcaagcgcaaacaaaccaacaagtatctgatgcaaaaactgaggctatagatacgataactaatattcaagcaaatgttgcaaaaaaaccatccgctcgagtggaattagattcaaagtttgaggatttaaagcgtcaaatcaatgcaacgcccaatgctacagaagaagaaaaacaagatgcaattcaaagattgaatggtaaaagagatgaagttaagaatctaataaatcaagatagacgtgacaatgaagttgaacagcacaaaaatattggacttcaagaattagaaacgattcatgctaatccaactagaaaatctgatgcgctccaagagttacaaactaaatttatttcacaaacagagttaattaataataacaaagatgcaactaatgaagaaaaagatgaagccaaacgacttcttgagattagtaaaaataaaactataacaaatatcaatcaagcgcaaactaataatcaagttgataatgctaaagataacggcatgaatgagattgctaccataataccagcaacaacaattaaaacagatgcaaaaacggctattgataaaaaagctgagcaacaagttacaatcatcaatggtaacaacgatgcaacagatgaagaaaaagcagaggctagaaagctggttgaaaaagcgaaaattgaagccaaatctaatattacaaatagtgatactgaaagggaagtcaatggtgctaaaaccaatgggttagaaaaaataaacaatattcaaccatcaactcaaactaaaacaaatgctaagcaagaaataaatgacaaagctcaagaacaattaatccaaattaataacacgcctgatgcaaccgaagaagaaaagcaagaggcaacaaatagagtcaatgctggattagcacaagcaatacaaaatattaataatgcacatagtactcaagaagtaaatgaatctaaaacaaatagtattgctacaatcaagagtgtacaacccaatgtgatcaaaaaaccgactgctataaatagtttgactcaagaagctaataatcaaaagacgttaataggtaatgatggtaatgctactgatgatgaaaaagaggctgcaaagcaattagtgacccaaaaattaaatgaacaaattcaaaaaattcatgaaagtacacaagataatcaagttgataacgtaaaagcacaagctatcactgcaattaaattgattaatgcaaatgcacataaaagacaagatgccattaatattttgactaatctagctgaaagtaaaaaatcagatataagagccaatcaagatgcaactactgaagagaaaaatacggcaatacaatctatagatgatacgttagcacaagcacgtaacaatattaatggtgcaaatacaaatgcgttagtggatgagaatttagaagatggtaagcaaaagttacaacgtattgtgttgtcaactcaaactaaaacacaagctaaagcagacattgctcaagcaataggtcaacaaaggtcgacaatagaccagaatcaaaatgctacaacagaagaaaaacaagaagcccttgagagacttaatcaagaaacaaatggagtcaatgatagaatacaagcagctttagcaaatcaaaatgttacagacgaaaaaaataatatattagaaacaataagaaatgttgaacctattgtaattgtaaaaccaaaggctaatgaaataattagaaaaaaagctgcggaacaaacgactttaataaatcaaaatcaagatgcgacactagaagaaaaacaaatagcacttggcaaattagaagaagtaaagaatgaagcgttaaatcaagtatcacaggcacactcaaataatgatgtgaaaattgtggaaaataatggaattgctaaaatttctgaggtccatcctgagactataattaaacgtaatgctaaacaagaaattgaacaagatgcgcaaagtcaaattgatactatcaatgcaaataataaatcaactaatgaagaaaaatcagccgctatagatagagttaatgtagctaaaattgatgctattaacaatattactaatgctacaactacacaattagttaatgatgctaaaaatagtggtaacacgagtattagccaaatattaccaagtacagcagtcaaaactaatgcattagcagctctagctagcgaagctaaaaataaaaacgctataatagatcaaacaccaaatgcgacagcagaagaaaaagaagaagcaaataataaagttgatcgtcttcaagaagaagcagatgctaatatcctaaaagcacacactactgatgaagttaataatattaaaaatcaagctgttcaaaatattaacgctgttcaagttgaagttatcaagaaacaaaacgctaaaaaccaattaaatcaattcattgataatcaaaagaaaattattgaaaatacgcctgatgcaacactagaagaaaaagctgaagctaatagattgcttcaaaatgtactaacttccacatcagatgaaattgctaatgtagatcataacaacgaggttgatcaagctttagataaagctagaccaaaaatcgaggcaattgtaccacaagttagtaagaaacgagatgctttaaatgcaatccaagaagcatttaattcacaaactcaagaaatacaagagaagcaagaagctacgaatgaagaaaaaactgaagcattaaataaaataaaccaattacttaatcaggctaaagtaaatattgatcaagcacagtcaaataaagatgtagatagtgcgaaaacacgtagtattcaagatatagagcaaattcaaccacatccacaaacaaaagcaaccgggcgtcacagattaaatgaaaaagctaaccaacaacaaagtactattgcaactcatcctaattcaacaattgaagaaagacaggaagcaagtgcaaaactacaagaagttcttaaaaaaagccatagctaa

SEQ ID NO: 3188 - protein, 1279 aa, Artificial Sequence
  Description of Artificial Sequence: synthetic amino acid sequence
VKSEARQAVQNKANEQINHIQNTPDATNEEKQEAINRVSAELARVQAQINAEHTTQGVKTIKDDAITSLSRINAQVVEKESARNAIEQKATQQTQFINNNDNATDEEKEVANNLVIATKQKSLDNINSLSSNNDVENAKVAGINEIANVLPATAVKSKAKKDIDQKLAQQINQIQTHQTATTEEKEAAIQLANQKSNEARTAIQNEHSNNGVAQAKSNGIHEIELVMPDAHKKSDAKQSIDNKYNEQSNTINTTPDATDEEKQKALDKLKIAKDAGYNKVDQAQTNQQVSDAKTEAIDTITNIQANVAKKPSARVELDSKFEDLKRQINATPNATEEEKQDAIQRLNGKRDEVKNLINQDRRDNEVEQHKNIGLQELETIHANPTRKSDALQELQTKFISQTELINNNKDATNEEKDEAKRLLEISKNKTITNINQAQTNNQVDNAKDNGMNEIATIIPATTIKTDAKTAIDKKAEQQVTIINGNNDATDEEKAEARKLVEKAKIEAKSNITNSDTEREVNGAKTNGLEKINNIQPSTQTKTNAKQEINDKAQEQLIQINNTPDATEEEKQEATNRVNAGLAQAIQNINNAHSTQEVNESKTNSIATIKSVQPNVIKKPTAINSLTQEANNQKTLIGNDGNATDDEKEAAKQLVTQKLNEQIQKIHESTQDNQVDNVKAQAITAIKLINANAHKRQDAINILTNLAESKKSDIRANQDATTEEKNTAIQSIDDTLAQARNNINGANTNALVDENLEDGKQKLQRIVLSTQTKTQAKADIAQAIGQQRSTIDQNQNATTEEKQEALERLNQETNGVNDRIQAALANQNVTDEKNNILETIRNVEPIVIVKPKANEIIRKKAAEQTTLINQNQDATLEEKQIALGKLEEVKNEALNQVSQAHSNNDVKIVENNGIAKISEVHPETIIKRNAKQEIEQDAQSQIDTINANNKSTNEEKSAAIDRVNVAKIDAINNITNATTTQLVNDAKNSGNTSISQILPSTAVKTNALAALASEAKNKNAIIDQTPNATAEEKEEANNKVDRLQEEADANILKAHTTDEVNNIKNQAVQNINAVQVEVIKKQNAKNQLNQFIDNQKKIIENTPDATLEEKAEANRLLQNVLTSTSDEIANVDHNNEVDQALDKARPKIEAIVPQVSKKRDALNAIQEAFNSQTQEIQEKQEATNEEKTEALNKINQLLNQAKVNIDQAQSNKDVDSAKTRSIQDIEQIQPHPQTKATGRHRLNEKANQQQSTIATHPNSTIEERQEASAKLQEVLKKSHS

SEQ ID NO: 3189 - DNA, 682 bp, Artificial Sequence
  Description of Artificial Sequence: synthetic nucleic acid sequence
gtgagcaaaaaaatggctaataaagagtcaaaaaatgttgttattattggcgctggtgtcttaagtacgacatttggttctatgattaaagaattagaacctgattggaacatcaaactctatgaacgcttagatcgtccaggtattgaaagttctaacgaaagaaacaatgccggtacaggacatgcggcgttatgtgaattgaactatacagtacaacaacctgatggttcaattgatatagaaaaagccaaagaaatcaacgaacaattcgagatttcaaaacaattctggggtcacttagtaaaaagtggtaacatcagtaaccctagagatttcattaatccacttcctcacattagtttcgtaagaggtaaaaataacgttaaattcttaaaaaaccgttacgaagcaatgcgtaacttccctatgttcgataacatcgaatatacagaagatatcgaagaaatgagaaaatggatgccattaatgatgacaggtcgtactggtaacgaaatcatggcggctagtaaaatcgacgaaggtacagatgttaactacggtgaattaactcgtaaaatggcaaaaagtattgaaaaacatccaaatgctgatgttcaatacaaccacgaagtaattaatttcaatcgtcgtaaagacggtatttgggaagttaaagtta

SEQ ID NO: 3190 - protein, 228 aa, Artificial Sequence
  Description of Artificial Sequence: synthetic amino acid sequence
  MOD_RES (228): variable amino acid
VSKKMANKESKNVVIIGAGVLSTTFGSMIKELEPDWNIKLYERLDRPGIESSNERNNAGTGHAALCELNYTVQQPDGSIDIEKAKEINEQFEISKQFWGHLVKSGNISNPRDFINPLPHISFVRGKNNVKFLKNRYEAMRNFPMFDNIEYTEDIEEMRKWMPLMMTGRTGNEIMAASKIDEGTDVNYGELTRKMAKSIEKHPNADVQYNHEVINFNRRKDGIWEVKVX

SEQ ID NO: 3191 - DNA, 858 bp, Artificial Sequence
  Description of Artificial Sequence: synthetic nucleic acid sequence
atgtttaaagatttttttaatcgaagcaagaaaaagaaatatttaacagttcaagattctaaacaaaatgatgtacctgctggtataatgacaaaatgtcctaattgcaaaaaaataatgtatacaaaagaattgaatgaaaatttaaatgtatgctttaattgtgatcatcatatagctttaaccgcatataaaagaatagaagcaatttcagacgatggatcatttatagaatttgatagaggtatgacatctgctaacccattagactttcctgggtatgaagaaaaaattgaaaaagatcagcaaaagactggacttaatgaagcgttagtgtctggtactgcgaaattagatggaatacaatatggtgttgcagttatggatgctcgttttagaatgggaagcatgggctctgtagttggtgaaaaaatatgcagaattattgattattgtacagaacatcgtttgccatttattctgttttctgcgagtggtggagctagaatgcaagagggaattatttctttaatgcaaatggggaaaacaagtgtttctttaaaaagacattctgatgcaggactattatatatttcttacataactaatcccactactggaggggtttctgcaagttttgcttcggttggagatattaatttaagtgaacctaaagcactaatcggatttgctggtagacgtgttatagaacaaacaattaatgaaaagttgcctgatgatttccaaactgctgagtttttattagagcatggtcaacttgataaagtcattcatcgaaaagatatgcgtgagactttatcaaatattttaaaaatccatcaagaggtgagtaactaa

SEQ ID NO: 3192 - protein, 285 aa, Artificial Sequence
  Description of Artificial Sequence: synthetic amino acid sequence
MFKDFFNRSKKKKYLTVQDSKQNDVPAGIMTKCPNCKKIMYTKELNENLNVCFNCDHHIALTAYKRIEAISDDGSFIEFDRGMTSANPLDFPGYEEKIEKDQQKTGLNEALVSGTAKLDGIQYGVAVMDARFRMGSMGSVVGEKICRIIDYCTEHRLPFILFSASGGARMQEGIISLMQMGKTSVSLKRHSDAGLLYISYITNPTTGGVSASFASVGDINLSEPKALIGFAGRRVIEQTINEKLPDDFQTAEFLLEHGQLDKVIHRKDMRETLSNILKIHQEVSN

SEQ ID NO: 3193 - DNA, 843 bp, Artificial Sequence
  Description of Artificial Sequence: synthetic nucleic acid sequence
atgctggaagcatcattaaaaagagaaactacaaaagtgtacactaatctaaaaccttgggatcgtgttcaaatcgctcgtttaccagaaagaccaaccacattagattatattccctatatttttgattcatttattgagttacatggcgatagaagttttagggatgatccagcaatgattggtggaattggttacttagatggtaagtctgtaacagttataggccaacaacgtggtaaagacacgaaagataatatttatcgtaattttggtatggctcacccagaagggtatagaaaagctttgcgtttaatgaaacaagcagagaaatttaatcgtccaatatttacttttatagatactaaaggtgcttatccgggtaaagcagctgaagaaagaggtcaaagtgaatcaattgcaaaaaatttgatggaaatggcttcattaacggtaccagttattgctgttgttattggtgaaggcggaagtggcggcgctttaggaattggaatctcaaatcgtgttctgatgcttgaaaatagtacttattcagttatttcacctgaaggagcagctgcacttttatggaaagatagtaacttagctcaaattgccgctgaaactatgaaaatcactgcgcatgatttactagatttaggtattatagatgaagtgattaatgagccacttggtggtgcgcaaaaagatgaagaagcacaagctttatcaattaagaaaatgttccttaaacatttaaatgaattaaagcaactcacacctgaagaattagcaaatgatcgttttgaaaaatttagaaaaattggttcagttgtggagtga

SEQ ID NO: 3194 - protein, 280 aa, Artificial Sequence
  Description of Artificial Sequence: synthetic amino acid sequence
MLEASLKRETTKVYTNLKPWDRVQIARLPERPTTLDYIPYIFDSFIELHGDRSFRDDPAMIGGIGYLDGKSVTVIGQQRGKDTKDNIYRNFGMAHPEGYRKALRLMKQAEKFNRPIFTFIDTKGAYPGKAAEERGQSESIAKNLMEMASLTVPVIAVVIGEGGSGGALGIGISNRVLMLENSTYSVISPEGAAALLWKDSNLAQIAAETMKITAHDLLDLGIIDEVINEPLGGAQKDEEAQALSIKKMFLKHLNELKQLTPEELANDRFEKFRKIGSVVE

SEQ ID NO: 3195 - DNA, 687 bp, Artificial Sequence; identical to SEQ ID NO: 2935
  Description of Artificial Sequence: synthetic nucleic acid sequence

SEQ ID NO: 3196 - protein, 228 aa, Artificial Sequence; identical to SEQ ID NO: 2936
  Description of Artificial Sequence: synthetic amino acid sequence

SEQ ID NO: 3197 - DNA, 819 bp, Artificial Sequence
  Description of Artificial Sequence: synthetic nucleic acid sequence
gtgataaaagtgaaatttgcagtaattggaaaccccatttctcattcattatcgccattgatgcatcatgctaattttcaatctttaaatttggaaaacacgtatgaagcgataaatgtaccagttaatcaatttcaagacattaaaaaaataatttcagaaaagagtattgatggattcaatgttactattccacataaagaacgtattattccgtacctagatgatattaatgaacaagcgaaatctgttggggcggtaaatacagttttagttaaagatggtaagtggattggttataatactgatggaattggttatgttaatggtttaaaacaaatatatgaaggtatagaagacgcttatatattaattttaggtgcaggtggagcaagtaaaggtatagcaaatgaattatataaaatcgttcgtccgactttaacagttgcaaatagaacgatgtctcgttttaataattggtcgttaaatattaacaaaataaatttaagccatgcagaaagccatttagatgaatttgatattataataaacactacacctgctggtatgaacggcaatacagattctgtaatttctttaaatcgtttagcttcacatactttagtaagtgatattgtttataatccatataaaacaccaatactaatagaagctgaacaaagaggtaatccaatctataatggtcttgatatgttcgttcatcaaggtgctgaaagttttaaaatttggactaatctagaaccagatataaaagcaatgaaaaacatagtaattcaaaaattgaaaggagaattatga

SEQ ID NO: 3198 - protein, 272 aa, Artificial Sequence
  Description of Artificial Sequence: synthetic amino acid sequence
VIKVKFAVIGNPISHSLSPLMHHANFQSLNLENTYEAINVPVNQFQDIKKIISEKSIDGFNVTIPHKERIIPYLDDINEQAKSVGAVNTVLVKDGKWIGYNTDGIGYVNGLKQIYEGIEDAYILILGAGGASKGIANELYKIVRPTLTVANRTMSRFNNWSLNINKINLSHAESHLDEFDIIINTTPAGMNGNTDSVISLNRLASHTLVSDIVYNPYKTPILIEAEQRGNPIYNGLDMFVHQGAESFKIWTNLEPDIKAMKNIVIQKLKGEL

SEQ ID NO: 3199 - DNA, 1128 bp, Artificial Sequence
  Description of Artificial Sequence: synthetic nucleic acid sequence
atgaataataaatatgaacctttatttaaatctttaacactacctaatggtgttgaagtaagaaatcgttttgttttagctcctcttacacatacttcatcaaatgatgatggaacaatttcagatatagaattaccttacattgagaaacgttctaaagatgttgggattgcaattaatgcagcaagtaatgttaatgatgtaggcaaagcatttcctggtcaaccttctgttgcacatgactcagatatcgaagggttaaaagaacttgctcaagttatgaagaaaaatggtgcgaaagcaatagtccaaattcatcatggaggtgctcaagctttaccagagttaacacctgatggagatgttgttgcaccaagtgccatttctcttaaaagttttggtcagcaaaaagaacatgatgctcgtgagatgactgctgaagaaattgaacaaactattagagactttggtgaagcaactagaagagcaattgaagcaggttttgatggcgttgaaattcatggcgcaaaccattatcttattcaccaatttgtttctccttactataatagaagaaatgatgtttgggctgataactataaattccctgttgctgttatagatgaagttgttaaagctaaaaaagctcatgcatatgatgattttattattggttacagattgtcacctgaagaagcggaatcaccaggtatttcaatggagataactgaagaattaattcaccaaatcgcaaataaaccacttgattatattcatgtgtcattaatggatgttaactcagttacgcgagaaggtaaatataaaggtgaaaatcgcttggaacttattcatcaatggataaatggacgtatgccgcttattggtataggttctgtctttacagctgaagatgcactaaatgctgttgaaaacattggagttgaatttgttgcgttaggttgtgaaattctacttgattatgattttgttgctaaaattaaagaaggtcgagaagacgaaattataaatgcttttgatcctaatcgtgaagaccaacattatctaacaccaaatctttgggaacagtttaatcaaggattctatccattacctcgaaaagacaaataa

SEQ ID NO: 3200 - protein, 375 aa, Artificial Sequence
  Description of Artificial Sequence: synthetic amino acid sequence
MNNKYEPLFKSLTLPNGVEVRNRFVLAPLTHTSSNDDGTISDIELPYIEKRSKDVGIAINAASNVNDVGKAFPGQPSVAHDSDIEGLKELAQVMKKNGAKAIVQIHHGGAQALPELTPDGDVVAPSAISLKSFGQQKEHDAREMTAEEIEQTIRDFGEATRRAIEAGFDGVEIHGANHYLIHQFVSPYYNRRNDVWADNYKFPVAVIDEVVKAKKAHAYDDFIIGYRLSPEEAESPGISMEITEELIHQIANKPLDYIHVSLMDVNSVTREGKYKGENRLELIHQWINGRMPLIGIGSVFTAEDALNAVENIGVEFVALGCEILLDYDFVAKIKEGREDEIINAFDPNREDQHYLTPNLWEQFNQGFYPLPRKDK

SEQ ID NO: 3201 - DNA, 1026 bp, Artificial Sequence
  Description of Artificial Sequence: synthetic nucleic acid sequence
gtgattgaattcaaaaatgttaacaaagtttttcgcaaaaaaagagaaactattcaagctttgaaaaatgtatcatttaagattgaccaacatgatatttttggtgttattggttatagtggtgctggtaaaagtacattagttcggttagtcaatcaacttgagacagtatcagatggtcaagttattgttgatggtcatgagattgatacatataaagaaaaagatttacgtgatattaaaaaagatatcggtatgatctttcaacatttcaatttgcttaattctaaatcagtctataaaaatgttgcaatgccacttattttaagtaagacaaataagaaagaaattaaggaaaaagttgacgaaatgttagaatttgtggggcttgctgataaaaaagatcaatttccagatgaattatcaggtggacaaaaacaacgtgttgccatcgcaagagcattagtaacgcatcctaaaatattattatgtgatgaagcgacaagtgctctggatccagctactacaagctcaattttaaatttattaagtaatgtgaatcgaacatttggtgtgacgattatgatgattacacatgaaatgagcgtaattcaaaaaatttgtcatcgtgtagctgtcatggaaaatggcgaagtgatagaaatggggacagttaaagatgtctttagtcatccacaaacgaacactgcaaaaaatttcgtttcgacggtgattaacactgagccttcaaaagagttacgggcctcttttaactcgagaaaagattcaaatttcacagattataaactgtttttagactctgaacaaattcaattgccaatattgaacgagcttatcaacgagcatcatcttaacgttaacgtattattttcttctatgtcagaaattcaagatgaaacggtttgttatttgtggttgagatttgagcatgatgagtcatttaatgattttaaacttactgattacctttcaaaacgacatattcggtatgaggaggttatataa

SEQ ID NO: 3202 - protein, 341 aa, Artificial Sequence
  Description of Artificial Sequence: synthetic amino acid sequence
VIEFKNVNKVFRKKRETIQALKNVSFKIDQHDIFGVIGYSGAGKSTLVRLVNQLETVSDGQVIVDGHEIDTYKEKDLRDIKKDIGMIFQHFNLLNSKSVYKNVAMPLILSKTNKKEIKEKVDEMLEFVGLADKKDQFPDELSGGQKQRVAIARALVTHPKILLCDEATSALDPATTSSILNLLSNVNRTFGVTIMMITHEMSVIQKICHRVAVMENGEVIEMGTVKDVFSHPQTNTAKNFVSTVINTEPSKELRASFNSRKDSNFTDYKLFLDSEQIQLPILNELINEHHLNVNVLFSSMSEIQDETVCYLWLRFEHDESFNDFKLTDYLSKRHIRYEEVI

SEQ ID NO: 3203 - DNA, 660 bp, Artificial Sequence
  Description of Artificial Sequence: synthetic nucleic acid sequence
atgtttggttcaagtttagattcatctcaattattacaagctctatacgaaacattgtatatggtgactgtatcacttgtaatcggtgctttaataggtatacctcttggcatcttgttagtggtaactagaaaaaacggtatatggtcgaatacaatattgcatcaagtattaaatcctatcattaatattttaagatcaattccgttcattattttattaatagccatagtgccttttactaaattgctagttggcacatctatcggcacaacagcagccatagtaccactcacggtttatgtagcaccttatatcgcacgcttagtagaaaactcattactggaagtcgatgacgggattattgaggcagctaaagcaatgggtgcatcacctcttcaaattatacgttattttttattgccagaagcacttggttcattaattctagctataactacagctattattggtctcataggtagtacagcaatggctggtgctgttggtggtggcggtataggtgatttggctttagtgtatggttatcaacgattcgatacaattgtcattgtgattacagtcattgtacttattattattgttcaaattatacaaacgttaggtaactttatcgctagggttatccgtagaaattaa

SEQ ID NO: 3204 - protein, 219 aa, Artificial Sequence
  Description of Artificial Sequence: synthetic amino acid sequence
MFGSSLDSSQLLQALYETLYMVTVSLVIGALIGIPLGILLVVTRKNGIWSNTILHQVLNPIINILRSIPFIILLIAIVPFTKLLVGTSIGTTAAIVPLTVYVAPYIARLVENSLLEVDDGIIEAAKAMGASPLQIIRYFLLPEALGSLILAITTAIIGLIGSTAMAGAVGGGGIGDLALVYGYQRFDTIVIVITVIVLIIIVQIIQTLGNFIARVIRRN

SEQ ID NO: 3205 - DNA, 1320 bp, Artificial Sequence
  Description of Artificial Sequence: synthetic nucleic acid sequence
atgaaaaatattaatcatgcagtacttgattctattgctgcatgtggagatgttaatcgtaatacgatgtgcaatcctaatccttatcaatctcaagtacataaggagattaatgattatgcaacgcgtataagtaatcacttacttccaagaacaaatgcatatcatgaaatttggcttgatggtgaaaaggttttagattcgagtgaggaaaaggaacctatttatgggaatacgtatttaccacgtaaattcaaaataggtattgcagtaccaccatctaatgatattgacgtctattctcaagatattggtttaatcgctatcgttgaacaagatgagttaattggatttaatgtgactatcggtggcggtatgggtatgactcatggtaatactgaaacatatcctcaacttggacgtctcataggttttatacctaaggaaaaggttgtagatgtatgtgagaaaatacttacaatacaacgtgattatggtaatcgtgaaaatcgaaaaaatgcacgttttaaatatacagtggaccgtctaggagaaacttgggtgactgaagaattaaaccgacgattaggttgggaaattaaagcgccacgtgatttcgaatttgaacataatggtgatcgattaggttggattgaaggtattaataattggaatttcactttatttatacaaaatgggcgtgtgaaagatactgaagactatttgttaaaaacaaccttaagagaaatcgcagaaatccatactggagatttcagattatcacctaatcagaacttagttattgcaaatgtttctcctgagaaaaaggaagaaatacaagctattattgataaatataaattaacagatggcaaaaattatacaggacttagaagaaattctatggcttgtgttgctttcccaacgtgtggtttagctatggcagaatctgaaagatatcttccttcactaattacaaaaattgaagatttattagatgagtctggtttaaaagaggaagaaataacgattcgtatgacaggttgtcccaatggatgtgcgagaccagcgctagcagaaatagcctttatcggtaaagcacctggtaaatataatatgtacttaggtggtagttttaaaggcgaacgtctaaataaaatatataaagagaatatcgacgaaaatgagatattagaaagtctacgtccattgttgttgcgttatagtaaagagcgtcttgacggagaacactttggggactttgtaattcgtgacggtgtgatagccaaagttcatgatggtcgcgattttcatagttaa

SEQ ID NO: 3206 - protein, 439 aa, Artificial Sequence
  Description of Artificial Sequence: synthetic amino acid sequence
MKNINHAVLDSIAACGDVNRNTMCNPNPYQSQVHKEINDYATRISNHLLPRTNAYHEIWLDGEKVLDSSEEKEPIYGNTYLPRKFKIGIAVPPSNDIDVYSQDIGLIAIVEQDELIGFNVTIGGGMGMTHGNTETYPQLGRLIGFIPKEKVVDVCEKILTIQRDYGNRENRKNARFKYTVDRLGETWVTEELNRRLGWEIKAPRDFEFEHNGDRLGWIEGINNWNFTLFIQNGRVKDTEDYLLKTTLREIAEIHTGDFRLSPNQNLVIANVSPEKKEEIQAIIDKYKLTDGKNYTGLRRNSMACVAFPTCGLAMAESERYLPSLITKIEDLLDESGLKEEEITIRMTGCPNGCARPALAEIAFIGKAPGKYNMYLGGSFKGERLNKIYKENIDENEILESLRPLLLRYSKERLDGEHFGDFVIRDGVIAKVHDGRDFHS

SEQ ID NO: 3207 - DNA, 345 bp, Artificial Sequence; identical to SEQ ID NO: 3181
  Description of Artificial Sequence: synthetic nucleic acid sequence

SEQ ID NO: 3208 - protein, 114 aa, Artificial Sequence; identical to SEQ ID NO: 3182
  Description of Artificial Sequence: synthetic amino acid sequence

SEQ ID NO: 3209 - DNA, 1011 bp, Artificial Sequence
  Description of Artificial Sequence: synthetic nucleic acid sequence
atggcaattaaagtagcaattaatggttttggtagaattggtcgtttagcattcagaagaattcaagatgtagaaggtcttgaagtagttgcagttaacgacttaacagatgacgatatgttagctcatttattaaaatacgatactatgcaaggtcgtttcactggagaagttgaagttatcgaaggtggattccgtgtgaacggtaaagaaattaaatcattcgatgaaccagatgctggtaaattaccatggggcgatttagatatcgacgtagtattagaatgtactggtttctatactgataaagaaaaagcacaagctcacatcgatgcaggtgctaaaaaagtattaatctcagctccagctaaaggtgatgtaaaaacaatcgtattcaacactaaccatgatacattagatggttcagaaacagttgtttcaggtgcttcttgtactactaactcattagcaccagttgcaaaagttttaagtgacgaattcggtttagttgaaggtttcatgactacaattcacgcttacactggtgaccaaaatacacaagacgcacctcacagaaaaggtgacaaacgtcgtgcacgtgcagcagctgaaaatattatccctaactcaacaggtgctgctaaagctatcggtaaagttattccagaaatcgatggtaaattagacggtggagcacaacgtgttccagttgctactggttctttaactgaattaactgtagtattagacaaacaagatgtaactgttgaccaagttaacagtgctatgaaacaagcttctgacgaatcattcggttacactgaagacgaaatcgtatcttctgatattgttggtatgacttacggttcattatttgatgcgactcaaactcgtgttatgactgttggagatcgtcaattagttaaagttgcagcttggtacgacaatgaaatgtcttacactgctcaattagtacgtacattagctcacttagctgaactttctaaataa

SEQ ID NO: 3210 - protein, 336 aa, Artificial Sequence
  Description of Artificial Sequence: synthetic amino acid sequence
MAIKVAINGFGRIGRLAFRRIQDVEGLEVVAVNDLTDDDMLAHLLKYDTMQGRFTGEVEVIEGGFRVNGKEIKSFDEPDAGKLPWGDLDIDVVLECTGFYTDKEKAQAHIDAGAKKVLISAPAKGDVKTIVFNTNHDTLDGSETVVSGASCTTNSLAPVAKVLSDEFGLVEGFMTTIHAYTGDQNTQDAPHRKGDKRRARAAAENIIPNSTGAAKAIGKVIPEIDGKLDGGAQRVPVATGSLTELTVVLDKQDVTVDQVNSAMKQASDESFGYTEDEIVSSDIVGMTYGSLFDATQTRVMTVGDRQLVKVAAWYDNEMSYTAQLVRTLAHLAELSK

SEQ ID NO: 3211 - DNA, 1239 bp, Artificial Sequence
  Description of Artificial Sequence: synthetic nucleic acid sequence
atgcaagattttagcaatttagttgaagaagttgaaaacacacttattccttactttagaaaaattgaaaagcgtgcattatttaatcaggaaaaggtcttaaatgcttttcaccatgttaaagctagcgaaagtgatttacaggggtctacgggttatggatatgatgattttgggagagaccatttagaacaaatttatgcgcacacatttaaagcagatgacgcacttgtaagacctcaaattatttcaggtactcatgctattactttagctttacaaagtacgttaaaaaacaatgatgaactactttatattacaggtagtccatatgatacacttctagaagtcattggtataaatggcaatggtgttgaaagtcttaaagaatatggtgttcgctataatgaagtcgaattacgtgacggtcgaattgatattcctaaagtcatcactgcaattaatgacaatacaaaagttgtagcaattcaacgatcaaaaggatatgatcaacgtccatcaattacaattaatgaaattgaacaagcaataacatctattaaagaggtttatcccaatatcattatttttgttgataattgttatggagaatttgtagaagataaagaaccgattgaagtaggtgctgatttaatcgccggatcattaattaaaaatccaggtggaggtttagctaaaattggaggatatattgctggtagacaagacttaattgaacgctgtggttatcgtttaacagcaccaggcattggtaaggaagcaggagcctcacttaattctttacaagaaatgtatcaaggattctttctagcgccacatgtggttagccaaagtttaaaaggtgcactgtttactagtttgttattagaaaaaataaacatgaagacctcccctaaatataatgtttatcgtacagacttaattcaaacggttcaatttgagaccaaagagcaaatgatttcattttgccaaagtatacaacacgcttcaccaattaacgcacattttagtccagaacctagctatatgcctggatacgaagatgatgtcatcatggctgcaggtacatttattcagggctcgtctattgaattatccgcagacggacctatacgtccgccttatgaagcatatgttcaaggtggtttaacttatgaacatgtcaaattagctgttacacgtgcggtgcaacatatgcaagaaaacaatttactataa

SEQ ID NO: 3212 - protein, 412 aa, Artificial Sequence
  Description of Artificial Sequence: synthetic amino acid sequence
MQDFSNLVEEVENTLIPYFRKIEKRALFNQEKVLNAFHHVKASESDLQGSTGYGYDDFGRDHLEQIYAHTFKADDALVRPQIISGTHAITLALQSTLKNNDELLYITGSPYDTLLEVIGINGNGVESLKEYGVRYNEVELRDGRIDIPKVITAINDNTKVVAIQRSKGYDQRPSITINEIEQAITSIKEVYPNIIIFVDNCYGEFVEDKEPIEVGADLIAGSLIKNPGGGLAKIGGYIAGRQDLIERCGYRLTAPGIGKEAGASLNSLQEMYQGFFLAPHVVSQSLKGALFTSLLLEKINMKTSPKYNVYRTDLIQTVQFETKEQMISFCQSIQHASPINAHFSPEPSYMPGYEDDVIMAAGTFIQGSSIELSADGPIRPPYEAYVQGGLTYEHVKLAVTRAVQHMQENNLL

SEQ ID NO: 3213 - DNA, 366 bp, Artificial Sequence
  Description of Artificial Sequence: synthetic nucleic acid sequence
atgtctaatgattcaatcagacgaaacatggccgttttctctatgagtgtggttagtaaattgacagatttatcaccaagacaaattcgttactatgaaacacatgaacttgtgatgcctgaaagaacagatggaaataagagattattttctatgaacgatttagagaggttgttagaaataaagtctcttatcgaaaagggatttaatattagaggtattaaacaaattatattcgatgagcaagggcatttaactactgatgaacaagagacaagaaagagaatgattgttgacgcaacgcagaaaccacgtagtgaaacattaccaataaatcgcggcgatttatctcgatttattaaatga

SEQ ID NO: 3214 - protein, 121 aa, Artificial Sequence
  Description of Artificial Sequence: synthetic amino acid sequence
MSNDSIRRNMAVFSMSVVSKLTDLSPRQIRYYETHELVMPERTDGNKRLFSMNDLERLLEIKSLIEKGFNIRGIKQIIFDEQGHLTTDEQETRKRMIVDATQKPRSETLPINRGDLSRFIK

SEQ ID NO: 3215 - DNA, 345 bp, Artificial Sequence
  Description of Artificial Sequence: synthetic nucleic acid sequence
atgaaagaaatgttaatcgatgcgaaagaaaacggttatgcggttggtcaatacaatcttaataacctcgaatttacacaagctattttagaagcgtctcaagaagagaatgcgccagttattttaggtgtttctgaaggggcagctcgttatatgagtggtttttatacagttgtgaaaatggtagaaggtttaatgcatgacttaaacatcacaatcccagtagcaattcatttagaccacggttcaagctttgaaaaatgtaaagaagcaattgatgctggattcacatctgtaatgattgatgcatctcatagtccttttgaagaaaatgttgaaatatag

SEQ ID NO: 3216 - protein, 114 aa, Artificial Sequence
  Description of Artificial Sequence: synthetic amino acid sequence
MKEMLIDAKENGYAVGQYNLNNLEFTQAILEASQEENAPVILGVSEGAARYMSGFYTVVKMVEGLMHDLNITIPVAIHLDHGSSFEKCKEAIDAGFTSVMIDASHSPFEENVEI

SEQ ID NO: 3217 - DNA, 747 bp, Artificial Sequence
  Description of Artificial Sequence: synthetic nucleic acid sequence
gtgagtggtcactcattttatcggtgtgaggaggaacaatttatgatagaggtaaaaaatgtaagtaaatcctttggtaaacaacaagtggtagatgatatatctatatcatttaatgctggtgaggttgtgggtctaatcggtccttcaggtactggaaaaacgacattaatacagtgcattttaggcatggagaaaattgatggtgggcaagtcactattcaagaacatacaatgccgaatagaaagatattatcaaatattggttatatggctcaaaatgatgctttatataatgatttaactggacgtgaaaatttaacgtttttcgcaagaatttatatgcgtgataaagaagatattaaaaaacgtgtgaacctatgcagttccatggttcaattagacaatgatttagataagaaagttgaaatgtattctggtggaatgaaacgacgcttatctttagctattagctttttacaaaatcctaatatccttatattagacgaacctacagttggcattgatcctaaattgcgtcagacgatttggaaggatttaactaaagcaaaggctgaagataaatgcattatagtgacaacgcatgtattagatgaagctacacgctgtgataagctcgtattaatgaatcaaggaaagatattggcaacgggtacaccagatgaagtgaaaaaacaatatcacacagatacgattgaaggcgtatttctgaatatggagggataa

SEQ ID NO: 3218 - protein, 248 aa, Artificial Sequence
  Description of Artificial Sequence: synthetic amino acid sequence
VSGHSFYRCEEEQFMIEVKNVSKSFGKQQVVDDISISFNAGEVVGLIGPSGTGKTTLIQCILGMEKIDGGQVTIQEHTMPNRKILSNIGYMAQNDALYNDLTGRENLTFFARIYMRDKEDIKKRVNLCSSMVQLDNDLDKKVEMYSGGMKRRLSLAISFLQNPNILILDEPTVGIDPKLRQTIWKDLTKAKAEDKCIIVTTHVLDEATRCDKLVLMNQGKILATGTPDEVKKQYHTDTIEGVFLNMEG

SEQ ID NO: 3219 - DNA, 1695 bp, Artificial Sequence
  Description of Artificial Sequence: synthetic nucleic acid sequence
atggcaaagattagggattatgttacagaatatgcaaaaaaagtagttaatggcgatattatagctagtaaaaaaaacgtgaaagcctgtcaacgccatttagatgacttgaacgattcggaactcccttatcattttgatgtaaagaaagctaatcacattattaagtttcttgaaatgttgccagatcctaaaactggtaaacaattatcgttaggcggttttcaaaaattcattgctggtagcttaaatggttggtacgacagacatgggtacaaaagatttacaaaagcctatatatcaatgagcagaaaaaatggtaaaacattattgatctctggaatggcattgtacgatttattgatgggtaaagatccgttgaatgaacggttgattggtttgagcgccaattcaagagaccaagctggtatagcatacgatatgacattggcacaactgaaagctattagaagcgtttctcctaaggttaaatcgatgactaagataacgccaagtgcaaaagaaatattgaatattaatgatcgaagtaaagttaaagccgtttcaaatgaagctgcaaatttagaaggtcatcagtttagctacgcaatcatcgatgaatatcatgaagctaaagataaaaagatttatgaaacgttaagacgtgggcaagtgctactgcacaaccctatattaattattatctcaacagctggaactaatttgaatggtccgatgtatgaagaatatttatatattgataagatacttgacggcatagcaaaaaatgaaaactactttgttttctgtgctgaacaagatgatgagaaagaagtatatgacgttaaaacttggattaaatccaatccacttatggagttgccagaaatggcacaattgttaactaagaatattcaaccagaagttaaaactgcaattgatagtggttcaggattaaatgggatattaataaagaatttcaatatgtggcgtgcagcaagcacagaatcttatttagatttcaatgattggaagaaaaatgaaatagactttgatataaatggctctaaaacttatatcggtttagacttatcgcgtgctgacgacttaaccgcagtatcgtttgttcatcttgatgaagataatcaagagtattatgtaactagtcattcgtttgtggctactaaaggtggattagatggcaagattgatagagactttattgattacagacaacttgcagaaagtggttattgtacgattaccgatttacaaagtggaattatcaatactgaccaagttttaaattacattgagaattatatcgaccaatataaattagacgtacaagcgttatgttatgatccttactcaatacatggtgttattgcagaaattgagcgtagagattggccttatgatttagtagaaatcagacaagggccacaaacactatctaatccgatactggattttagactgaaagtgattaatggggacatcaagcatcataaaaatccgttactagacattgcagtcaaaaatgctgtggcaaaagataccaatgactcattaatgattgaaaagaagatgaaccgagaaaaaatagatccactcatggctaccatatttgcttatgttatggcttgtgaacatgaatgggacacagaaactttaatgccattgttcttatag

SEQ ID NO: 3220 - protein, 564 aa, Artificial Sequence
  Description of Artificial Sequence: synthetic amino acid sequence
MAKIRDYVTEYAKKVVNGDIIASKKNVKACQRHLDDLNDSELPYHFDVKKANHIIKFLEMLPDPKTGKQLSLGGFQKFIAGSLNGWYDRHGYKRFTKAYISMSRKNGKTLLISGMALYDLLMGKDPLNERLIGLSANSRDQAGIAYDMTLAQLKAIRSVSPKVKSMTKITPSAKEILNINDRSKVKAVSNEAANLEGHQFSYAIIDEYHEAKDKKIYETLRRGQVLLHNPILIIISTAGTNLNGPMYEEYLYIDKILDGIAKNENYFVFCAEQDDEKEVYDVKTWIKSNPLMELPEMAQLLTKNIQPEVKTAIDSGSGLNGILIKNFNMWRAASTESYLDFNDWKKNEIDFDINGSKTYIGLDLSRADDLTAVSFVHLDEDNQEYYVTSHSFVATKGGLDGKIDRDFIDYRQLAESGYCTITDLQSGIINTDQVLNYIENYIDQYKLDVQALCYDPYSIHGVIAEIERRDWPYDLVEIRQGPQTLSNPILDFRLKVINGDIKHHKNPLLDIAVKNAVAKDTNDSLMIEKKMNREKIDPLMATIFAYVMACEHEWDTETLMPLFL

SEQ ID NO: 3221 - DNA, 1191 bp, Artificial Sequence
  Description of Artificial Sequence: synthetic nucleic acid sequence
atgaacagagatttagaacgattattgtattggcaagaacatggcacacatgcaagctatgttggtataaacgcgctacgtaacagtgatgtatttactgctacacgtattatatctgcagacattgcaagtaccaagttgaaagttaaaggtcacgaaacaaatacagtgatggaccaaatactggatctatttaataacaatccgtattcggacttaccgggttggcactttaagtttataatcatcgcgaatatgctgcttaacggtcaatcttttgttgaaattgtgcgtggcaaaaatgattttcctgttggattccacttcttacataacgacttagtaggaattgaggaaaaagacggcgaaattatttacaacgtaagtgaagatgtggaaggtaatgccgttaagataacaagcgatgatatattacatttcagatatatcacattagatggatatataggatacagtccgttgtatgcactagcacatgagattggtatttctcaaggctctaagagcttcctgcgtaacttcttcgataatggtgggacttcgacatcagtattgaagtatagaaaagggcaaatcaatgctgaacaattaagagaattgaaaaagaacttttcagaaagtcaattaaaaaacaacggtggtttagttgctatcgatgacacaatggaatttaacagactacaaattcctaccgaagtattgaacttcttaaatagttataagttcagcacatctcaagttgctaaagcgttcggtttgccggtatctaaactaggtattgaaacagtcaatacatctatcacacaagcaaacttagagtatttgcaaagtacattagatccaatatttaaaatgatgattgctgaactcgaaacgaaaatatttaaatttattgattctggtaacgaattagagtttgactcatcacgtctcattgacattgatccagagttacaattacaacgtattactgaattgcatagtaaaggaattatttcaacagacgaagctagaagtgtatttggctatcaacctattgaacatggcgagcaaccattggttgatcttaacagagcgccacttaacactttagaaaattaccaaaaatcgaaaattgacaaagaagtcgaaaagaactccattaaagggggtgatgagtatgacgaatag

SEQ ID NO: 3222 - protein, 396 aa, Artificial Sequence
  Description of Artificial Sequence: synthetic amino acid sequence
MNRDLERLLYWQEHGTHASYVGINALRNSDVFTATRIISADIASTKLKVKGHETNTVMDQILDLFNNNPYSDLPGWHFKFIIIANMLLNGQSFVEIVRGKNDFPVGFHFLHNDLVGIEEKDGEIIYNVSEDVEGNAVKITSDDILHFRYITLDGYIGYSPLYALAHEIGISQGSKSFLRNFFDNGGTSTSVLKYRKGQINAEQLRELKKNFSESQLKNNGGLVAIDDTMEFNRLQIPTEVLNFLNSYKFSTSQVAKAFGLPVSKLGIETVNTSITQANLEYLQSTLDPIFKMMIAELETKIFKFIDSGNELEFDSSRLIDIDPELQLQRITELHSKGIISTDEARSVFGYQPIEHGEQPLVDLNRAPLNTLENYQKSKIDKEVEKNSIKGGDEYDE

SEQ ID NO: 3223 - DNA, 522 bp, Artificial Sequence
  Description of Artificial Sequence: synthetic nucleic acid sequence
atggttgtcgaaggttacgccattatctttaattcaatgagtgatgatttgggtggatttagagaaattgtagcgcctaatgctttaaatgatgtagatgtaagtgatgtgaaatgtctaatcaatcatgattttagttatgttataggacgcacacaagcaggaacgcttgagctacaggtggatgaaaaagggctatactttaaatgccacttacctaatacatcatacgcaagagatatttatgagaatattaaagcaggcaacgttaatcagtgcagtttcttttacacattgccacctaatgactcaacggctcgtacgtggcaaaacatagataatgagtacgttcaaaccataaataaaatcgatgaattgattgaggttagtattgttacagtgccagcctacaaagatacatcggttgaagtcggtcaacgtgcgaaagacttaaagaaattcaaacagttggaacaaatgaagatagcattggatttagaaagcctacgttttgaaacgtaa

SEQ ID NO: 3224 - protein, 173 aa, Artificial Sequence
  Description of Artificial Sequence: synthetic amino acid sequence
MVVEGYAIIFNSMSDDLGGFREIVAPNALNDVDVSDVKCLINHDFSYVIGRTQAGTLELQVDEKGLYFKCHLPNTSYARDIYENIKAGNVNQCSFFYTLPPNDSTARTWQNIDNEYVQTINKIDELIEVSIVTVPAYKDTSVEVGQRAKDLKKFKQLEQMKIALDLESLRFET

SEQ ID NO: 3225 - DNA, 1353 bp, Artificial Sequence
  Description of Artificial Sequence: synthetic nucleic acid sequence
atggctaatttagatgagcgcaaaaaagaaatcgctaatctgatttctaaagcgcaagaagcagtcgaaaaaggcgacctcgaaactgctcgtaatttaaaagctgatattgatgctcaaaagaaagagtacgaagaactcgaacagctttcaaaagaaattgaagcgtcagcacctaaacaagatgaaccacctaaagatgaaggtgcagaagttgaagataacaaagatggtaattctggagaagaatcagagaacaaaccttctgatgatgaaccagaaggaacttcagatgaagaaaaacctgatgatgcaccaaaaccagatgacaaacctgaagaaacaccagaaacacctactattgaaaaagtagaagaaccaacagaagaagaattaaaaaaagaaaaagacaaaaaagaaggagcgaaacgttctatggctaaattaaaccaaaatccagagacaaacgaagaaattctagcatttgaacagtacatgaaatcaaaaggggctaaacgtgacaatgttaaatctgatgacgttggcgtaactatcccagaggatattaaatatattcctgaaaaagaagttaagacagtccaagacttatcagaattggtacaaaaaacttcagtatcaactgcaagtgggaaatacccgatcttaaaacgtgctaacgctaaattcaacactgttgctgaattagagaaaaaccctgagttagctcgtccggaattcgaaacaatcaattgggaagtagacacttatcgtggatctattccgatttcacaagaagcattagatgattcagttgctaacttaactgctattgtttctgaaaatattaacgaacaaaaaatcaacactttaaatgaacgtattggtgaagttttaaaagcattcaatcctactagtgtttctaatgttgacgacttaaaagaaattatcaacgttaaattagatcctggttatgaccgccaaattatctgtactcaaagtttctatcaaaaactagatacattaaaagatggtaacggtcgttatttactacaagacagtatcatcaacactgcaggtaacactgtgttaggtatgaatgtaacagttgtgcgtgatgacttgttaggtaaaaatggagatgcattagcatttattggtgatgtaaaacgcggtgtgttatttgcagaccgtacagacgtttctgttcaatggattgaaaatgaaatctacggtaaatacttaatgggtgctttccgtttcgatgtgaaacaggctgataaaaatgctggtttcttcgtaacatttgaagagcgtttatattacttcatattgggcaatggatgtatacgatga

SEQ ID NO: 3226 - protein, 450 aa, Artificial Sequence
  Description of Artificial Sequence: synthetic amino acid sequence
MANLDERKKEIANLISKAQEAVEKGDLETARNLKADIDAQKKEYEELEQLSKEIEASAPKQDEPPKDEGAEVEDNKDGNSGEESENKPSDDEPEGTSDEEKPDDAPKPDDKPEETPETPTIEKVEEPTEEELKKEKDKKEGAKRSMAKLNQNPETNEEILAFEQYMKSKGAKRDNVKSDDVGVTIPEDIKYIPEKEVKTVQDLSELVQKTSVSTASGKYPILKRANAKFNTVAELEKNPELARPEFETINWEVDTYRGSIPISQEALDDSVANLTAIVSENINEQKINTLNERIGEVLKAFNPTSVSNVDDLKEIINVKLDPGYDRQIICTQSFYQKLDTLKDGNGRYLLQDSIINTAGNTVLGMNVTVVRDDLLGKNGDALAFIGDVKRGVLFADRTDVSVQWIENEIYGKYLMGAFRFDVKQADKNAGFFVTFEERLYYFILGNGCIR

SEQ ID NO: 3227 - DNA, 453 bp, Artificial Sequence
  Description of Artificial Sequence: synthetic nucleic acid sequence
gtggtggtaatacatctacatttattgcattatcgtcagtatggacaagctggtgcatctattattttattaatagtaaatattttaagtgatgaccaattaaaagaattgtattcatatgcaacaaaccataatttagaagctctagtagaagttcatacaattagagaacttgaacgtgcacaccaaattaaccctaaaattattggtgttaataatcgtgatttaaaacgatttgaaaccgatgttctacatacaaataaattacttaagtttaaaaagtctaattgctgctacatttcagagagtggcattcatacaaaagaagatgttgagaaaatagtagattcaagtattgacggtttacttgtaggggaggcattaatgaaaacaaatgacttaagtcagtttttgcctagtttaaagttaaagaagaatctctatgatagttaa

SEQ ID NO: 3228 - protein, 150 aa, Artificial Sequence
  Description of Artificial Sequence: synthetic amino acid sequence
VVVIHLHLLHYRQYGQAGASIILLIVNILSDDQLKELYSYATNHNLEALVEVHTIRELERAHQINPKIIGVNNRDLKRFETDVLHTNKLLKFKKSNCCYISESGIHTKEDVEKIVDSSIDGLLVGEALMKTNDLSQFLPSLKLKKNLYDS

SEQ ID NO: 3229 - DNA, 426 bp, Artificial Sequence; identical to SEQ ID NO: 3141
  Description of Artificial Sequence: synthetic nucleic acid sequence

SEQ ID NO: 3230 - protein, 141 aa, Artificial Sequence; identical to SEQ ID NO: 3142
  Description of Artificial Sequence: synthetic amino acid sequence

SEQ ID NO: 3231 - DNA, 615 bp, Artificial Sequence
  Description of Artificial Sequence: synthetic nucleic acid sequence
gtgcctatcaaaattaataatccagtggtagttaacacgagtttagagtgtaaggataattttctaaaacttttggcgttccacaaatcaaccacgactaaatgtcccaaacctcccaaaatgataagtattggaatagtgataatgattaccggatcatttgaaaaatcgattaagttgtttttaaaaagggcgaatcctgcgttgttaaatgcggaaactgaagtgaataaacttaaaaatagacctttacctatgccaaattttggaataaacgataaacatagacaaagtgtaccaaataattcagtggcgatgctgtatatggctagatgtttaataagtttaattacaccaccgggttcgtcaatattccaagtaatcataaataaaattctattgttaattgatattttcttatttaaaaagatgagagttagcattgctacagtgacaatacctaatccaccaatttgtataagtaataagataatgatttctccaaaaatattaaattgtgttccaacatcaactggtgatagacctgttactgtgaatgcgctagaagctacaaacaatgcgtcaataaagttaataggtttcttccctgtatag

SEQ ID NO: 3232 - protein, 204 aa, Artificial Sequence
  Description of Artificial Sequence: synthetic amino acid sequence
VPIKINNPVVVNTSLECKDNFLKLLAFHKSTTTKCPKPPKMISIGIVIMITGSFEKSIKLFLKRANPALLNAETEVNKLKNRPLPMPNFGINDKHRQSVPNNSVAMLYMARCLISLITPPGSSIFQVIINKILLLIDIFLFKKMRVSIATVTIPNPPICISNKIMISPKILNCVPTSTGDRPVTVNALEATNNASIKLIGFFPV

SEQ ID NO: 3233 - DNA, 1272 bp, Artificial Sequence
  Description of Artificial Sequence: synthetic nucleic acid sequence
atgttatttctgttgacaactttaattggtgcttttctactctatttgccctatacagggaagaaacctattaactttattgacgcattgtttgtagcttctagcgcattcacagtaacaggtctatcaccagttgatgttggaacacaatttaatatttttggagaaatcattatcttattacttatacaaattggtggattaggtattgtcactgtagcaatgctaactctcatctttttaaataagaaaatatcaattaacaatagaattttatttatgattacttggaatattgacgaacccggtggtgtaattaaacttattaaacatctagccatatacagcatcgccactgaattatttggtacactttgtctatgtttatcgtttattccaaaatttggcataggtaaaggtctatttttaagtttattcacttcagtttccgcatttaacaacgcaggattcgccctttttaaaaacaacttaatcgatttttcaaatgatccggtaatcattatcactattccaatacttatcattttgggaggtttgggacatttagtcgtggttgatttgtggaacgccaaaagttttagaaaattatccttacactctaaactcgtgttaactaccactggattattaattttgataggcacggttttcttctttttactagaaaatcaaaactctatgttacacatgggattaattgaaaaaataggaaatgcatttttccaatcagtgacaacaaggactgcaggatttaacacaattgacgttggaaacattaaaacaccgacagctttattacttatggctctcatgtttattggaggtgcaccattgagtgctgcaggtggtataaaggttacaacttttgttattgcaacaatcgctatttttaatacgatacgcaaagaaaaaaacaactctatatttaatagagaaatatcagaaagatacatacagttgtctttcgtaactattctcatttctattgcatttatcggtatggttacgtttatacttaccataatcaattccaatatacctttaatcaaaatactcttcgaagtcgtatcagcattcggtacagtcggtctcactatggatttaacttccgaatactataattggactgagtttattattatcatcgtaatgttatgtggtaaaattggattactgaatattagtagagcgcttgttccacctaaagaccctaaaaattatagatataccaaaggacacattcacttataa

SEQ ID NO: 3234 - protein, 423 aa, Artificial Sequence
  Description of Artificial Sequence: synthetic amino acid sequence
MLFLLTTLIGAFLLYLPYTGKKPINFIDALFVASSAFTVTGLSPVDVGTQFNIFGEIIILLLIQIGGLGIVTVAMLTLIFLNKKISINNRILFMITWNIDEPGGVIKLIKHLAIYSIATELFGTLCLCLSFIPKFGIGKGLFLSLFTSVSAFNNAGFALFKNNLIDFSNDPVIIITIPILIILGGLGHLVVVDLWNAKSFRKLSLHSKLVLTTTGLLILIGTVFFFLLENQNSMLHMGLIEKIGNAFFQSVTTRTAGFNTIDVGNIKTPTALLLMALMFIGGAPLSAAGGIKVTTFVIATIAIFNTIRKEKNNSIFNREISERYIQLSFVTILISIAFIGMVTFILTIINSNIPLIKILFEVVSAFGTVGLTMDLTSEYYNWTEFIIIIVMLCGKIGLLNISRALVPPKDPKNYRYTKGHIHL

SEQ ID NO: 3235 - DNA, 1236 bp, Artificial Sequence
  Description of Artificial Sequence: synthetic nucleic acid sequence
atgcgtgatttaggtaatacacttattgtcgttgaacatgacgatgatactatgagagcagctgattatttagttgatgtgggtccgggagctggtaaccacggtggagaggttgtctcaagtggtacccctaataaagtaatgaaagataaaaaatccttaactggtcaatatttaagtggaaaaaaacgaattgaagtccctgaatacagacgagaaatcaccgatagaaagattcaaattaaaggtgctaaaagtaataatttgaaaaatgtaaatgtagacttcccactatctgtcttaactgttgttacaggtgtgtcaggttctggtaaaagttcactcgtcaatgaaattttatataaagcattagctcaaaaaattaataaatctaaagtgaaacctgggaattttgatgaaattaaaggaattgatcaattagataaaatcattgatattgatcaatcgccaataggtagaacaccacgttctaacccagccacatacactggtgtctttgatgacataagagatgtctttgcacaaacgaatgaagctaaaatacgaggttatcaaaaaggtagatttagttttaatgtcaaaggtggacgatgtgaagcttgtaaaggtgatggaattataaaaattgaaatgcattttttaccagatgtctatgtaccttgtgaagtatgtgatggtaaacgctataatcgtgagactttagaggtaacatacaaaggtaaaaatattgcggatgtattagaaatgactgttgaagaagctacgcatttctttgaaaatattcctaagattaaacgtaaattacaaacacttgtagatgttgggttggggtacattactttaggtcaacaagctactacattatctggtggcgaagcgcaacgtgtaaaactcgcatcagaattgcacaaacgttcaacggggcgttctatttatattcttgatgaaccaactacaggattacatgtcgacgatataagtcgtttattaaaggtattgaatcgtatagtggaaaatggtgatacggtcgttattatcgaacacaatcttgatgttattaaaacggctgatcatattattgatttaggtccagaaggcggtgaaggtggaggaacaatcatcgcaactggtacacctgaagagattgctcaaaataaagggtcttacactggtcaatacttaaaaccagtattagagagagacagcgttgaatag

SEQ ID NO: 3236 - protein, 411 aa, Artificial Sequence
  Description of Artificial Sequence: synthetic amino acid sequence
MRDLGNTLIVVEHDDDTMRAADYLVDVGPGAGNHGGEVVSSGTPNKVMKDKKSLTGQYLSGKKRIEVPEYRREITDRKIQIKGAKSNNLKNVNVDFPLSVLTVVTGVSGSGKSSLVNEILYKALAQKINKSKVKPGNFDEIKGIDQLDKIIDIDQSPIGRTPRSNPATYTGVFDDIRDVFAQTNEAKIRGYQKGRFSFNVKGGRCEACKGDGIIKIEMHFLPDVYVPCEVCDGKRYNRETLEVTYKGKNIADVLEMTVEEATHFFENIPKIKRKLQTLVDVGLGYITLGQQATTLSGGEAQRVKLASELHKRSTGRSIYILDEPTTGLHVDDISRLLKVLNRIVENGDTVVIIEHNLDVIKTADHIIDLGPEGGEGGGTIIATGTPEEIAQNKGSYTGQYLKPVLERDSVE

SEQ ID NO: 3237 - DNA, 981 bp, Artificial Sequence
  Description of Artificial Sequence: synthetic nucleic acid sequence
atgtttaaaaagattgctactataataggttcgacattatttggtacagttttattcgcaaaagtgaaagaaaagcgtagttataaaagttttttacaagagaaaatgattagaatatcaggaatgaaaaagacatttgaaagtatagatgacgcgaaaaaagctttgaatgagactaaatatcaaactgcaggtaaatataatggaacaacatatgaatttaagcataaagttcaaataagagattattatggttctttagtctatgttgttaatgatcatggtcttccagatcaacgcacggtcttatatgtacatggaggcgcatggttccaagatcctttggaaaatcattttgaatatttagacttactcgttgatgcgctcgatgctagggtgattatgcccgtatatcctaaaataccacacagagattatcgtacgacatttgaattattaacaaaaatatataagcgattattgactaaaattgatgaacctgaaaacttggtcatcattggagattcagccgggggacaaattgcattagcttttgcacaaatgttaaaaaaagagcaactcagtcaacctggccatattgttcttatttcaccggtgcttgatgcgacatttaagaatccagaagcaagaaaatatgaaaaagaagatccaatgcttggaattgaaggcagtaaatatcttgtagagttatgggctggtgatgcaccactagatgactataagatgtctccaatgaatggtgatttagaaggcctaggacatattacacttactgtaggaaccaaagaaacattatatcctgatgcagttaagttctctcacatgttaaatgataaaggaataaagcatcagtttatcccaggttacaatttatttcatatttatcccttattccctatcccagagcgtcaacgctttttagaacagcttaaaaaaatcattgtcacaaaagagttataa

SEQ ID NO: 3238 - protein, 326 aa, Artificial Sequence
  Description of Artificial Sequence: synthetic amino acid sequence
MFKKIATIIGSTLFGTVLFAKVKEKRSYKSFLQEKMIRISGMKKTFESIDDAKKALNETKYQTAGKYNGTTYEFKHKVQIRDYYGSLVYVVNDHGLPDQRTVLYVHGGAWFQDPLENHFEYLDLLVDALDARVIMPVYPKIPHRDYRTTFELLTKIYKRLLTKIDEPENLVIIGDSAGGQIALAFAQMLKKEQLSQPGHIVLISPVLDATFKNPEARKYEKEDPMLGIEGSKYLVELWAGDAPLDDYKMSPMNGDLEGLGHITLTVGTKETLYPDAVKFSHMLNDKGIKHQFIPGYNLFHIYPLFPIPERQRFLEQLKKIIVTKEL

SEQ ID NO: 3239 - DNA, 615 bp, Artificial Sequence
  Description of Artificial Sequence: synthetic nucleic acid sequence
atgttatcagatatacttccaacaggttatgaaattggtgttttaaaaggtaaagttaaacctggctgtacagtagccattgtaggtgctggtcctgtaggtttagcagcattacttacagcacaattctattcaccttcaaaaattattatgattgatttagatgataatagattagaaaccgctaaagaactaggtgctacgcatttaattaactctaaagagactgaaaccgcaattaaaaaggtaaaatcgttaaatccacgtggtgttgatgttgctattgaagctgtcggaattccacaaacctttgatttatgtcaaaatttaattggtgtcgatggtacgattgctaatgttggtgtgcatgggttacctgtacaacttgatatagataaattatggattaaaaatattaacgtaactactggtttagtttcaggaaatacaactgaagaattacttgaagcgttaaaaagcaaaataatacaaccagaacaactcgtgacacattatagtaaactgagtgaaatcgaaagtgcctatgatttatttagaaatgcaacagatcataaagcgattaaattaatcatagagaatgatatcacaatttaa

SEQ ID NO: 3240 - protein, 204 aa, Artificial Sequence
  Description of Artificial Sequence: synthetic amino acid sequence
MLSDILPTGYEIGVLKGKVKPGCTVAIVGAGPVGLAALLTAQFYSPSKIIMIDLDDNRLETAKELGATHLINSKETETAIKKVKSLNPRGVDVAIEAVGIPQTFDLCQNLIGVDGTIANVGVHGLPVQLDIDKLWIKNINVTTGLVSGNTTEELLEALKSKIIQPEQLVTHYSKLSEIESAYDLFRNATDHKAIKLIIENDITI

SEQ ID NO: 3241 - DNA, 688 bp, Artificial Sequence
  Description of Artificial Sequence: synthetic nucleic acid sequence
atggatgatgctattcaactagcaaaaatggtaaatggacaaacaggtgttaatccaccagtaggatccgttgttgttaaaaacggtaggattgtaggtttaggtgcacatttaaaaaagggagataaacatgccgaagtacaagctattgaaatggcaggtttaaatacccaaggtgctaccatatacgtttcattagaaccttgcacacaccatggttcaacaccaccttgtgtgcataaaatcattgaagcgggcatatctaaggtcatctatgctgttaaagatactactttagtaagtaagggtgacgagattctgagagaagctggtatagaggttgaatttcaatataatgaaaatgcagctgcattataccgtgacttttttactgctaaaagaaacgaagttccagaagtaactgtaaaggtctcatctagtctagatggtaaacaagcaacagactttaatgaaagtaagtggataacaaacaaagaagttaaagaagatgtttatcaattaagacatgagcatgatgcagttattactgggcgtagaaccattgaagcagacaatccattgtatacaaccagggttcctgatggaaagcatccgattcgagttattctttctaagaaaggtcaactcgattttaatcaacaaatatttaaagatactgcatcccctg

SEQ ID NO: 3242 - protein, 230 aa, Artificial Sequence
  Description of Artificial Sequence: synthetic amino acid sequence
  MOD_RES (230): variable amino acid
MDDAIQLAKMVNGQTGVNPPVGSVVVKNGRIVGLGAHLKKGDKHAEVQAIEMAGLNTQGATIYVSLEPCTHHGSTPPCVHKIIEAGISKVIYAVKDTTLVSKGDEILREAGIEVEFQYNENAAALYRDFFTAKRNEVPEVTVKVSSSLDGKQATDFNESKWITNKEVKEDVYQLRHEHDAVITGRRTIEADNPLYTTRVPDGKHPIRVILSKKGQLDFNQQIFKDTASPX

SEQ ID NO: 3243 - DNA, 774 bp, Artificial Sequence
  Description of Artificial Sequence: synthetic nucleic acid sequence
atgaaaaaaatcgctacagctacaattgcaactgcaggaatcgctactttcgcatttgcacaccatgacgcacaagcagcagaacaaaataatgatgggtacaatccaaacgacccttattcatatagctacacttacacaatcgatgctgaaggtaactaccactacacttggaaaggtaactggagtccagatcgtgtaaatacttcatataactataataattataataactacaactactatggttacaataactatagcaactacaataactacagtaattacaacaattacaacaactatcaatcaaacaacacgcaatcacaaagaacaactcaaccgactggtggtttaggcgcaagctattcaacatcaagtagtaatgttcacgttacaacaacttctgcgccatcatcaaacggtgtatctttatcaaacgctcgctcagcatctggtaacttatacacttcaggtcaatgtacatattatgtatttgacagagtaggtggcaaaatcggttcaacgtggggtaacgcaaacaactgggcaaacgctgcagcacgttctggttacacagtaaacaattcgcctgctaaaggtgcaatcttacaaacgtcacaaggtgcatacggacacgtagcatacgttgaaggtgtaaacagcaatggttcaatcagagtttcagaaatgaactacggtcacggtgcaggtgttgtcacttcacgtacaatctctgcgagccaagctgcttcatataactatattcactaa

SEQ ID NO: 3244 - protein, 257 aa, Artificial Sequence
  Description of Artificial Sequence: synthetic amino acid sequence
MKKIATATIATAGIATFAFAHHDAQAAEQNNDGYNPNDPYSYSYTYTIDAEGNYHYTWKGNWSPDRVNTSYNYNNYNNYNYYGYNNYSNYNNYSNYNNYNNYQSNNTQSQRTTQPTGGLGASYSTSSSNVHVTTTSAPSSNGVSLSNARSASGNLYTSGQCTYYVFDRVGGKIGSTWGNANNWANAAARSGYTVNNSPAKGAILQTSQGAYGHVAYVEGVNSNGSIRVSEMNYGHGAGVVTSRTISASQAASYNYIH

SEQ ID NO: 3245 - DNA, 339 bp, Artificial Sequence
  Description of Artificial Sequence: synthetic nucleic acid sequence
atggtagaaccaatcactgaatcgccactacttttttcaacaggtatagactcaccagttagcatggattcgtcaatagaagtatcacctttagtgactttgccatctacaggtatcttttcgccgggttttattagtaaagtatctccgactttaactttatcaagtggaagcataatttctttattttctttaattactcgtgcttctttcgcttgtaaatttaacaattcgcttaatgcattggtagtctgtgatttggcacgtgcttctaaatatttaccaagaagaattaacgtaattaaaatagcacttgtttcaaaatataaatgcgggtga

SEQ ID NO: 3246 - protein, 112 aa, Artificial Sequence
  Description of Artificial Sequence: synthetic amino acid sequence
MVEPITESPLLFSTGIDSPVSMDSSIEVSPLVTLPSTGIFSPGFISKVSPTLTLSSGSIISLFSLITRASFACKFNNSLNALVVCDLARASKYLPRRINVIKIALVSKYKCG

SEQ ID NO: 3247 - DNA, 1026 bp, Artificial Sequence
  Description of Artificial Sequence: synthetic nucleic acid sequence
atgggatttgatgaaacgagtttaaatgagatttcaaaacttattccacataaattaggtataactcttgaagaagcataccaaaagccagagtttaaagcatttgttcatcgtaatcatagaaatgaacgttggtttgaagtgagtaaaaagttagagggattaccaagacatacgtctacgcatgctgcaggtatcattatcaatgatcaaccattattcaaatttgccccattaacaactggtgatacaggattattaacgcagtggactatgacagaagcggaacgtataggattattaaaaattgatttcttgggattacgcaatctatcaattattcatcaaattattttacaagttaaaaaggatttaaatataaatattgatatagaagctataccttatgatgataaaaaagtttttgatttattatcaaacggtgacactacaggtatatttcaattggaatcagacggtgttagaagcgtattaaaaagattgcaacccgaacattttgaagatatcgtagctgtcacatcattatatagaccaggaccaatggaagaaataccaacttatataacccgtagacataatcctaaccaatttgcttatttacatccagatttagaaccaatcttaaaaaacacatatggtgttatcatttatcaagaacaaataatgctaatagcaagtcaagttgctggttttagttatggtgaagcagatattttaagaagggcaatgagtaaaaagaatcgtgcaatcttagaaagtgagcgtcaacatttcattgatggtgcaaaaaataacggttacgatgaacagataagtaagcaaatttttgatttaatacttaagtttgcagattatgggttcccacgtgcccatgctgttagttactcaaaaattgcatacattatgagctatttaaaagtgccacaaatcagtacagaaccgttatgcctggcttcaaatatgaagcaccaccaaatcaaaataaaatcaatccttatgaattaa

SEQ ID NO: 3248 - protein, 341 aa, Artificial Sequence
  Description of Artificial Sequence: synthetic amino acid sequence
MGFDETSLNEISKLIPHKLGITLEEAYQKPEFKAFVHRNHRNERWFEVSKKLEGLPRHTSTHAAGIIINDQPLFKFAPLTTGDTGLLTQWTMTEAERIGLLKIDFLGLRNLSIIHQIILQVKKDLNINIDIEAIPYDDKKVFDLLSNGDTTGIFQLESDGVRSVLKRLQPEHFEDIVAVTSLYRPGPMEEIPTYITRRHNPNQFAYLHPDLEPILKNTYGVIIYQEQIMLIASQVAGFSYGEADILRRAMSKKNRAILESERQHFIDGAKNNGYDEQISKQIFDLILKFADYGFPRAHAVSYSKIAYIMSYLKVPQISTEPLCLASNMKHHQIKIKSILMN

SEQ ID NO: 3249 - DNA, 1434 bp, Artificial Sequence
  Description of Artificial Sequence: synthetic nucleic acid sequence
atgtataataaagtttttgcaattttaattataattttttccataataattattgcgtctaatgatactttcgcagaaagtaagaatgatatgatgaatatgaaagaagataagaaaaatacaatggatatgacaaatatgaaacatcatgacgaaagaaagaaattaaattcttcacaaggaaaaaatgaaataatatttcctaaagttgcagagtcaaaaaaagataacaatggttataaaaattatacattaaaagctcaggaaggaaagacagagttttacaaaaataatttttctaatactctaggctacaatggaaatttacttggaccaactttaaaattaaaaaaaggagataaagttaaaattaagttaataaataacttagatgaaaatacaacatttcattggcatggattagaagtaaatggaaaagtggatggagggccttctcaggttataaaaccaggaaaagaaaaaactataaaatttgaggttaatcaagattctgctacgttatggtatcacccccacccctctccaaatacagctaaacaagtttataatggcttatcaggattattatatatagaagatagtaaaaagaataattatcctagtgattatggaaaaaatgatttgcctataataatccaagataaaacatttgtatctaaaaaattaaattattcaaaaacgaaagacgaagatggcactcaaggtgatactgttcttgtgaacggaatagtaaaccccaaactgacaacaaaagaagagaaaatacgtttgagacttttaaatggttctaatgctcgagatttaaatcttaagctaagtaataatcaaagttttgagtatattgcttcagatggcggtcaattaaaaaacgctaaaaaattaaaagaaattaatttagctccttcagaaagaaaagaaatagtaatagatttatctaaaatgaaaggcgagaaaatcagtctggttgataatgataaaactgtaattttaccgattagtaacaaagagaaaagttctaacaaaggtaatacaccaaaagtaagtaaaaaaataaaattagaaggtatgaatgataatgttaccattaatggtaataaattcgatcctaaaagaatagattttacacaaaagttaaaccagaaagaagtatgggaaattgaaaacgtcaaagataaaatgggtggtatgaaacatcctttccacatccatggaacgcaatttaaagttttatctgtggatggggagaaaccaccaaaagatatgaggggtaaaaaagatgttatatctttggaacctggacaaaaagctaaaatagaggttgtatttaaaaatactggaacatacatgtttcactgtcatatacttgagcatgaagataatggaatgatgggtcaaataaaagtaacaaactaa

SEQ ID NO: 3250 - protein, 477 aa, Artificial Sequence
  Description of Artificial Sequence: synthetic amino acid sequence
MYNKVFAILIIIFSIIIIASNDTFAESKNDMMNMKEDKKNTMDMTNMKHHDERKKLNSSQGKNEIIFPKVAESKKDNNGYKNYTLKAQEGKTEFYKNNFSNTLGYNGNLLGPTLKLKKGDKVKIKLINNLDENTTFHWHGLEVNGKVDGGPSQVIKPGKEKTIKFEVNQDSATLWYHPHPSPNTAKQVYNGLSGLLYIEDSKKNNYPSDYGKNDLPIIIQDKTFVSKKLNYSKTKDEDGTQGDTVLVNGIVNPKLTTKEEKIRLRLLNGSNARDLNLKLSNNQSFEYIASDGGQLKNAKKLKEINLAPSERKEIVIDLSKMKGEKISLVDNDKTVILPISNKEKSSNKGNTPKVSKKIKLEGMNDNVTINGNKFDPKRIDFTQKLNQKEVWEIENVKDKMGGMKHPFHIHGTQFKVLSVDGEKPPKDMRGKKDVISLEPGQKAKIEVVFKNTGTYMFHCHILEHEDNGMMGQIKVTN

SEQ ID NO: 3251 - DNA, 873 bp, Artificial Sequence; identical to SEQ ID NO: 3023
  Description of Artificial Sequence: synthetic nucleic acid sequence

SEQ ID NO: 3252 - protein, 290 aa, Artificial Sequence; identical to SEQ ID NO: 3024
  Description of Artificial Sequence: synthetic amino acid sequence

SEQ ID NO: 3253 - DNA, 870 bp, Artificial Sequence
  Description of Artificial Sequence: synthetic nucleic acid sequence
gtgtttggtggtgtatttaaggatatacctgcctatgaactaggtgcaacagttattcgtcaaattttagaacatagtcaaatagatcctaatgaaatcaatgaagttattctaggaaacgtattacaggcaggtcaaggacaaaatcctgctcgtattgctgcgattcatggtggtgtgccagaagcggtaccttcttttactgtaaataaagtttgcggttctggattaaaagcgattcaacttgcctatcaatctattgtagcgggagataatgagattgttatcgctggaggcatggaaagtatgtctcaatctccaatgcttcttaaaaatagtcgtttcggttttaaaatgggaaatcaaactttagaagatagtatgatagctgatggtttaactgataagtttaatgattaccatatgggtatcacagccgaaaatctagttgaacagtatcagattagtcgtaaagaacaagatcaatttgcattcgattctcaacaaaaagcatcacgtgcacaacaagctggtgtatttgatgctgaaattgtacctgtagaggtaccacaacgtaaaggcgaccccctaattatttctcaagatgaaggcattagacctcaaacgacaattgataagttagcacaactccgtccagcatttaaaaaagatggatcagtaactgctggtaatgcatccggtatcaatgacggtgctgctgctatgctcgttatgacggaggacaaagcgaaagcattgggcttacaacctatagctgtattagatagttttggtgcgagtggtgtggcgccttcaattatgggtattcgacgcacaaaaacaaaccaaagaagaaatagcaactgttaa

SEQ ID NO: 3254 - protein, 289 aa, Artificial Sequence
  Description of Artificial Sequence: synthetic amino acid sequence
VFGGVFKDIPAYELGATVIRQILEHSQIDPNEINEVILGNVLQAGQGQNPARIAAIHGGVPEAVPSFTVNKVCGSGLKAIQLAYQSIVAGDNEIVIAGGMESMSQSPMLLKNSRFGFKMGNQTLEDSMIADGLTDKFNDYHMGITAENLVEQYQISRKEQDQFAFDSQQKASRAQQAGVFDAEIVPVEVPQRKGDPLIISQDEGIRPQTTIDKLAQLRPAFKKDGSVTAGNASGINDGAAAMLVMTEDKAKALGLQPIAVLDSFGASGVAPSIMGIRRTKTNQRRNSNC

SEQ ID NO: 3255 - DNA, 996 bp, Artificial Sequence
  Description of Artificial Sequence: synthetic nucleic acid sequence
atgttagacaaaaatcaattggaaaagtataaccaagagcatttgtatgaatatgaaaaattaatgagtagtaatgaaaagaatgctttagatgaaaaagtagatcagttaaatcttgcagaaattcaagatttatatcaagatttatatgttaatagaaaaactattgatgatgtatcttctgtatctgaagtcaaatatgaagtgaaatcacgactcaatgaagaagaacgacatacatatgaacaaaaaggttatgaggcaatacgaaatggtgaatttgctgtattattgatggctggaggacaaggtacgcgtttaggatataaagggcctaaaggttcttttgaaatagagggtacgagtttatttgaacttcaggcgcgtcaactgattcgtttaaaagaagaaaccggccacacaattaattggtatattatgacaagtgacattaatcataaagatacaatagagtattttaaacaacataaatattttaactatgatgccaatcatattcatttctttaagcaagataacattgttgctttaagtgaagaaggaaagcttgttttaaatagagatggacatataatggaaacacctaatggtaatgggggtgtattcaagtctcttaagaaagcaggataccttgataagatgcaacaagatcacgtcaaatatatcttcttaaataacattgataatgtcttagttaaagttttagacccgttatttgccggttttacagtgacacaaagtaaagacatcacatcaaaaacaattcaacctaaagatagtgaaagtgtaggtcggcttgtaaatgttgattgtaaagacactgtgttagagtattctgaattaatgtcatatttccaggagctgcactccagttcatttctgaaactaaaatacttccatcgctattcacgcgctctacaaacgctacgtgaccatagtaaccagcgtcagtttgtgcaattgagcctactgtag

SEQ ID NO: 3256 - protein, 331 aa, Artificial Sequence
  Description of Artificial Sequence: synthetic amino acid sequence
MLDKNQLEKYNQEHLYEYEKLMSSNEKNALDEKVDQLNLAEIQDLYQDLYVNRKTIDDVSSVSEVKYEVKSRLNEEERHTYEQKGYEAIRNGEFAVLLMAGGQGTRLGYKGPKGSFEIEGTSLFELQARQLIRLKEETGHTINWYIMTSDINHKDTIEYFKQHKYFNYDANHIHFFKQDNIVALSEEGKLVLNRDGHIMETPNGNGGVFKSLKKAGYLDKMQQDHVKYIFLNNIDNVLVKVLDPLFAGFTVTQSKDITSKTIQPKDSESVGRLVNVDCKDTVLEYSELMSYFQELHSSSFLKLKYFHRYSRALQTLRDHSNQRQFVQLSLL

SEQ ID NO: 3257 - DNA, 1230 bp, Artificial Sequence
  Description of Artificial Sequence: synthetic nucleic acid sequence
atgtataataaagtttttgcaattttaattataattttttccataataattattgcgtctaatgatactttcgcagaaagtaagaatgatatgatgaatatgaaagaagataagaaaaatacaatggatatgacaaatatgaaacatcatgacgaaagaaagaaattaaattcttcacaaggaaaaaatgaaataatatttcctaaagttgcagagtcaaaaaaagataacaatggttataaaaattatacattaaaagctcaggaaggaaagacagagttttacaaaaataatttttctaatactctaggctacaatggaaatttacttggaccaactttaaaattaaaaaaaggagataaagttaaaattaagttaataaataacttagatgaaaatacaacatttcattggcatggattagaagtaaatggaaaagtggatggagggccttctcaggttataaaaccaggaaaagaaaaaactataaaatttgaggttaatcaagattctgctacgttatggtatcacccccacccctctccaaatacagctaaacaagtttataatggcttatcaggattattatatatagaagatagtaaaaagaataattatcctagtgattatggaaaaaatgatttgcctataataatccaagataaaacatttgtatctaaaaaattaaattattcaaaaacgaaagacgaagatggcactcaaggtgatactgttcttgtgaacggaatagtaaaccccaaactgacaacaaaagaagagaaaatacgtttgagacttttaaatggttctaatgctcgagatttaaatcttaagctaagtaataatcaaagttttgagtatattgcttcagatggcggtcaattaaaaaacgctaaaaaattaaaagaaattaatttagctccttcagaaagaaaagaaatagtaatagatttatctaaaatgaaaggcgagaaaatcagtctggttgataatgataaaactgtaattttaccgattagtaacaaagagaaaagttctaacaaaggtaatacaccaaaagtaagtaaaaaaataaaattagaaggtatgaatgataatgttaccattaatggtaataaattcgatcctaaaagaatagattttacacaaaagttaaaccagaaagaagtatgggaaattgaaaacgtcaaagataaaatgggtggtatgaaacatcctttccacatccat

SEQ ID NO: 3258 - protein, 410 aa, Artificial Sequence
  Description of Artificial Sequence: synthetic amino acid sequence
MYNKVFAILIIIFSIIIIASNDTFAESKNDMMNMKEDKKNTMDMTNMKHHDERKKLNSSQGKNEIIFPKVAESKKDNNGYKNYTLKAQEGKTEFYKNNFSNTLGYNGNLLGPTLKLKKGDKVKIKLINNLDENTTFHWHGLEVNGKVDGGPSQVIKPGKEKTIKFEVNQDSATLWYHPHPSPNTAKQVYNGLSGLLYIEDSKKNNYPSDYGKNDLPIIIQDKTFVSKKLNYSKTKDEDGTQGDTVLVNGIVNPKLTTKEEKIRLRLLNGSNARDLNLKLSNNQSFEYIASDGGQLKNAKKLKEINLAPSERKEIVIDLSKMKGEKISLVDNDKTVILPISNKEKSSNKGNTPKVSKKIKLEGMNDNVTINGNKFDPKRIDFTQKLNQKEVWEIENVKDKMGGMKHPFHIH

SEQ ID NO: 3259 - DNA, 1362 bp, Artificial Sequence
  Description of Artificial Sequence: synthetic nucleic acid sequence
atgggggtgattttattgaattccaataataacaatcatgaacaacaacgaagtttagatgaaatcaataacaccataaacttcaatcataatgatagtgcaagtcaaaaatttctggcttttttaggaccgggattgcttgttgcagttggttacatggatcctggaaattggattacatccatgcaaggaggagcacaatatggctataccttgttattcataatcttaatctctagcttatctgctatgctgttacaaagtatgactgtgagattaggaatagcaactggtatggatttagcacaaatgacacgtcattttttaaataagcctgtagcaattatgttctggattattgcagaattagcaattatcgctactgatattgcagaagttataggtagcgctatcgcattagatttaatcttcggcataccattaattgtaggcgcattaatcactgtatttgatgtatttttattattattcatcatgaaatttggctttagaaagattgaagctatcgtgggaacgttaatctttaccgtattggccatttttgtatttgaagtttatatttcttctccacaaataacagatatgcttaatggttttgtgcctcataaagaaattattacaaaccaagggatactttatattgcactaggtatcataggtgctactattatgccacataacttatatttacattcttctattgtacaatctcgaaaatatgatagacacagtattcatgaaaaagcacaagcgattaagtatgctactatcgactctaatatacagctatccatcgcttttgtagtcaattgcttattacttacacttggtgcagcgctattttttggaactaaaactgaagatttgggtggtttttatgatctttatttggctctaaaaacagaacctgctttaggtgcaacgcttggcggtattatgagtactttatttgctgttgcccttttagcttctggtcaaaattcaactataacgggaacgttagcaggccaaattgtgatggaaggatttcttaaattatccattccaaattggttacgtcgtcttatcactcggtctttagcagtgatacctgttatcatttgtcttatagtatttaaaggaaatactgaaaaaattgaacaattacttgtcttttctcaagtgttcttgagtattgctttgccattttcgttaataccgcttcaattagctacaagtaatcaaaatcttatgggtccttttaagaataaaacatggattaacatcatttcttggttactcataattgtcttaagtggacttaacgtatatcttatcattcaaacattccaagaattatga

SEQ ID NO: 3260 - protein, 453 aa, Artificial Sequence
  Description of Artificial Sequence: synthetic amino acid sequence
MGVILLNSNNNNHEQQRSLDEINNTINFNHNDSASQKFLAFLGPGLLVAVGYMDPGNWITSMQGGAQYGYTLLFIILISSLSAMLLQSMTVRLGIATGMDLAQMTRHFLNKPVAIMFWIIAELAIIATDIAEVIGSAIALDLIFGIPLIVGALITVFDVFLLLFIMKFGFRKIEAIVGTLIFTVLAIFVFEVYISSPQITDMLNGFVPHKEIITNQGILYIALGIIGATIMPHNLYLHSSIVQSRKYDRHSIHEKAQAIKYATIDSNIQLSIAFVVNCLLLTLGAALFFGTKTEDLGGFYDLYLALKTEPALGATLGGIMSTLFAVALLASGQNSTITGTLAGQIVMEGFLKLSIPNWLRRLITRSLAVIPVIICLIVFKGNTEKIEQLLVFSQVFLSIALPFSLIPLQLATSNQNLMGPFKNKTWINIISWLLIIVLSGLNVYLIIQTFQEL

SEQ ID NO: 3261 - DNA, 531 bp, Artificial Sequence
  Description of Artificial Sequence: synthetic nucleic acid sequence
atgggattaaataaattagggtatagtcttaatgacaaaaatccgacccatattcatcaagcagaaaaagatttgcataatttagcacctcaagttagagggatagtaggcgacgaaattactatgatgcttcaacaaaacgaaggacatgttgcagtagtttggagtggcgttgctgcaccacttgtacaggaaaatactcgttataattacgtgatacctaaagaaggctctaacctatggtttgataatatggtgatacctaaaactgcacaaaataaagaaggtgcgtataagtttatgaatttcttactagacgcgcaaaatagtgcccagaatacggaatgggtaggatatgcaacacctaataaagcagctcgaagtaagttgcctaaaaaggtaagaaatgattatagattttatccatcaaatcaagaacagcaacggttagaagtctataaagatttaggtcaaacgtctctcagtgaatataatgaaagctttttaaattttaaaatgtctttaaaatag

SEQ ID NO: 3262 - protein, 176 aa, Artificial Sequence
  Description of Artificial Sequence: synthetic amino acid sequence
MGLNKLGYSLNDKNPTHIHQAEKDLHNLAPQVRGIVGDEITMMLQQNEGHVAVVWSGVAAPLVQENTRYNYVIPKEGSNLWFDNMVIPKTAQNKEGAYKFMNFLLDAQNSAQNTEWVGYATPNKAARSKLPKKVRNDYRFYPSNQEQQRLEVYKDLGQTSLSEYNESFLNFKMSLK

SEQ ID NO: 3263 - DNA, 378 bp, Artificial Sequence
  Description of Artificial Sequence: synthetic nucleic acid sequence
atgtcatctgaaatgtttttagtttctcttattgcgtcattagtcattttaggtttttcaacgctattaggttttgttggtacaatggtaattgaaggtagaaaaaaccttgctgctagtttactcatagcagcggctatcgtaggtttatttacgactaatttaatcgcaatggttttatggatgattgctgcgattagactttttgcaaaaaaagataaaacagatgtaaatgaaaatgctacggctcaacttcgtcaaaaccattcaaagagccaaagtgattggaatcatcaacaaaaccaacaacagaaagatgcttgggatcctgaacaagaaatcaacaaacaaaaaaaggacgatccatatatatattaa

SEQ ID NO: 3264 - protein, 125 aa, Artificial Sequence
  Description of Artificial Sequence: synthetic amino acid sequence
MSSEMFLVSLIASLVILGFSTLLGFVGTMVIEGRKNLAASLLIAAAIVGLFTTNLIAMVLWMIAAIRLFAKKDKTDVNENATAQLRQNHSKSQSDWNHQQNQQQKDAWDPEQEINKQKKDDPYIY

SEQ ID NO: 3265 - DNA, 675 bp, Artificial Sequence
  Description of Artificial Sequence: synthetic nucleic acid sequence
atgattaattgcttaatcgtagacgatgataaaaagttattgcaatatgtttcaagtcatttagaaagagaaagtattcaaacacatactttcacaagtggagaagcatcactagattttcttgaaaataaaaatgttgatattgcgatagtagatattatgatgagtggaatggatggttttgagctttgtcagactttgaaagatgattatcatattcctgtcataatgttaacagctagagatgcattaagtgataaagaacgtgcatttctaagtgggactgacgattatgtcactaaaccttttgaggttaaagaattattatttagaattaaagctgtcttaagacgatatcaaattaatgctgataacgagttacaacttggcaacttaatattaaatcagtcttacatggaaattactgtgggttcaaaaacgatgaatcttccaaacaaagaatttcagttgttatttttattagcctctaatcctaaacatattttcactcgagatgatattattgaaaaaatttggggcttcgattatgaaggagatgatcgtactgttgatgttcatattaaaagattacgtcaacgtttatctaaattgaaatcatcagtatcaattcaaactgtaagaggtcaaggatatagggtggaccaaaatgtttaa

SEQ ID NO: 3266 - protein, 224 aa, Artificial Sequence
  Description of Artificial Sequence: synthetic amino acid sequence
MINCLIVDDDKKLLQYVSSHLERESIQTHTFTSGEASLDFLENKNVDIAIVDIMMSGMDGFELCQTLKDDYHIPVIMLTARDALSDKERAFLSGTDDYVTKPFEVKELLFRIKAVLRRYQINADNELQLGNLILNQSYMEITVGSKTMNLPNKEFQLLFLLASNPKHIFTRDDIIEKIWGFDYEGDDRTVDVHIKRLRQRLSKLKSSVSIQTVRGQGYRVDQNV

SEQ ID NO: 3267 - DNA, 474 bp, Artificial Sequence
  Description of Artificial Sequence: synthetic nucleic acid sequence
atgaatgctaatgcccaagtacgtagatacttccctagtttacttagttatcgtcgttctgagatagacatggaaaatatggatagcataatacaagagagtggcctaggtttatttgctgtagagttgaaagagacgggagaatggttagggtttataggtgtgaattacgtttcaaaagatagccattacccttttaaagagttaccgttttatgaaataggttggaggctaattccagaagtatggggaaatggtctagctacagaaggggcagaagccgtaatgaaatatgctagagataaaggaattaaagaattatatagttttacttctgaaaataatttgccttctagaaaagtcatggaaaaattaggaatgacttttttagacaattttgaatatccgaatcttagtaaataccatccccttaaacgtcatgtaagatattataaagagctacttccttcttga

SEQ ID NO: 3268 - protein, 157 aa, Artificial Sequence
  Description of Artificial Sequence: synthetic amino acid sequence
MNANAQVRRYFPSLLSYRRSEIDMENMDSIIQESGLGLFAVELKETGEWLGFIGVNYVSKDSHYPFKELPFYEIGWRLIPEVWGNGLATEGAEAVMKYARDKGIKELYSFTSENNLPSRKVMEKLGMTFLDNFEYPNLSKYHPLKRHVRYYKELLPS

SEQ ID NO: 3269 - DNA, 366 bp, Artificial Sequence
  Description of Artificial Sequence: synthetic nucleic acid sequence
atggacaaaaagcttcaaaagaatattgagaaacgtcataaagaagaacaaaaacaacgtgaagctaatcagaaacaacgtattaaagacatgaaaaaaactcaaaaatacgaagagcaagttggcttaactcctggtaaaatagatcacgaaattgagaaaaaaggcgaaaaactagaaaaagataatcgtaaagatattaaaaaattagataaaaagcttcaaaagaatattgaaaaacgtcataaagaagaacaaaaacagcgtgaagaagcagagaaagctagaaaaaaagaatttaaaaaatatgaaaattacgtggctgacagtgtcgtaaaacaacataaggaatcaaatcattcttaa

SEQ ID NO: 3270 - protein, 121 aa, Artificial Sequence
  Description of Artificial Sequence: synthetic amino acid sequence
MDKKLQKNIEKRHKEEQKQREANQKQRIKDMKKTQKYEEQVGLTPGKIDHEIEKKGEKLEKDNRKDIKKLDKKLQKNIEKRHKEEQKQREEAEKARKKEFKKYENYVADSVVKQHKESNHS

SEQ ID NO: 3271 - DNA, 567 bp, Artificial Sequence
  Description of Artificial Sequence: synthetic nucleic acid sequence
atgaaaagaattgctgtttattgtggtgcaagtaaagggaaaaacccatcttatgttaaagaggcatacgaattaggaaaatatatggctgaacaaggatacgagcttgtattcggagcaggatcagtcggcattatgggagctattcaagatggcatacttgagcatggcggtaaagctatcggtgtcatgcctaaaatgttagatgaacgagaaataacaagccaaaaagtaagtgagcttatattagtagattctatgcatgaacgaaaaaataaaatgactgaacttgccgatgcttttattatggctccaggcggtgctggttcattagaagaattttttgaaatgtatagttgggctcaaattggtatacaccaaaagcctataggtgtatttaatttaaatggattctttgagccactacaacacttaatcgaccatatgattaaagaaggatttattgatgagaaatatcaaaagcttgcacctttatatgatactaaagaatcactcatcgaaggacttaaacattacaaaccacttggtgtacgtacatacgattaa

SEQ ID NO: 3272 - protein, 188 aa, Artificial Sequence
  Description of Artificial Sequence: synthetic amino acid sequence
MKRIAVYCGASKGKNPSYVKEAYELGKYMAEQGYELVFGAGSVGIMGAIQDGILEHGGKAIGVMPKMLDEREITSQKVSELILVDSMHERKNKMTELADAFIMAPGGAGSLEEFFEMYSWAQIGIHQKPIGVFNLNGFFEPLQHLIDHMIKEGFIDEKYQKLAPLYDTKESLIEGLKHYKPLGVRTYD

SEQ ID NO: 3273 - DNA, 768 bp, Artificial Sequence; identical to SEQ ID NO: 2881
  Description of Artificial Sequence: synthetic nucleic acid sequence

SEQ ID NO: 3274 - protein, 255 aa, Artificial Sequence; identical to SEQ ID NO: 2882
  Description of Artificial Sequence: synthetic amino acid sequence

SEQ ID NO: 3275 - DNA, 900 bp, Artificial Sequence
  Description of Artificial Sequence: synthetic nucleic acid sequence
atgtttgattcaattagagagacaatagattattcagttgaaaataacatcagttttgctgatatgatgattaatgatgaaatggaaagagaaggtaaatctcgcgaagaagtgcgtgatttaatgagacaaaacttaaatgttatgcgtgaggcagttgaaaaaggtacgactggcgatggtgtggaaagtgtaacaggttatacaggtcatgatgctgctaaacttcgagattacaacgagaataatcatgcattatcaggtcatgaaatgattgatgcagtcaaaggtgcagttgcaacgaacgaagtcaatgcagcaatgggtattatttgtgctactccgacagctggttcctcgggaacgattcccggcgtaatatttaaattagaaaaaactcataatatcactgaagatcaaatgatagattttctattcacatcagctttattcgggcgagtagttgcaaacaacgcgagcgttgccggtgcaactggtggttgtcaagccgaagtgggttcggcatctgcaatggctgcagctgctgcagtatcaatttttaacgggtcaccagaacaatcaggacatgccatggcattggcaattagtaacttattaggcttagtttgcgatccagttgctggtttagttgaaattccatgtgtaatgcgtaatgctattggttcaggaaatgcattaatatctgcagaccttgcactagctggagttgaaagtcaaattccagttgatgaagtcataggtgctatggatagagtaggtcgtaatttacctgcatcattaagagaaacaggtttaggcggtttagcaggtacacctactggcgaagaaattaaacgtaaaatattcggcgaagcagacaacatggttaaaaataaataa

SEQ ID NO: 3276 - protein, 299 aa, Artificial Sequence
  Description of Artificial Sequence: synthetic amino acid sequence
MFDSIRETIDYSVENNISFADMMINDEMEREGKSREEVRDLMRQNLNVMREAVEKGTTGDGVESVTGYTGHDAAKLRDYNENNHALSGHEMIDAVKGAVATNEVNAAMGIICATPTAGSSGTIPGVIFKLEKTHNITEDQMIDFLFTSALFGRVVANNASVAGATGGCQAEVGSASAMAAAAAVSIFNGSPEQSGHAMALAISNLLGLVCDPVAGLVEIPCVMRNAIGSGNALISADLALAGVESQIPVDEVIGAMDRVGRNLPASLRETGLGGLAGTPTGEEIKRKIFGEADNMVKNK

SEQ ID NO: 3277 - DNA, 519 bp, Artificial Sequence
  Description of Artificial Sequence: synthetic nucleic acid sequence
gtgcttctgcattgcctccttcttctgccttcgttggctcagattgaggtgcttctgcattgcttccttcttctgtcttcgttggctcagattgagctgcttctgcattgcctccttcttctgccttcgttggctcagattgagctgcttttgcgttgcttccttcttctgtcttcgttggctcagattgaggtgcttctgcattgcttccttcttctgccttcgttggctcagattgagctgcttttacgttgcttccttcttctgtcttcgttggctcagattgagctgcttctgcattgcctccttcttctgccttcgttggctcagattgagctgcttctgcattgcctccttcttctgccttcgttggctcagattgaggtgcttctgcattgcctccttcttctgccttcgttggctcagattgagctgcttctgcattgcctccttcttctgccttcgttggctcagattgaggtgcttctgcattgcctccttcttctgcttgcaatgtag

SEQ ID NO: 3278 - protein, 172 aa, Artificial Sequence
  Description of Artificial Sequence: synthetic amino acid sequence
VLLHCLLLLPSLAQIEVLLHCFLLLSSLAQIELLLHCLLLLPSLAQIELLLRCFLLLSSLAQIEVLLHCFLLLPSLAQIELLLRCFLLLSSLAQIELLLHCLLLLPSLAQIELLLHCLLLLPSLAQIEVLLHCLLLLPSLAQIELLLHCLLLLPSLAQIEVLLHCLLLLLAM

SEQ ID NO: 3279 - DNA, 345 bp, Artificial Sequence; identical to SEQ ID NO: 3181
  Description of Artificial Sequence: synthetic nucleic acid sequence

SEQ ID NO: 3280 - protein, 114 aa, Artificial Sequence; identical to SEQ ID NO: 3182
  Description of Artificial Sequence: synthetic amino acid sequence

SEQ ID NO: 3281 - DNA, 342 bp, Artificial Sequence
  Description of Artificial Sequence: synthetic nucleic acid sequence
atgagtttgcttaaccatgggataaagcctaacttgtttaattgttctgccattaatacaagaactgagaaccaaacgagtgtattccatgcgcctgtttcatttaaaatatctgaccacgctaatacacctgttaatagtaacaatgctaaagcaataaatgcagtgagcgtggcatcaacattaatgaagcttcctaatacccacaaagccaatgctatgataaagacaccaaccatcaatttttcggctatagacatatgtcccatttcttctagttgttcagtagcccattttttagcgttaggcgtttctttaacagtaggtgggtataatttataa

SEQ ID NO: 3282 - protein, 113 aa, Artificial Sequence
  Description of Artificial Sequence: synthetic amino acid sequence
MSLLNHGIKPNLFNCSAINTRTENQTSVFHAPVSFKISDHANTPVNSNNAKAINAVSVASTLMKLPNTHKANAMIKTPTINFSAIDICPISSSCSVAHFLALGVSLTVGGYNL

SEQ ID NO: 3283 - DNA, 1146 bp, Artificial Sequence
  Description of Artificial Sequence: synthetic nucleic acid sequence
atggcctttttcatttcaagaggatttgtaaaaacagggctaggtcgacgtattgctctgcaattcgttaaattatttggaaagaaaacgcttggtttggcttattcacttgttggtgttgaccttatcttagctcctgctacgccaagtaatacagcacgtgctggtggtattatgtttccaatcattaagtccttgtcagagtcatttggttcatcgccgagagatggttctgagagaaaaatgggtgcgtttttaatctttactgagttccaaggtaatttaattacttcagctatgtttttaacagctatggccggtaaccctatagcgcaaagtttagctgaaaaaacggcacacgttcaaattacatggatgaattggtttgttgctgctattatacccggattgatttctctcatcgttgtccctttcattatttataaattatacccacctactgttaaagaaacgcctaacgctaaaaaatgggctactgaacaactagaagaaatgggacatatgtctatagccgaaaaattgatggttggtgtctttatcatagcattggctttgtgggtattaggaagcttcattaatgttgatgccacgctcactgcatttattgctttagcattgttactattaacaggtgtattagcgtggtcagatattttaaatgaaacaggcgcatggaatacactcgtttggttctcagttcttgtattaatggcagaacaattaaacaagttaggctttatcccatggttaagcaaactcattgctcaaggtttgaatggctttagttggcctatcgttttagttttactcatcttgttttatttctactcacattatttattcgcaagtgcaacagcacatgtcagcgccatgtacgccgcgttactcggtgttgcagtcgcttcgggtgcaccgccattattcagtgcattaatgttagggttctttggtaacttactggcatcaacaacacactatagtagtggaccagcgcctatattatacgcagatggctatgttacacaaaagcgctggtggactatgaatattgtacttggtatagtctattttattatttggattggtgtaggttcactatggatgaaactcattggtatgatgtaa

SEQ ID NO: 3284 - protein, 381 aa, Artificial Sequence
  Description of Artificial Sequence: synthetic amino acid sequence
MAFFISRGFVKTGLGRRIALQFVKLFGKKTLGLAYSLVGVDLILAPATPSNTARAGGIMFPIIKSLSESFGSSPRDGSERKMGAFLIFTEFQGNLITSAMFLTAMAGNPIAQSLAEKTAHVQITWMNWFVAAIIPGLISLIVVPFIIYKLYPPTVKETPNAKKWATEQLEEMGHMSIAEKLMVGVFIIALALWVLGSFINVDATLTAFIALALLLLTGVLAWSDILNETGAWNTLVWFSVLVLMAEQLNKLGFIPWLSKLIAQGLNGFSWPIVLVLLILFYFYSHYLFASATAHVSAMYAALLGVAVASGAPPLFSALMLGFFGNLLASTTHYSSGPAPILYADGYVTQKRWWTMNIVLGIVYFIIWIGVGSLWMKLIGMM

SEQ ID NO: 3285 - DNA, 495 bp, Artificial Sequence
  Description of Artificial Sequence: synthetic nucleic acid sequence
atgcatgaaaaatggagtgaaggtcaatatattgcatactttcaggcgtttacaaatacgcatgcacctgttgaagtactaaaagaaaaatatgaacctgtcttaaaagaagatggcgtcgttggtttatcaatcgcgacaagacctgattgtttgcctgatgatgttgtagaatatttagctgaacttaatcagcgcacttacttatgggtagaattgggcctacaaactgtgcatcagtcaacttccgatttaataaatcgtgctcatgatatgcaaacatactatgacggcgtaacaaaattacgcaaacataatataaatgtttgtacgcacataatcaacggcttaccaggtgaaaattatgacatgatgatggagactgctaaagaagtcgctcagatggacgttcaaggtattaaaattcatttattacacttgctaaaaggaacgcctatggttaaacaatatgaaaaaggtatgctcgagtttatg

SEQ ID NO: 3286 - protein, 165 aa, Artificial Sequence
  Description of Artificial Sequence: synthetic amino acid sequence
MHEKWSEGQYIAYFQAFTNTHAPVEVLKEKYEPVLKEDGVVGLSIATRPDCLPDDVVEYLAELNQRTYLWVELGLQTVHQSTSDLINRAHDMQTYYDGVTKLRKHNINVCTHIINGLPGENYDMMMETAKEVAQMDVQGIKIHLLHLLKGTPMVKQYEKGMLEFM

SEQ ID NO: 3287 - DNA, 714 bp, Artificial Sequence
  Description of Artificial Sequence: synthetic nucleic acid sequence
atgaagctaaagagagagttcacgcactcacatctaaatatccattatataattaatagacatacacattggaggaaaatgattatgagtaaagtacatgtttttgatcacccattaatacaacacaaactaagttatattagagatgctcgcactggaacaaaagagtttagggaacttgtagatgaagtcggtatgttaatggcttatgaagtaactagagacttagaactgcaagatgttgaaatacaaacacctgtgactaaaatgacagctaaacgtttggcgggtaaaaagttagcaattgtacctattttaagagctggtctaggcatgacagatggtgtgttaagtcttgttcctgctgctagggtaggacatataggactatatagagatccagagactcttgaagcggtagagtactttgcgaaaatgcctcaagacatcgatgaacgtcaaattattgtggttgatcctatgcttgctactggtgcttcagctattgaagcaatttcttcattaaaaaaacgtggagctaaaagtatacgttttatgtgtttaatagctgcccctgaaggcgttgaaaaaatgcaagaagcacacccagatgtagatatatatattgcggcattagatgaaaaattaaatgacaaagcgtatattacaccaggtttaggtgatgcaggggatagattattcggtactaaataa

SEQ ID NO: 3288 - protein, 237 aa, Artificial Sequence
  Description of Artificial Sequence: synthetic amino acid sequence
MKLKREFTHSHLNIHYIINRHTHWRKMIMSKVHVFDHPLIQHKLSYIRDARTGTKEFRELVDEVGMLMAYEVTRDLELQDVEIQTPVTKMTAKRLAGKKLAIVPILRAGLGMTDGVLSLVPAARVGHIGLYRDPETLEAVEYFAKMPQDIDERQIIVVDPMLATGASAIEAISSLKKRGAKSIRFMCLIAAPEGVEKMQEAHPDVDIYIAALDEKLNDKAYITPGLGDAGDRLFGTK

SEQ ID NO: 3289 - DNA, 624 bp, Artificial Sequence
  Description of Artificial Sequence: synthetic nucleic acid sequence
atggataaggaaaaaggactgttaattgttctttcaggcccttcaggtgttggaaagggaactgttagaaagaagatatttgaagacccaactacttcatataagtattctatatcaatgacgacacgtcatatgcgtgaaggtgaaattgatggtgtagattacttctttaaaacaaaggaagaatttgaggcgttaattaaagacgaccagtttattgagtatgcacaatatgtaggtaattactatggtacacctgtacaatatgtaaaggatactatggaagaaggtcatgacgtctttttagaaatcgaagttgaaggtgctaagcaagtaagaaagaaatttccagatgcgttgttcatatttttagcgcctccaagtttagatgacttgaaagaacgtcttgttggtagaggaactgaatcagatgaaaagattcaaagtcgtgtgaacgaggcacgaaaagaagtagaaatgatgaatttatacgactacgttgtagttaacgacgaggttgaactcgctaagaatcgaattcagtcaatagttgaagctgagcatttaaaaagagagcgaatcgaagctaaatatagaaaaatgttactggaggtcaaaaaataa

SEQ ID NO: 3290 - protein, 207 aa, Artificial Sequence
  Description of Artificial Sequence: synthetic amino acid sequence
MDKEKGLLIVLSGPSGVGKGTVRKKIFEDPTTSYKYSISMTTRHMREGEIDGVDYFFKTKEEFEALIKDDQFIEYAQYVGNYYGTPVQYVKDTMEEGHDVFLEIEVEGAKQVRKKFPDALFIFLAPPSLDDLKERLVGRGTESDEKIQSRVNEARKEVEMMNLYDYVVVNDEVELAKNRIQSIVEAEHLKRERIEAKYRKMLLEVKK

SEQ ID NO: 3291 - DNA, 1180 bp, Artificial Sequence
  Description of Artificial Sequence: synthetic nucleic acid sequence
atgattgccattgggggatgtataggaactggtctattcatgacttctggtggagctatacatgacgcaggtgcattgggtgctttgattgcctatgcagttattggagcgatggtgttctttctaatgacgtcgttaggggagatggcgacatatttgcctgtgtcaggttcatttagtacttatgctacacgctttgtcgatccttcactaggttttgctttaggatggaattattggttcaactgggtgataacagtagcagctgatgttactattgcagcgcaagttatacaatattggtcccctatgcaaggtataccagcttgggtctggagttgtattttccttattattattttcgcgcttaattctttatccgttagagtatatggagagagtgaatattggttcgcacttatcaaagtagttacagtcatcatatttataggaattggtatcttaactattttagggattatgggtggagaatttgtaggatttgatacgtttacaaaaggagatgggccaatactaggtgggaatttaggaggtagcttgctatcaattcttggtgtatttctagtcgcaggcttctcattccaaggaactgaacttattggtattacagcaggtgaatctgaaaatccagaaagagcagttccaaaagcgattaaacaagtattttggcgtatacttttattttacattctagctattttcattattggtatgttgattccatatgatagtaaggcattaatgggcggtggtgatagtatagctacttcaccttttacattagtatttaagaatgctggattagcttttgctgcttcatttatgaatgctgttatattaacaagtgtattatcagcaggtaactcaggaatgtatgcttcaacaagaatgttatattcgatgagtaaagataaattagcttataattcttttggaaaaacaaataaaagtggcgtaccttatgtatctctaattgcaactggagtactagtcattcttattttcgcattgcaacatttaagtggagatgcatatgaatacattgtagctgctagcggaatgactggttttattgcttgggttggtatagcaatcagtcactttagatttagacgcgcatttgataaacaaaattatgataaatcaaaattaaaatatc

SEQ ID NO: 3292 - protein, 394 aa, Artificial Sequence
  Description of Artificial Sequence: synthetic amino acid sequence
  MOD_RES (394): variable amino acid
MIAIGGCIGTGLFMTSGGAIHDAGALGALIAYAVIGAMVFFLMTSLGEMATYLPVSGSFSTYATRFVDPSLGFALGWNYWFNWVITVAADVTIAAQVIQYWSPMQGIPAWVWSCIFLIIIFALNSLSVRVYGESEYWFALIKVVTVIIFIGIGILTILGIMGGEFVGFDTFTKGDGPILGGNLGGSLLSILGVFLVAGFSFQGTELIGITAGESENPERAVPKAIKQVFWRILLFYILAIFIIGMLIPYDSKALMGGGDSIATSPFTLVFKNAGLAFAASFMNAVILTSVLSAGNSGMYASTRMLYSMSKDKLAYNSFGKTNKSGVPYVSLIATGVLVILIFALQHLSGDAYEYIVAASGMTGFIAWVGIAISHFRFRRAFDKQNYDKSKLKYX

SEQ ID NO: 3293 - DNA, 1116 bp, Artificial Sequence
  Description of Artificial Sequence: synthetic nucleic acid sequence
atggaggaaaacgaaatgacaaaagaaaatatttgtatcgtttttggaggtaaaagtgcagaacacgatgtttcaattttaactgcacaaaatgttttaaacgcaattgataaagaacgatatcaagttgatatcatttatataacaaacgatggtgaatggaagaaaaaagataatattacacaagaaataaaaaatactgatgaactcgtcattaacgatgtagagactggagaaatctcacagttactcagtaaaggtagtttaggaaaatcatatgatgcagtattcccattattgcatggtccaaatggagaagatggaactatccaaggtctttttgaagtacttgatataccatatgtaggtaatggtgtgttagctgcttcaagctcaatggataaactcgtgatgaaacaattatttgagcatagaggtttacctcaattaccttatattagctttttaagaagtgagtatgaaaaatatgaaaataatatcattaaattagttaatgataagttaacatatccggtatttgtaaaacctgctaatctcggttcaagtgttggtataagtaaatgtaacaatgaagaagaattaaaatctgggatagctgaagcattccaatttgatcgtaaacttgtcattgaacaagggattaatgctagagagatcgaagtagctgtcttaggtaacgattatcctgaaacgacatggcctggtgaggttgttaaggatgtagcgttttatgattataaatcaaagtataaagacggtaagattagattagatattccagcagatttagatcaagatgttcaaatgacattaagaaacatggcattagaggcctttaaagctactgattgttcgggattagttcgtgcagatttctttgttactgatgataatcaaatttatattaatgaaacaaatgccatgccaggatttactgcatatagtatgtatccaaacttatggaaaaatatgggcttatcttaccctgatttaattgctaaattgattgatttagctaaagaacgttatgaagataaaaagaaaaataaatattcacaaatgtttcatctaaaaccgatcgttttttatatttaa

SEQ ID NO: 3294 - protein, 371 aa, Artificial Sequence
  Description of Artificial Sequence: synthetic amino acid sequence
MEENEMTKENICIVFGGKSAEHDVSILTAQNVLNAIDKERYQVDIIYITNDGEWKKKDNITQEIKNTDELVINDVETGEISQLLSKGSLGKSYDAVFPLLHGPNGEDGTIQGLFEVLDIPYVGNGVLAASSSMDKLVMKQLFEHRGLPQLPYISFLRSEYEKYENNIIKLVNDKLTYPVFVKPANLGSSVGISKCNNEEELKSGIAEAFQFDRKLVIEQGINAREIEVAVLGNDYPETTWPGEVVKDVAFYDYKSKYKDGKIRLDIPADLDQDVQMTLRNMALEAFKATDCSGLVRADFFVTDDNQIYINETNAMPGFTAYSMYPNLWKNMGLSYPDLIAKLIDLAKERYEDKKKNKYSQMFHLKPIVFYI

SEQ ID NO: 3295 - DNA, 978 bp, Artificial Sequence
  Description of Artificial Sequence: synthetic nucleic acid sequence
atgaaaatttttgattatgaagatatacaattaattcccaataaatgtattgttgaaagcagatctgagtgtaatacttcggttaaatttgggcctcgtacttttaaattgccagttgttccagcaaatatgcaaacagtcatgaatgaagaacttgcacaatggtttgcagaaaacgattatttttatatcatgcatagatttaatgaagaaaatagaattccatttataaaaaaaatgcatcatgcagggttatttgcttctatttctgttggagttaaagaaaacgaatttaattttattgaaaaattagcttcttcatcgctcataccagaatatataacaattgatattgctcatggtcactcaaattcagttataaatatgattaagcatataaaaaaacatttaccaaatagttttgtgatagctggtaatgttgggacgcctgaaggagtaagagaacttgagaatgccggtgcagatgctacaaaagtaggtattggtccaggaagagtatgtattactaaaattaaaactggatttggtacaggaggttggcaactttctgcgttaaatctttgtaataaggcagctagaaaacctattattgcagatggagggttaagaacccacggtgatatagccaaatcaattcgttttggtgccactatggtaatgattggctctttatttgctgcccacgaggaatcaccgggtgaaaccgtcgagctagatggcaaaaaatataaagaatattttggtagtgcctcagaatatcaaaaaggtgaacataagaacgttgaaggtaaaaaaatgtttgtagaacacaaaggatctcttaaagatacccttactgaaatggaacaagatttacagagttcaatttcatatgcaggaggaaaggacttgaagtcattaagaacagttgattacgtcatagtaagaaattcaatctttaatggtgatagagattag

SEQ ID NO: 3296 - protein, 325 aa, Artificial Sequence
  Description of Artificial Sequence: synthetic amino acid sequence
MKIFDYEDIQLIPNKCIVESRSECNTSVKFGPRTFKLPVVPANMQTVMNEELAQWFAENDYFYIMHRFNEENRIPFIKKMHHAGLFASISVGVKENEFNFIEKLASSSLIPEYITIDIAHGHSNSVINMIKHIKKHLPNSFVIAGNVGTPEGVRELENAGADATKVGIGPGRVCITKIKTGFGTGGWQLSALNLCNKAARKPIIADGGLRTHGDIAKSIRFGATMVMIGSLFAAHEESPGETVELDGKKYKEYFGSASEYQKGEHKNVEGKKMFVEHKGSLKDTLTEMEQDLQSSISYAGGKDLKSLRTVDYVIVRNSIFNGDRD

SEQ ID NO: 3297 - DNA, 750 bp, Artificial Sequence
  Description of Artificial Sequence: synthetic nucleic acid sequence
atgacaagtgacattaatcataaagatacaatagagtattttaaacaacataaatattttaactatgatgccaatcatattcatttctttaagcaagataacattgttgctttaagtgaagaaggaaagcttgttttaaatagagatggacatataatggaaacacctaatggtaatgggggtgtattcaagtctcttaagaaagcaggataccttgataagatgcaacaagatcacgtcaaatatatcttcttaaataacattgataatgtcttagttaaagttttagacccgttatttgccggttttacagtgacacaaagtaaagacatcacatcaaaaacaattcaacctaaagatagtgaaagtgtaggtcggcttgtaaatgttgattgtaaagacactgtgttagagtattctgaattagatacagacatagcaaatcaatttaacaatgctaatataggtatccatgcttttaaactaggtttcattaccagtgctgttgatagagaattaccgtatcatttggcaatcaagcaattaaagcaattagatgaaaattttggtgtggttgaacgtcctacattaaagtttgaattattttattttgatatatttaggtacggtacaagctttgtaacattacaagttccaagagaagaagaattttcacctttaaaaaataaagaaggtaaggatagtgtacatacagctacagaagatttaaaacgaatggatttgatttaa

SEQ ID NO: 3298 - protein, 249 aa, Artificial Sequence
  Description of Artificial Sequence: synthetic amino acid sequence
MTSDINHKDTIEYFKQHKYFNYDANHIHFFKQDNIVALSEEGKLVLNRDGHIMETPNGNGGVFKSLKKAGYLDKMQQDHVKYIFLNNIDNVLVKVLDPLFAGFTVTQSKDITSKTIQPKDSESVGRLVNVDCKDTVLEYSELDTDIANQFNNANIGIHAFKLGFITSAVDRELPYHLAIKQLKQLDENFGVVERPTLKFELFYFDIFRYGTSFVTLQVPREEEFSPLKNKEGKDSVHTATEDLKRMDLI

SEQ ID NO: 3299 - DNA, 1263 bp, Artificial Sequence
  Description of Artificial Sequence: synthetic nucleic acid sequence
atgcacatgagtgaagcaaatcataaaaacatcgttgttgtaggtgcaggaattattggtacgtcagtagcgacaatgctttcaaaagtaagtcctaactggcatatcgatatgtttgaaagactagaaggcgctggtattgaaagttcaaatgaaaataataatgctgggacaggtcatgcggcattatgtgaattaaactatacagttgaacaagatgatggttcaattgatgcatctaaagcgcaagaaattaatgaacaattcgaattatctagacaattctggggtaatttagttaaaaatggtgatatttctaatcctgaagaatttattcaaccattacctcatatcagtttcgttatgggaccaacaaacgttaactttttaagaaaacgttatgaaacactaagaactcttccaatgttcgatacaatcgaatatacagaagacatggaaacaatgagaaaatggatgccattaatgatggaaaatcgtgaaccaggtcatcaaatggcagcaagtaaaattgatgaaggtacagatgtgaactatggtgcgttaacacgtaagttagcacattacttagaacaaaaatctaatgtttcattaaaatacaatcatgatgttgtagatttaacacaaagagaagatggcaaatgggaagttgtcgttgaaaatagagaaactaaagaaaaagtaactaaaatagcagataaagtgtttattggtgctggcggtcactctattccgttattacaaaaatctggcgttaaacaaagagaacacctaggtggtttcccaatcagtggtcaattcttaagatgtacaaacccagatattattaaacaacatgcggctaaagtttacagtaaagagcctcaaggtaagccaccaatgactgtaccacaccttgatacacgttatatcaatggtaaacaaacattattatttggtccatatgcgaatatcggccctaaattcttgaaattcggttcaaatctagacttattcgaatcaatcaaaccatataacattactacaatgttggcttcagcagttaaaaatgtacctttaattaaatattcaattgatcaaatgatcaaaactaaagaaggttgtatgaactatttaagaacatttattcctgatgctaaagatgaagattgggaactttacactgctggtaaacgtgttcaagttattaaagataaccatttgaagcaggaccttactttattgcagcagtcgtatttgttatag

SEQ ID NO: 3300 - protein, 420 aa, Artificial Sequence
  Description of Artificial Sequence: synthetic amino acid sequence
MHMSEANHKNIVVVGAGIIGTSVATMLSKVSPNWHIDMFERLEGAGIESSNENNNAGTGHAALCELNYTVEQDDGSIDASKAQEINEQFELSRQFWGNLVKNGDISNPEEFIQPLPHISFVMGPTNVNFLRKRYETLRTLPMFDTIEYTEDMETMRKWMPLMMENREPGHQMAASKIDEGTDVNYGALTRKLAHYLEQKSNVSLKYNHDVVDLTQREDGKWEVVVENRETKEKVTKIADKVFIGAGGHSIPLLQKSGVKQREHLGGFPISGQFLRCTNPDIIKQHAAKVYSKEPQGKPPMTVPHLDTRYINGKQTLLFGPYANIGPKFLKFGSNLDLFESIKPYNITTMLASAVKNVPLIKYSIDQMIKTKEGCMNYLRTFIPDAKDEDWELYTAGKRVQVIKDNHLKQDLTLLQQSYLL

SEQ ID NO: 3301 - DNA, 420 bp, Artificial Sequence; identical to SEQ ID NO: 3043
  Description of Artificial Sequence: synthetic nucleic acid sequence

SEQ ID NO: 3302 - protein, 139 aa, Artificial Sequence; identical to SEQ ID NO: 3044
  Description of Artificial Sequence: synthetic amino acid sequence

SEQ ID NO: 3303 - DNA, 405 bp, Artificial Sequence; identical to SEQ ID NO: 3005
  Description of Artificial Sequence: synthetic nucleic acid sequence

SEQ ID NO: 3304 - protein, 134 aa, Artificial Sequence; identical to SEQ ID NO: 3006
  Description of Artificial Sequence: synthetic amino acid sequence

SEQ ID NO: 3305 - DNA, 1179 bp, Artificial Sequence
  Description of Artificial Sequence: synthetic nucleic acid sequence
atgactgtcgcacgcacaacaacatttatattaagtgttttcatcgtaggtatggttgagatgatggttgcaggtattatgaatttaatgagtcaagatcttcatgtttctgaagcggtggttgggcaactggtaacgttgtacgcgcttacctttgcgatatgtggtccgttattagtgaagttgactcatcggtttacttcgcgatcagtattattatggacgttaattgtctttatcttcgggaatggtatgattgccattgcacctcattttggaataatagttgtaggacgtattttatcttctgccgcagcttcactcattattgtgaaagttttagcactcacagcgatgctcacatcagcaaaaaacagaggtaaaatgattggtattgtttatacaggttttagtggggcgaatgtctttggtgttcccatcggtacagtgattggcgactgggtaggatggcgatttacatttttattcattattattgtaagtgtatttgttggtgttttaatgttaatttatctaccaaaagaagatgaattgtcacatccaaatcaaacacctcgttcatctagtattgaatcacaaactggctcaagcgtcataagacctcgtgaggtttttaaatatctgatgattacatttttagtgctggttgctaattctgtaacattcgtgtttattaatccattaattttatccaatggacatgaaatgtcttttgtgtctttagcactacttgttaatggtgtagcaggtgtgattggtacttcattaggcggtgttttatctgataagtttactagtaagcgttggttaataatttcgatttcaatatttataataatgatgataattcttaacttattattaccaggaacaggattattattagttggcttatttatgtggaatttaatgcagtggagtacaaatccagctattcaaagtggtattattgaacacgtcgaaggagatacaagccaagtgatgagttggaatatgtcgagtctcaatgccggtattggcgttggcggaatcgtaggtggactcgttatgacacatttatcagtggaatatgttacttatactagtgcattgataggtttaattagtcttatcattgtattcactttaaaaaatagacattatgctaaaaatttatga

SEQ ID NO: 3306 - protein, 392 aa, Artificial Sequence
  Description of Artificial Sequence: synthetic amino acid sequence
MTVARTTTFILSVFIVGMVEMMVAGIMNLMSQDLHVSEAVVGQLVTLYALTFAICGPLLVKLTHRFTSRSVLLWTLIVFIFGNGMIAIAPHFGIIVVGRILSSAAASLIIVKVLALTAMLTSAKNRGKMIGIVYTGFSGANVFGVPIGTVIGDWVGWRFTFLFIIIVSVFVGVLMLIYLPKEDELSHPNQTPRSSSIESQTGSSVIRPREVFKYLMITFLVLVANSVTFVFINPLILSNGHEMSFVSLALLVNGVAGVIGTSLGGVLSDKFTSKRWLIISISIFIIMMIILNLLLPGTGLLLVGLFMWNLMQWSTNPAIQSGIIEHVEGDTSQVMSWNMSSLNAGIGVGGIVGGLVMTHLSVEYVTYTSALIGLISLIIVFTLKNRHYAKNL

SEQ ID NO: 3307 - DNA, 816 bp, Artificial Sequence; identical to SEQ ID NO: 2821
  Description of Artificial Sequence: synthetic nucleic acid sequence

SEQ ID NO: 3308 - protein, 271 aa, Artificial Sequence; identical to SEQ ID NO: 2822
  Description of Artificial Sequence: synthetic amino acid sequence

SEQ ID NO: 3309 - DNA, 945 bp, Artificial Sequence
  Description of Artificial Sequence: synthetic nucleic acid sequence
gtgtgggcttggtacactcatttacaagaattcaattctgatccgaatatacaaaattttgatgaaatgcttaacaaactacaaaaggtcagtttaattagtgcaagtgaagaaagtgggactaaaaaaattgtagatcactttgtcgaagaattatatagcgaagaaccaaaacaaaaaatcaatacaggttataaactggtggattacaaaataggtggtttagaacctacacagttgattgtaatcgctgcgagaccgtcagtaggtaaaacggggtttgcgcttaatatgatgcttaatatagcgtctcaaggctataaaacttcattcttcagtctagagacaactggcgtgtctgtattgaaaaggatgttatcagcagaaactgggatagaactaactcgtatcaaagaaattaaagatttagaaccggatgaattaacacgtttaacaactgcagcagacagaatactcaaacttgatatagatatacacgataaaagcaatattactacacatgatgtacgtaaacaagcgatgaagaacaaagatgtgcaacaggttatcttcattgactacttacaacttatgcagacagacagtaagttagatcgtcgtaatggtatcgaaaagatatcgcgagatttgaagattattgcaaatgaaacaggtgcaattattgtgttgctatctcaattgagcagaggtgtagaaacaagaaatgacaaaagacctatgctatctgacatgaaagaagcaggtggaattgaagcagatgcaagtttagctatgttgttatatcgagatgattactacaaccgtgatgatgttgatgactcaggcaagtcaattgttgaatgtaacatcgcaaagaataaagacggagaaacaggtgtagttgagtttgagtactacaagaaaacgcagaggttcttcacatga

SEQ ID NO: 3310 - protein, 314 aa, Artificial Sequence
  Description of Artificial Sequence: synthetic amino acid sequence
VWAWYTHLQEFNSDPNIQNFDEMLNKLQKVSLISASEESGTKKIVDHFVEELYSEEPKQKINTGYKLVDYKIGGLEPTQLIVIAARPSVGKTGFALNMMLNIASQGYKTSFFSLETTGVSVLKRMLSAETGIELTRIKEIKDLEPDELTRLTTAADRILKLDIDIHDKSNITTHDVRKQAMKNKDVQQVIFIDYLQLMQTDSKLDRRNGIEKISRDLKIIANETGAIIVLLSQLSRGVETRNDKRPMLSDMKEAGGIEADASLAMLLYRDDYYNRDDVDDSGKSIVECNIAKNKDGETGVVEFEYYKKTQRFFT

SEQ ID NO: 3311 - DNA, 870 bp, Artificial Sequence
  Description of Artificial Sequence: synthetic nucleic acid sequence
gtgaatttattaaaatttcacaacaaaatcaaaggatatactcaaaatagacaaccaggtattgaagcggatatggaacctaaacccattgcagaattagaagaatataaagcagcaggaaagttagagaataaagttgctctaataacaggaggagattcaggtattggacgtgcgatagcaatactatatgctaaagaaggggcaaatgttgctattggttattatgacgaacatcaagatgccgaagacacagttaatcgacttcaagaaatgggtgtaaaagctaaagcttatgctcatgacttaaaagatgaaaagcaatctcaaaagttaatcaaagatgtcataaatgacttcggtagtttaaatatattagtaaataatgggggcgtgcaatttccacgcgatcattttgaagatatcactccacaacaagtgaaagaaacttttatgacgaatatttttggtatgatgtttttatcccaatcagcagtaccttacctatctgaaggagatacaattataaacactacaagtgtcacagcatatagaggatcggggcatctcattgattattcagctacaaaaggtgccatagtatcgtttacccgttctcttgctactactttaatggaaaagggaattcgcgttaacgccgttgcgcccggcccaatctattcacctttaattcctgcgacatttgatgaagaaaaagtagaacatcaaggtgacgaaacgccgatgggtcgtcgtggacaaccagcagaacttgcaccttcttatgtcttcttagcaacacatgcagatagttcctatattactggtcaagtcattcatgtcaatggtggcgattttatcacatcttaa

SEQ ID NO: 3312 - protein, 289 aa, Artificial Sequence
  Description of Artificial Sequence: synthetic amino acid sequence
VNLLKFHNKIKGYTQNRQPGIEADMEPKPIAELEEYKAAGKLENKVALITGGDSGIGRAIAILYAKEGANVAIGYYDEHQDAEDTVNRLQEMGVKAKAYAHDLKDEKQSQKLIKDVINDFGSLNILVNNGGVQFPRDHFEDITPQQVKETFMTNIFGMMFLSQSAVPYLSEGDTIINTTSVTAYRGSGHLIDYSATKGAIVSFTRSLATTLMEKGIRVNAVAPGPIYSPLIPATFDEEKVEHQGDETPMGRRGQPAELAPSYVFLATHADSSYITGQVIHVNGGDFITS

SEQ ID NO: 3313 - DNA, 693 bp, Artificial Sequence
  Description of Artificial Sequence: synthetic nucleic acid sequence
atggataaactcgtgatgaaacaattatttgagcatagaggtttacctcaattaccttatattagctttttaagaagtgagtatgaaaaatatgaaaataatatcattaaattagttaatgataagttaacatatccggtatttgtaaaacctgctaatctcggttcaagtgttggtataagtaaatgtaacaatgaagaagaattaaaatctgggatagctgaagcattccaatttgatcgtaaacttgtcattgaacaagggattaatgctagagagatcgaagtagctgtcttaggtaacgattatcctgaaacgacatggcctggtgaggttgttaaggatgtagcgttttatgattataaatcaaagtataaagacggtaagattagattagatattccagcagatttagatcaagatgttcaaatgacattaagaaacatggcattagaggcctttaaagctactgattgttcgggattagttcgtgcagatttctttgttactgatgataatcaaatttatattaatgaaacaaatgccatgccaggatttactgcatatagtatgtatccaaacttatggaaaaatatgggcttatcttaccctgatttaattgctaaattgattgatttagctaaagaacgttatgaagataaaaagaaaaataaatataaaattgattattag

SEQ ID NO: 3314 - protein, 230 aa, Artificial Sequence
  Description of Artificial Sequence: synthetic amino acid sequence
MDKLVMKQLFEHRGLPQLPYISFLRSEYEKYENNIIKLVNDKLTYPVFVKPANLGSSVGISKCNNEEELKSGIAEAFQFDRKLVIEQGINAREIEVAVLGNDYPETTWPGEVVKDVAFYDYKSKYKDGKIRLDIPADLDQDVQMTLRNMALEAFKATDCSGLVRADFFVTDDNQIYINETNAMPGFTAYSMYPNLWKNMGLSYPDLIAKLIDLAKERYEDKKKNKYKIDY

SEQ ID NO: 3315 - DNA, 477 bp, Artificial Sequence
  Description of Artificial Sequence: synthetic nucleic acid sequence
gtgtttaattacttatctacgaaagaagacgaaagagaatgggttgaagcaattagagtagcaagaaatatcctaaaacaaaaagctatggacccatttaatggtggcgaaatttcaccaggaccacaagttcaaacggatgaagaaattctagattgggtacgtaaagatggagaaactgcattacatccatcttgtagcgcgaaaatgggacctgcatctgacccaatggcagtagtcgatccattaactatgaaagtacatggtatggaaaatttacgtgtcgttgatgcttcagcaatgcctagaacaacaaatggtaatattcatgcacctgtattgatgttagctgagaaagcagcggacattattcgtggtagaaaaccgcttgaacctcaatatgttgactattataaacatggtattgatgatgaaaaagcaggtgcaatggaagatgatccattctaccaatattaa

SEQ ID NO: 3316 - protein, 158 aa, Artificial Sequence
  Description of Artificial Sequence: synthetic amino acid sequence
VFNYLSTKEDEREWVEAIRVARNILKQKAMDPFNGGEISPGPQVQTDEEILDWVRKDGETALHPSCSAKMGPASDPMAVVDPLTMKVHGMENLRVVDASAMPRTTNGNIHAPVLMLAEKAADIIRGRKPLEPQYVDYYKHGIDDEKAGAMEDDPFYQY

SEQ ID NO: 3317 - DNA, 1263 bp, Artificial Sequence
  Description of Artificial Sequence: synthetic nucleic acid sequence
atgaataaatcaaatttactagcacctgagaattataatattgttacagaaatagaaaaatatgcctcagaagatcataaaaaagccattatttacaaggataacgagcatgaaaatatttctgtaagttataaagaacttatcagtaatgctaataaagtagggaatgtattcctcaatcatgggctaaaaaagggagataaagttctcatcatgatgccacgtgcaatcgttacatatgaattatatattgcagcattgaaactagggatagcgattgttccaagttcggaaatgttacgaacaaaagatttacaatatcgaattactcacggtgagattgatgcagttatttcatttgattctctaactaaagaatttgaaaacgttaaagaatatgaccaattaaaaaaatttatagtagctggtcacaaagaagattgggtttcaatagaagatgaaaaagaaaaagtaagtgatgaccttaaaggcgcagatacaacacgagatgatttggcgattctttcttatacatcaggtacaacaggcaatccaaaagcagtaacgcattcacatggatgggggtatgcccatttacaaatggcaccaaaacattggttatgtatacaagagaatgatcttgtatgggcaactgcagcaccagggtggcaaaagtgggtgtggagtccatttttatctgtattagggatgggagcaacagcatttgtctataacggtcgtttccaccctgaaacatatctcgagttacttcaaaattatcaaattaatgttctatgttgtacaccaacagaatatcgtatgatggctaaacttagtcatttagaacagtacaatttagagtatttacacagtgcggtgtctgcgggtgaacctttaaatcgagaagttgttgaacaatttaaacgtcattttaatattactgttcgagatggatatggacaaaccgaaagtacattgttgatcggatttctaaaagatactgaaccacgtatgggttctatgggcaaaggtatacctggtagttttgttactgtcattgacgatgatggtaaagaggttggtccaaatgttaaaggtaatatcgccgtgcctttagacttaccggctttatttaaaggttactttaaagatgaagcacgcacaaaagcagcttcaacaggtgattattatgttactggagaccaagctcatattgatatatatcagtggtcaatcatttttacgtcctttattttaaaataa

SEQ ID NO: 3318 - protein, 420 aa, Artificial Sequence
  Description of Artificial Sequence: synthetic amino acid sequence
MNKSNLLAPENYNIVTEIEKYASEDHKKAIIYKDNEHENISVSYKELISNANKVGNVFLNHGLKKGDKVLIMMPRAIVTYELYIAALKLGIAIVPSSEMLRTKDLQYRITHGEIDAVISFDSLTKEFENVKEYDQLKKFIVAGHKEDWVSIEDEKEKVSDDLKGADTTRDDLAILSYTSGTTGNPKAVTHSHGWGYAHLQMAPKHWLCIQENDLVWATAAPGWQKWVWSPFLSVLGMGATAFVYNGRFHPETYLELLQNYQINVLCCTPTEYRMMAKLSHLEQYNLEYLHSAVSAGEPLNREVVEQFKRHFNITVRDGYGQTESTLLIGFLKDTEPRMGSMGKGIPGSFVTVIDDDGKEVGPNVKGNIAVPLDLPALFKGYFKDEARTKAASTGDYYVTGDQAHIDIYQWSIIFTSFILK

SEQ ID NO: 3319 - DNA, 633 bp, Artificial Sequence; identical to SEQ ID NO: 2863
  Description of Artificial Sequence: synthetic nucleic acid sequence

SEQ ID NO: 3320 - protein, 210 aa, Artificial Sequence; identical to SEQ ID NO: 2864
  Description of Artificial Sequence: synthetic amino acid sequence

SEQ ID NO: 3321 - DNA, 384 bp, Artificial Sequence
  Description of Artificial Sequence: synthetic nucleic acid sequence
atgactgctaatgcatatgggttgttatcacctactgaagtgattgcactaccaatttgtttaagtactgcaataacccctggagaaattaagtttgcaagaccaaatgtaactgctggagccaataaaataacaacaattaaatctagtccctctggaacttttttctcaacaaacttgattccaaatgcaacaacatacgctgcgataaacgcaggtaataattttgagtcatgtaatactaaacctacaatgactgcaaatactggagacacttctaactttagacaagttaatataccaacagctataccacttaaactccctgctagatcaccaatttcttggaaaaatttaacatggaatacgccaccaattgcgtaa

SEQ ID NO: 3322 - protein, 127 aa, Artificial Sequence
  Description of Artificial Sequence: synthetic amino acid sequence
MTANAYGLLSPTEVIALPICLSTAITPGEIKFARPNVTAGANKITTIKSSPSGTFFSTNLIPNATTYAAINAGNNFESCNTKPTMTANTGDTSNFRQVNIPTAIPLKLPARSPISWKNLTWNTPPIA

SEQ ID NO: 3323 - DNA, 2835 bp, Artificial Sequence
  Description of Artificial Sequence: synthetic nucleic acid sequence
atgaaaggaccgtcaattgtagtaaaaggtgcacgagcacataatttaaaaggagtagatattgaattacctaaaaacaagttgattgtcatgactggactttcaggctcaggtaaatcttcgttagcgttcgatactatttatgctgaaggtcaacgacgttatgtggaatcgttaagtgcatatgcgcgacaatttttaggacaaatggacaaacctgatgtagataccattgaaggtttgtcaccagcaatatctattgatcagaagacgacaagtaaaaacccacgttctaccgttgccactgtgactgaaatctatgattatattcgattattatatgcgcgtgtcggtaaaccgtactgtccttatcacggtatagaaattgaatcacaaactgttcaacaaatggttgatcgtattttagaattggaagaacgtacaaaaattcaattacttgctccagttatatcacatagaaaaggaagtcatgaaaaattaattgaagatataggtaagaaaggatatgtgcgtttacgtgttgatgatgaaatcgtcgatgtaaatgaagtgcctcaattggataaaaataaaaatcacacaattgaagttgttgttgatagacttgtagttaaagatggcattgagacgcgtttagcggactctattgagacagcacttgaacttgctgaaggtaatttaacagttgacgttattaatggagaagaacttaaattctctgagaaccacgcatgtcctatatgtggtttctctattggtgaattagaacctagaatgtttagtttcaacagtccgtttggtgcgtgtccaacttgtgatggtttaggtcaaaaactaaaagtagacctagatttagtcattcctgataaaaataaaactttaaatgaaggtgcaattgaaccatgggaaccaacaagttcggatttttatccaactttattaaaacgtgtatgtgaagtctacaaaattaatatggataagccatataaaaaattgactgatagacaaaaaaatatacttatgaatggttctggagaaaaagaaattgaatttactttcacgcaacgaaatggtggtactcgtaaacgtaaaatggtttttgaaggtgtggtacctaacattgaccgtcgttaccatgaatctccctctgaatatacacgcgaaatgatgagtaaatatatgacagagttaccgtgtgaaacttgtcatggcaaacgcttaagcaaagaagcgttatctgtatacgtaggcgactataatataggtgaagtcgttgaatattcaattaaaaacgcgctttattatttcgaaaatttaaaattaagcgaccaagataaatcgattgcagatcaaattttaaaagagattatttcaagattatcatttttaaataatgttggtttggaatatttgactttagatcgctcatcagggactttatctggaggggaagcacaacgtattcgtttagcaacacaaattggttcacgattaaccggagtactatatgttttagatgaaccttctattggattacatcaaagagataatgatagattaattaatactttaaaagaaatgcgtgatttaggtaatacacttattgtcgttgaacatgacgatgatactatgagagcagctgattatttagttgatgtgggtccgggagctggtaaccacggtggagaggttgtctcaagtggtacccctaataaagtaatgaaagataaaaaatccttaactggtcaatatttaagtggaaaaaaacgaattgaagtccctgaatacagacgagaaatcaccgatagaaagattcaaattaaaggtgctaaaagtaataatttgaaaaatgtaaatgtagacttcccactatctgtcttaactgttgttacaggtgtgtcaggttctggtaaaagttcactcgtcaatgaaattttatataaagcattagctcaaaaaattaataaatctaaagtgaaacctgggaattttgatgaaattaaaggaattgatcaattagataaaatcattgatattgatcaatcgccaataggtagaacaccacgttctaacccagccacatacactggtgtctttgatgacataagagatgtctttgcacaaacgaatgaagctaaaatacgaggttatcaaaaaggtagatttagttttaatgtcaaaggtggacgatgtgaagcttgtaaaggtgatggaattataaaaattgaaatgcattttttaccagatgtctatgtaccttgtgaagtatgtgatggtaaacgctataatcgtgagactttagaggtaacatacaaaggtaaaaatattgcggatgtattagaaatgactgttgaagaagctacgcatttctttgaaaatattcctaagattaaacgtaaattacaaacacttgtagatgttgggttggggtacattactttaggtcaacaagctactacattatctggtggcgaagcgcaacgtgtaaaactcgcatcagaattgcacaaacgttcaacggggcgttctatttatattcttgatgaaccaactacaggattacatgtcgacgatataagtcgtttattaaaggtattgaatcgtatagtggaaaatggtgatacggtcgttattatcgaacacaatcttgatgttattaaaacggctgatcatattattgatttaggtccagaaggcggtgaaggtggaggaacaatcatcgcaactggtacacctgaagagattgctcaaaataaagggtcttacactggtcaatacttaaaaccagtattagagagagacagcgttgaatag

SEQ ID NO: 3324 - protein, 944 aa, Artificial Sequence
  Description of Artificial Sequence: synthetic amino acid sequence
MKGPSIVVKGARAHNLKGVDIELPKNKLIVMTGLSGSGKSSLAFDTIYAEGQRRYVESLSAYARQFLGQMDKPDVDTIEGLSPAISIDQKTTSKNPRSTVATVTEIYDYIRLLYARVGKPYCPYHGIEIESQTVQQMVDRILELEERTKIQLLAPVISHRKGSHEKLIEDIGKKGYVRLRVDDEIVDVNEVPQLDKNKNHTIEVVVDRLVVKDGIETRLADSIETALELAEGNLTVDVINGEELKFSENHACPICGFSIGELEPRMFSFNSPFGACPTCDGLGQKLKVDLDLVIPDKNKTLNEGAIEPWEPTSSDFYPTLLKRVCEVYKINMDKPYKKLTDRQKNILMNGSGEKEIEFTFTQRNGGTRKRKMVFEGVVPNIDRRYHESPSEYTREMMSKYMTELPCETCHGKRLSKEALSVYVGDYNIGEVVEYSIKNALYYFENLKLSDQDKSIADQILKEIISRLSFLNNVGLEYLTLDRSSGTLSGGEAQRIRLATQIGSRLTGVLYVLDEPSIGLHQRDNDRLINTLKEMRDLGNTLIVVEHDDDTMRAADYLVDVGPGAGNHGGEVVSSGTPNKVMKDKKSLTGQYLSGKKRIEVPEYRREITDRKIQIKGAKSNNLKNVNVDFPLSVLTVVTGVSGSGKSSLVNEILYKALAQKINKSKVKPGNFDEIKGIDQLDKIIDIDQSPIGRTPRSNPATYTGVFDDIRDVFAQTNEAKIRGYQKGRFSFNVKGGRCEACKGDGIIKIEMHFLPDVYVPCEVCDGKRYNRETLEVTYKGKNIADVLEMTVEEATHFFENIPKIKRKLQTLVDVGLGYITLGQQATTLSGGEAQRVKLASELHKRSTGRSIYILDEPTTGLHVDDISRLLKVLNRIVENGDTVVIIEHNLDVIKTADHIIDLGPEGGEGGGTIIATGTPEEIAQNKGSYTGQYLKPVLERDSVE

SEQ ID NO: 3325 - DNA, 1044 bp, Artificial Sequence
  Description of Artificial Sequence: synthetic nucleic acid sequence
atggatattattttaggagtagggactttagtactcgttcttattatcatgacgcttttcttaaattttgcgccatatggtaaacaaggtttacaagctttatcaggggctgcttgtgccacgtttttaccacaggcgttcttaagttacgcaattggtggcgtattccatgttaaatttttccaagaaattggtgatctagcagggagtttaagtggtatagctgttggtatattaacttgtctaaagttagaagtgtctccagtatttgcagtcattgtaggtttagtattacatgactcaaaattattacctgcgtttatcgcagcgtatgttgttgcatttggaatcaagtttgttgagaaaaaagttccagagggactagatttaattgttgttattttattggctccagcagttacatttggtcttgcaaacttaatttctccaggggttattgcagtacttaaacaaattggtagtgcaatcacttcagtaggtgataacaacccatatgcattagcagtcattttaggacttgttattcctgtaactggtatgacgccattaagctcaatggtacttacaagcttattaggtttaactggtattccaatggcaattggtgcattaacatgtacaggagcatcttttgttaatggaatcttatttagcaaattaaaaattggtaataaaggtaatgccttcgcggtatttgtagaaccgttaactcaaattgacttaattgccaaatatccactacaactgtttggtgcgaatgccattattggtgttgtaaatgcttgtattgtcacatacagtggactaattattgatattaaaggtatggcaacacctatagcaggtgctattgtactttatggctttaacgacgctgtaagatctacaattacaattatcgcagtagcaattgcaagtgtgatattagcgtacgttattagtgctattattaataaatttaacttgatgaatgtcggattcaagttaccacgtagaaaaaaccaagttaaggagagtgtttaa

SEQ ID NO: 3326 - protein, 347 aa, Artificial Sequence
  Description of Artificial Sequence: synthetic amino acid sequence
MDIILGVGTLVLVLIIMTLFLNFAPYGKQGLQALSGAACATFLPQAFLSYAIGGVFHVKFFQEIGDLAGSLSGIAVGILTCLKLEVSPVFAVIVGLVLHDSKLLPAFIAAYVVAFGIKFVEKKVPEGLDLIVVILLAPAVTFGLANLISPGVIAVLKQIGSAITSVGDNNPYALAVILGLVIPVTGMTPLSSMVLTSLLGLTGIPMAIGALTCTGASFVNGILFSKLKIGNKGNAFAVFVEPLTQIDLIAKYPLQLFGANAIIGVVNACIVTYSGLIIDIKGMATPIAGAIVLYGFNDAVRSTITIIAVAIASVILAYVISAIINKFNLMNVGFKLPRRKNQVKESV

SEQ ID NO: 3327 - DNA, 1767 bp, Artificial Sequence
  Description of Artificial Sequence: synthetic nucleic acid sequence
atgaataaaagaacaacgtattgtggtttagtcacagaagaatttttaaacgaaaaagtaacattaaaaggttgggttcataacagacgagatttaggtggattaatttttgttgatttaagagatcgtggaggtattgtccaaatagtttttaatcctgacttttccgaagaagcattgcaagttgctgaaacagtacgctcagaatatgtagtcgaagttgaaggtgtagtaacaaaacgtgatgctgaaactattaacccaaaaatcaaaacaggtcaagttgaggttcaagtttcaaatattgagattattaacaaatcagaaacacctccattttcaattaatgaagaaaatgtaaacgttgatgaaaatattcgattaaaatatagatatttagatttacgtagacaagaattagcgcaaacttttaaaatgagacatcaaactacgcgttctatccgtcaatacttagataataatggcttcttcgatattgaaacaccagtattaacaaaatcaacacctgagggtgcgcgagattatctagtaccttcccgtgtacacgagggtgaattttacgcgttgccacaatcaccacaattatttaaacaactattaatgataagtggttttgataaatattatcaaattgttaaatgtttccgtgatgaagacttacgtgcagatcgtcaaccagaattcactcaagttgatattgaaatgagttttgtcgatcaagaagatatcatagccatgggtgaagatatgttacgtaaggttgtaaaagatgtaaaaggaatagacgttagtggcccattcccacgtatgacatatgcagaggctatggaccgttttggttcagataaacctgacactcgtttcggtatggaacttatcaatgtgtcacagcttggtaaagaaatgaattttaaagtttttaaagatacggtagataacaacggcgaaattaaagcaattgtcgcaaaagacgctgcaaataaatatacacgtaaagacatggatgcattaacagagtttgtaaatatatatggtgcaaaaggattagcttgggttaaagttgttgatgatggtttaagtggcccaattgctagatttttcgaagatgttaatgttgaaacacttaaacagttaacagaagctaaacctggagatttagtaatgtttgtagctgataaacctaatgttgttgctcaaagtttaggggctttaagaattaaattagcaaaagaattaggtttaattgatgaatcaaaattaaatttcttatgggtaactgattggccgttattagagtatgatgaagatgcaaaacgttatgtagcagcacatcatccatttacttcacctaaaagagaagatatcgaaaagctagacactgaacctgaaaatgtacaagccaacgcttatgatattgttctaaatggttatgaacttggtggtggttctataagaatacacgatggtgaattgcaacaaaaaatgtttgaagtattaggatttactaatgaacaagctcaagaacaatttggtttcttattagatgcttttaaatacggtgctccacctcatggtggcatcgcgttaggtttagatagacttgtgatgttattaacaaatagaacaaacttgagagatacaattgcattccctaaaacagcatcagctacatgtcttttaactgacgctccaggagaagtatctgataaacaactccaagaactctcactaagaatcagacactag

SEQ ID NO: 3328 - protein, 588 aa, Artificial Sequence
  Description of Artificial Sequence: synthetic amino acid sequence
MNKRTTYCGLVTEEFLNEKVTLKGWVHNRRDLGGLIFVDLRDRGGIVQIVFNPDFSEEALQVAETVRSEYVVEVEGVVTKRDAETINPKIKTGQVEVQVSNIEIINKSETPPFSINEENVNVDENIRLKYRYLDLRRQELAQTFKMRHQTTRSIRQYLDNNGFFDIETPVLTKSTPEGARDYLVPSRVHEGEFYALPQSPQLFKQLLMISGFDKYYQIVKCFRDEDLRADRQPEFTQVDIEMSFVDQEDIIAMGEDMLRKVVKDVKGIDVSGPFPRMTYAEAMDRFGSDKPDTRFGMELINVSQLGKEMNFKVFKDTVDNNGEIKAIVAKDAANKYTRKDMDALTEFVNIYGAKGLAWVKVVDDGLSGPIARFFEDVNVETLKQLTEAKPGDLVMFVADKPNVVAQSLGALRIKLAKELGLIDESKLNFLWVTDWPLLEYDEDAKRYVAAHHPFTSPKREDIEKLDTEPENVQANAYDIVLNGYELGGGSIRIHDGELQQKMFEVLGFTNEQAQEQFGFLLDAFKYGAPPHGGIALGLDRLVMLLTNRTNLRDTIAFPKTASATCLLTDAPGEVSDKQLQELSLRIRH

SEQ ID NO: 3329 - DNA, 777 bp, Artificial Sequence
  Description of Artificial Sequence: synthetic nucleic acid sequence
atgaaacatcaattttcaaggaatgaattagcaataggacaagaagggctgaacttactaaaaaataagactgttgcagttttaggtgttggtggcgtcgggtcatttgcagctgaggcattggctcggactaatatagggcacatcatacttatagataaagatgatgtcgatattacaaatgtgaacaggcaaattcatgcactgacttcaactattggtcaaagtaaagtcacgctaatggaagaaagaatcaaattaataaatcccgattgtaaagtaacttctttgcatatgttttataccgaggaaacatacaaagatatcttcaataattatgatattgattattttattgatgcaagcgatacaatcatttataaagttcatctcatgaaagagtgtttagaaagaggaattgagttaatttcaagtatgggtgcagcaaataagactgacccgacacgttttgaaattgcagatatttcaaaaacacatactgatcctatggctaaagtaattagaaatcgtttaaaacgccttggtattcgtaaaggtgttaaagtagtattttctgatgaaagtcctattgttattcgcgaggacgtaaaagaaacagtaggagataaaaatgcaatcaatagaaaagggcaaatgcctccatcttctaatgcatttgttccaagtgtagtaggccttatttgtgcaagctacgttgtcaacgatattttaaaagatatacctgtaaggcgaattaaagataaaggacaaaattaa

SEQ ID NO: 3330 - protein, 258 aa, Artificial Sequence
  Description of Artificial Sequence: synthetic amino acid sequence
MKHQFSRNELAIGQEGLNLLKNKTVAVLGVGGVGSFAAEALARTNIGHIILIDKDDVDITNVNRQIHALTSTIGQSKVTLMEERIKLINPDCKVTSLHMFYTEETYKDIFNNYDIDYFIDASDTIIYKVHLMKECLERGIELISSMGAANKTDPTRFEIADISKTHTDPMAKVIRNRLKRLGIRKGVKVVFSDESPIVIREDVKETVGDKNAINRKGQMPPSSNAFVPSVVGLICASYVVNDILKDIPVRRIKDKGQN

SEQ ID NO: 3331 - DNA, 1152 bp, Artificial Sequence
  Description of Artificial Sequence: synthetic nucleic acid sequence
atgcgtgcagaaaatgaattagtagaacaaaaacaacaagaaaaacaaaaagcattgtataaacaagagttagcatggatgcgagcaggagcaaaggcaagaactactaaacaacaggcacgtatcaatagatttaatcaactagaatcagacgttaagacgcaacatacacaagataagggtgaacttaatcttgcatattcaaggttaggtaaacaagtatatgaattaaagaatttatcaaaatcaattaataataaagttttatttgaagatgtcactgaaattattcaaagtggtagacgtataggtattgtaggacctaatggagcgggaaaaacaacattacttaatattttaagtaatgaagatcaggactatgagggtgagcttaaaatcggtcagactgttaaggtagcttattttaagcaaacagaaaagacacttgaccgtgatattagagtgattgactacctaagagaagaaagtgaaatggctaaagaaaaagatggtacctcaatttcagttacacaattgttagaaagatttttatttccgagcgctacacacggtaaaaaagtttataaactctcaggtggagaacaaaaacgtctgtatttattgcgtttacttgttcataaacctaatgtactccttttagatgaaccgactaatgatttagatactgaaacacttacgattttagaagattacattgatgatttcggtggttctgtcattacggtcagtcatgatcgttatttcttaaataaagtggtacaagaatattggtttattcatgatggtaaaatcgaaaaaattattggatcatttgaagattatgaatcttttaaaaaggaacatgaacgccaagccatgctatctaaacaaactgaacaacaaaataaacataagcatcaaccaaaaaagaaaacaggactatcttataaagagaagttagaatacgaaacaattatgacgcgtatagaaatgactgaaacgcgtttagaagaccttgaacaagaaatgattaatgcaagtgataattatgcaagaatcaaagaacttaatgaggaaaaagagcaacttgaagcaacctatgaagcagacatcacgagatggagtgagcttgaggaaattaaagaacaataa

SEQ ID NO: 3332 - protein, 383 aa, Artificial Sequence
  Description of Artificial Sequence: synthetic amino acid sequence
MRAENELVEQKQQEKQKALYKQELAWMRAGAKARTTKQQARINRFNQLESDVKTQHTQDKGELNLAYSRLGKQVYELKNLSKSINNKVLFEDVTEIIQSGRRIGIVGPNGAGKTTLLNILSNEDQDYEGELKIGQTVKVAYFKQTEKTLDRDIRVIDYLREESEMAKEKDGTSISVTQLLERFLFPSATHGKKVYKLSGGEQKRLYLLRLLVHKPNVLLLDEPTNDLDTETLTILEDYIDDFGGSVITVSHDRYFLNKVVQEYWFIHDGKIEKIIGSFEDYESFKKEHERQAMLSKQTEQQNKHKHQPKKKTGLSYKEKLEYETIMTRIEMTETRLEDLEQEMINASDNYARIKELNEEKEQLEATYEADITRWSELEEIKEQ

SEQ ID NO: 3333 - DNA, 408 bp, Artificial Sequence
  Description of Artificial Sequence: synthetic nucleic acid sequence
atgcaagagactttatcgcattattttggttataagtcatttcgaccaggacaagaagaaattataactaaaatattaaatcatcagcatacactgggggtactacctaccggtggcggtaaatcgatatgctatcaagtaccaggtttaatgcagggtggcacaactattgttataagtccacttatttctttgatgaaagaccaagttgatcaactacaagcaatgggaattcaagctgcatatttgaatagtagtttgactcataaacaacaaaaagagattgaagagcaaataaagcgtggtgccattcagtttttatatgtagctccagagcgctttgaaaatactttttttctaaatttattacgtaaaatagaaataccccttatcgcttttgagcaataa

SEQ ID NO: 3334 - protein, 135 aa, Artificial Sequence
  Description of Artificial Sequence: synthetic amino acid sequence
MQETLSHYFGYKSFRPGQEEIITKILNHQHTLGVLPTGGGKSICYQVPGLMQGGTTIVISPLISLMKDQVDQLQAMGIQAAYLNSSLTHKQQKEIEEQIKRGAIQFLYVAPERFENTFFLNLLRKIEIPLIAFEQ

SEQ ID NO: 3335 - DNA, 3619 bp, Artificial Sequence
  Description of Artificial Sequence: synthetic nucleic acid sequence
tcatacccataatggcagcaccttgcattaatgcgttagcaacattgttacgtccatcgccaacataagtaaagttgatatcagcatactcttttttcaatacttctttagcagttaaaaagtcagcaagcacttgtgtagggtgatcttcatcggttaatccattccataccggaacacctgaatattgcgctaatgtttctacagtacgttgagagaaacctcggtactcaataccatcatacataccaccaagtacacgtgctgtatctttagcagtttcttttttacccatttgagaacctgtaggtccaagataagtgacgtgtgcaccttgatcatgtgcggcaacttcgaatgcgcaacgtgttctagtggaatctttttcaaaaagaagcgcgatatttttattttttagcataggcttttcagtgccgatatatttggcacgcttcaaatcttcggagagtgttaataaaaattctacctcttgtcgtgaaaagtctaataaagttaaaaagcttctgttacgtaaatttttcatcaataacaactccttgtgaatgaattacaattttattgtaagcgtttccttgtagttttcaacttaactcaaaaattgtaattttttattaataaatcaatgaactttttattaacattgaatttgaatagtgtgaaatttgtcaaaaaaggtttatgtttaagttaaaaccaactttaaagaatttagaaaattcaattaaagtgaatttaacacattttaaataatgaaggtagattagaatcaaaatgtaagaggtatgttagttgaataaaccgtattaacttctttatattattagtgaattctcaaaatacttgtaaaattatattgattaattacttgttctttattatatttagaaacatctcttacaataaaccacaacttacatgaaatttaagctaacagtggattattctaattaaattgaaggtcattcaaagtaaaaagggcatattagtataataggaggaacagtaagatgaaagtgtataagttgaattatcaacaccataaagatattgttgatgataatgtattaacgatgttcgtaacagctgataatcaagatgaagttgaagcgtttgcgaaaaaattacattacaagattgaacatttatctccattaactaaaaaggaatttgaagatgagaaagcgaaagattcacactatagacttgaacacgtggatcactatttaaattaattattcaatcatatatcagaacatcctgtgatcattcgtttggttacaggttttttacgcatgagattaaatgttaatgtcactaatacaaggagtgtataaatggaaataacaaatgttaatcatatttgtttttcagtgagtgatttaaatacctctatacaattttataaagatattttacatggtgacttattagtatcagatagaacgacagcatatttaactattggtcatacttggattgcactgaatctagaaaaaaatataccaaggaatgaaataagtcattcctatacgcacgttgctttctccatagatgaagaagattttcaacagtggattcaatggcttaaagagaatcaagtaaatattttaaaagggcgaccaagagacattaaagacaaaaaatcgatatattttacagatctggatgggcataaaattgaattacatactggaacattaaaagatagaatggaatattataaatgtgagaagacgcatatgcaattttacgatgagttttgatattttaattgatatgtaattttttgaaaaaatttatgattcattttgtaataaaattactatatactaaaatttgtaattttcaattattttaatgaggtgaatcaatgaataaattatcaaagtacattgcaatagctacattagcatcgacagttacaatttcagcaccaattcatacatatgcatgtgaatctcatactaaagataaccataatcaaacgacacaacatcaaaatgaccccaaccttggtgaacaaaatgtaatggctgtctcatggtatcaaaattctgccgaagcgaaggcactttatctacagggatacaatactgcaaaatatcagttagatgaacatattaaaaaggataaaggtaagaaaaaacttgctatagctttagacttagatgaaacagttcttgataattcaccatatcaaggatatgcttctatgcacgatacgtcttttccagaaggatggcatgaatgggttgctgcagcgaaggcaaaacctgtttatggcgccaaatcattcttaaaatatgctgacaaaaaaggtatcgatatttactatatttcggaccgtgataaggaaaaagattttaaagctacaaaggaaaatttaaaaaatattggactaccgcaagcgaaagataatcatattttactaaaagggaaaaacgataaaagtaaagcatcgcgacgtcaacaagtcgaaaaaaatcataagttagtgatgttatttggtgacaatttgttagattttacagatcctaaaaaatctactgctaaagaacgtgagaaactcgtacagaagcatgcaaaagattttggcaaaaagtatattattttcccaaatccaatgtatggaagttgggaatcgacactttatcataatcaatacgaaataagtaagaatgaaaaggatgaactacgaaagtcatcaattaaacaatttaatcctaaaacgggtgaagtaaaataattcctgacattaaatactaaatttctattagtaaaagaaagttttacacataattattgtattgtgtgcagacactttaataattaataaagttatatttacatggagtactttaattccgtgttataccattgcgaggatgaaacaatgtacgcgttgttccatccttttttttataaatattttcaatcgtatctagattaatgtaaacttataatatcgaaaagtttacaatgtgcaatcgaatgatttgaaaatgctaatttttaagaaaaaggagttaaagattatgacattaaacctagctcaacgtgtgttaaatcaagagtcattaacaaaagatgaagcaatatctattttcgaaaatgctgaaattgatacatttgatttattaaatgaagcctacacagtgagaaaacattactatggtaaaaaagttaagcttaatatgatattaaatgctaaaagtggtatctgtgcagaagattgtgggtactgtgggcaatctgtaaaaatgaaagaaaagcaacgttatgcacttgttgaacaggaccaaattaaagaaggcgctcaagtggcaactgaaaatcaaatcggtacatactgtattgttatgagtggtagaggtcctagtaacagagaagtcgatcatatttgcgaaacagtagaagatattaaaaagatacacccacaactaaagatttgtgcgtgcttaggattaacgaaagaagaacaggctaaaaaattaaaggctgctggtgtcgatcgttataatcataatttaaatacgagtgagcgttatcacgatgaagtagtaactacacatacatatgaggatagagtgaatacggt

SEQ ID NO: 3336 - DNA, 3246 bp, Artificial Sequence
  Description of Artificial Sequence: synthetic nucleic acid sequence
taacatcagtgttcagtaaaaattggcttcattactggagaaatgaatgtggttatactataaaaccggtttctgagacaaatgacgttcggatatatgatcaacaacaatttataatgtatgcgcattttgctgatgaagcttatcaaaaaattgattacattaattattttgacacatctagaagaaaaataaaaagagagttatacgatacacgcggatttttaagttgtgttagagtcttatcaacggaccaaaaaatacaagcggagtactatctttctcctcaaggaaacgtgaaaattgaaaagtattatgatattaattcaaatcatccctatgaggcaaaaaagattatattaaatcatttaggtaaaacgcactttttaaacaatgaaactgagctaggtgctttttttattgaaacaatatatcaaaatagtgacttattctttagcgatcgtaaccttgttacatcacatatatttaacatagttgcatcttacatccctgttattgcagtgttacatagcactcatgttaaagacgttactgatttagcgcattcaccaatcaaaaatgtttataaaggggtttttgaacatttacaaaggtataaagccatcattgtttcaacccaacaacaaaaagctgacgtaattgagagaatcagtggagttattccagtatatgctattccagttggctattcatctatcgatatgaaagattactctaatgaaaataaatatgtttcacctaagaaaattatttctgtcgcaagatactcacctgaaaagcaattgatacaacaaatcgaacttattaataagcttaaagattcatttccaaatatcgaactacatatgtatggttttggtaaagaagaacaacatttaaaagaacgaattcaagaattaggattagaaaagcacgtaatattaagaggttttttaaaagatttaactgatgaatatcaagatgcatatctaaatttaataacaagtaatatggaaggcttttccttagcattattagaatgtgagtcacatggtgtaccttctatcagttatgatattcaatatggtccaggtgaattgatacaggatggtaagaatggatatttagtagaaaagaataatcaacacatgctatttgaaaaagtaaaattattgctcaacaaccctcaacttcaacagtctttttctcaccattgtattgaaactgcacaaaagtattctcgaacacaaatcatgttactgtggaaaaatttacttcaacattttaactaaagcataaaaatataagtcgtcaaattttgctatgaagtcatttatcattaaatggtttcatagtatttttttgtattaaataaaagaatttttattaattcaataaaaaggaaccatgaattcatttaaaattcacggttcctctattaaatcattgtcagattgtgagttgtatatgtttctctaaaaatcatacatttaagtcatttttaatagaaatgaccttgtttgcatcatctttttcacaagatatgataaacgtgaaagttatattatagttttaatcaacatcttacatttgttggactaaatctactttctattcaaatctcatatctgcttctttctacaaatttcatttgaacattttaatttttattttttctatttttgcgacgtttccctaataataacgctcctaaacctgcaaacagagttccaagtaacgtgcctttagagccataatcttcattagctcctgtatcaggtaatttatcttttgtactcttatctgagctattgcctaaatctgagtcgttgtctgagtctgaatcactatcggaatccgaatcactgcctgagtctgaatcactatcagaatctgagtcactatccgagtctgagtcactatccgagtctgagtcgctatcggagtctgaatcactatcggaatctgaatcactgtctgagtctgaatcactatcagaatctgagtcactgtctgagtctgaatcactatcggaatctgagtcgctgtctgagtctgaatcactatcggaatctgagtcgctgtctgaatctgaatcactgtctgaatctgaatcactgtctgagtctgagtcgctgtctgaatccgagtcgctatcagaatccgagtcgctgtctgaatctgagtcgctgtctgaatccgagtcgctatcggagtctgaatcactatcggaatctgagtcgctgtctgagtcactatcggaatccgattcgtcatcatagtatccgttatctatactaaagtcatcatgatcagtaattgttacatgaacttcttccccatcagcatcctgttcgtcatcatcaccagaatctgttgttgtttgagtcatacctgaaggtttatcaaaatgaacaatataattaccactatttaaattatcaaattgatactttccattttcatcggttgtagttgtactaatgatatttccgttttcatcttttaacgtcactttaactccagagattcctttttcatcatcaccttgaataccatctttattagtgtcataccatacatagttccctaagctgtatttaggtgtttgatggggaaaacaattatgttaagtattaaaaacttaaccaagatttattcagggaataaaaaagcggtagataatatttctttggatattcaatctggtgaatttatcgcttttattgggacgagtggtagtggtaaaacaactgcactacgcatgattaatcgtatgattgaggcgacagatggacagattatgatgaatggaaaagatgtccgtaatatgaatcctgttgaattgcggagaagtatcggttatgtcattcaacaaattggtttgatgccacatatgactattcgagaaaatattgttttagtacctaaacttttaaaatggtctaaagagaagaaagatgaaaaagctaaagaacttattaaactggtagatttacctgaagaatatttggatcgttatccagctgaattgtcaggagggcaacaacaacgaattggtgttgtgcgcgctttagcagctgaacaagatattatattaatggatgaacctttcggtgcattagatcctattacacgcgatacattacaagatttagtaaaggaattacaacaaaaattaggaaaaacatttatttttgtcactcatgatatggatgaggctattaaattagcagacaaaatatg

SEQ ID NO: 3337 - DNA, 3320 bp, Artificial Sequence
  Description of Artificial Sequence: synthetic nucleic acid sequence
aaacagaaacgcgagcttcaattaaaacctcatcaccttctttaggctcaaagcctaacttagaagcatttcctttaaacatcattccactgatgacactttctttgtccttgacattaaaatataaatgtccgcttgaatgctttttaaagttagataattctcctttaataagaactgactgtagatgaggatcttggtcaaatttatattttatatatttagttagtgcagaaacacttaaatattcagtcatagttatcactcattttaatcatttatattacttaaaacaccattaacaaatttataatgatcatcatcactaaactgttttgtgagttctacagcttcattaacaactacttttttaggtgtgtcgctgtgcaatatttcaaaagttgccattcttaaaataatacgatctgatttcagtaaacgatcgatagaccagtcttttaaatggggtttaattgtttcgtctaaaacgatttgatgatctttgactccagtaactaaccagtatataaaatcaaagtctaaatcagaatgatcatctttaataaattcaattgcttcttgaattgttaaatctgtctcttttatttcaagttgaaataaagtttgaaaagcttgtactcttgcatctttacgactcatattttactccttcaaatgtatttataaaattataggtacaactttctagtaaagtgcacctataatttaaattatttatttttctgcgacgatacttctgatgtgaatattaatttgctgtggttcaatagctgtcattgtcgtaattgaattgaaaattgcttcttgaatttgatttgcagttttagaaatatttacgccatgttttaaagaacaaaatacatcaatgtatattccgtcttctttagcttcgatttttaaatctctgtttaaattttttcgactaatcttctctagatttgttttttttagttcagcaaaatggcctgtaataccttctacttctgatgtcgcaatggatgcgataacagataatacttctggtgctatttcaatttttcctaaattagattgagaataatctgctacattgaccattctttatcctcctattggttattatcgtccataatattatacttttctaggaattttgtattaaattccccacttctaaaaatatgattatttagaagtcttaagtggaatggaatcgtagtgtcgatacctaaaacaagatattcacttaaagcacgaatgcctgtcataattgattcttcacgtgtaggttcgtgaactataagttttgccaccatggagtcatagtaaggtggtatcgtataattagtataacatgctgattcaattctcactccaaaaccgcctggagcaagatattgggtaatcttgcctggtgatggcataaagtttttgtaaggattttcagcattgattcgaaattcaatagcgtgaccgttaatggaaatatcttcttgtttaaaaggtaacgcctcacccatagcaactttgagttgtaattttactaaatctactcctgttaccatttcagttactgggtgttcaacttgaatacgtgtattcatttccatgaaataaaattggttatcatctaaatcatatataaattcaattgtacctgcgttttcataatttacagcttttgcggctctaattgcagcattacccatttcttggcgtttatcttcacttaaaactggtgagggtgcttcttcaacgagcttttgcattcttctttgaattgtacaatcacgttcacctaaatgtataacgtttccataagtatcgccaataatttgaatctctatatgtctaaagttttctataaatttttctaagtataaaccaccatttccgaacgcggtttcagcttcttgttgtgtcatacggtaaccagtttcaagttctttctcatcacgagcaacccgaataccttttccaccaccacctgctgtggctttgatgataactggatagccgatttttttagctatttttttagcgtcatctatactttgaataagtccttcacttcctggtactacaggtacattggctttaatcatttcagctttagcaatatcttttattcccattttctgaattgattgatagcttggcccaataaattttaattggcatgcttcacacaattcagcaaaatcaccattttcagccaaaaagccgtatccaggatgaacaccatcacatcctgtagaagtagcgatagataaaatatttggtatatttaaataagaatcttttgataaagtaggaccgacgcagtatgcttcatcagcaatttgagtatgtaatgcatctttgtcaccttctccgtgttacaaattatgttacaagtttgcatgaaggtttatttaacatcgctgcagctgtaggtgttcatagtccaacggagattacttccgaccatattatctatagacaattagatggcactacaacgtccattcaggattataaacttaaattaatttcttaaatcacaacattgaaaaggagcgagacagaatgctgtctcactccttttcaatttaattatcttcattcattttacttttatcttttaaaccattacgtttgagttgtttaacaaccctatccatactcacatggtcacccttttttgcatctgatgatatgaaacctaaatttttcttaagctgatctatatccgcatctttataatcaatatcgatatgttcgatggcctttcgatctttaaaatcaactttatatgtgaccccgtctatccctttgaatgcttgttcatcatttttaaacatttgtttagcttcatctttatcgatgcctaaatcatcatatttaattgttgctatagtagattgtttgagaacttcatcatctttgtatgtcaaagatgtaatcacttgtttaccgttgacttcgccttcataagtttttgtgcgttctttcccacatgccgaaagagatacagcacttataactaatactactaaaagcgatatgacttttttcatagtagtcgccttctctcatctttaatcatgttaattatatcatctttaatttgaatatgttacttatatgaagataaatatctttttatttcgaaaatttaaacatctataaacatggaattcagaatttcactacttagaatgttatactacttttaaagacttattaatggaggaatgactatgccagaatctaaagcgttacttaaatctttaacagatgttaatggtatttctggacatgaaatgcaagttaaatct

SEQ ID NO: 3338 - DNA, 3691 bp, Artificial Sequence
  Description of Artificial Sequence: synthetic nucleic acid sequence
taatatcttttttatttggtaaccaaacgttttcagcttgagtaaatggataaattgtatctgatgcggctactcgagctattggagcttctaatgaaagaattgctcgctctgctaattctgctgccacttgtgcacccacaccagcttgacgttgtgcttcttgtacaactacagcacgtccagttttctcaactgatgctactaaagtatctatatcaattggttgtacagtacgtaagtcaataacttcaactgaataaccatctttttctaactcttcagcagcttttagtgattcttgtaccattgccccgtaagatattagagtaatatcattaccttcttttttaacattggcttttccaatgtcaattttgtattcttcttcaggaacctcttcacggaaagaacgatataatttcatatgttctagatatacaactggatcattactttgaatagaagaaattaataatcctttagcatcataaggacctgatggaataactactttcaaaccaggtgattgagctaagataccttctaaattatcagcatgcaactctggagtgtggacgccaccaccaaaaggtgtacgaattgtaacaggcgctggtttagttccacctgaacggaaacgagtacgagcaatttgaccagctacttcgtcaaatacttcataaacgaatcctaagaattgaatttccataacaggacggaagccagtcactgctaagcctagtgcaagcccaccaattccagactctgctaatggtgtatcaaatactcgatcttcgccaaattctttttgtaaaccttcagtaacacggaatacaccaccgttaacaccaacgtcttcaccgaaaactaaaacgtcttcgtctcttttgagttcacttttaagcgcatcgttaatcgcttgaaccattgtcatttgtgccatggcttacttcgactccttctctttgtaaatttcatattgttctgctaaattttgaggcatttcttcatacatgatatccattagagaagtaacagtttgtttttctgtattgtcagcctctttaatagctgcttttatttcagattttgcacgttcaaccacttcattttctttgtcttcattccaaagacctttagcttctaaatattttctgaaacgtactaatgggtcttttttctcccattcagcatcttcatctgaagttctataacgagtaggatcatcaccagccatagtatgtggtccataacgataagttaaagtttcgataacagtaggaccttctcctgctactgcacgttcacgtgcttctaatgttgcttgataaacagctaaagcatccataccatcaacttgaattccagggataccaactgaaatagccttttgtgctaatgtttctgcagctgtttgtttactacgtggtgtagagatggcatagttattgttttgaattacaaaaattgcaggtgctttgtatgcagatgcaaagttaattccttcatagaagtcaccttgtgatgaaccaccatcacctgtataagtaattgcgactgcatttttgccacgttttttaagtccaaacgctacaccggcagtttgaatatattgtgcaccgataataatttgagggctaagtgcattaactccctcagggaattggttacctttgaagtgtcctcttgagaataagaatgcgtctgtaagaggtaagccatgccaaataatctgaggcacatcacgataaccaggtaaaatgaagtcttcactttctaaagcatactgagatgctaattgtgaagcttcttgtcctgctgttggtgcatagaaacctaaacgtccttgtctatttaacgaaatagaacgttgatcaagaattctagtccataccattctttccattaattccactaattgttcgtctgttaaatcaggtactaagtcttcattaacgacatttccgtcttcatccaaaatttgaaccatttcaaatttcgattgagtctcatttaaaactttaactgcatcgaattgggcttgtaacttaggagccattcaattcaccatacctttcccatgtaaatagaaattcattttatcctccttaattgtatcacaaataaaaatctctgttaaacgatttcataaagttctgttccacataaaaataatacagttacatgacctgttgtattaaaaatcacgtaactgtattaacccattatttattttaattggtctacatcttgtttttctctttttactttctcaatggcttttgagtaagcattaaatttattattcatttctttatatgctttagaaagatctttcgattttccgtctacttccgattgtgttgcattatcttcattcaaataagaaaacagttctttttccttattaagtgcttttttgtaagcctttgcataagcatcatgtgatttatatttttctttaatagcactatcaagttgttcaacttcttttttctttgctttgttttctacatgttcaagatattgcttggcttgtttaaatgctttttcagaattatctagagccttctcttctttttcaaattctttttgtctttgttttacattttcaactatatcttcagctgcttttttacgtgtgctttgatctttatcatttacctttttaaataatttttgctttttctcttctaattcgtttatttttttacttacttgattaacggttttctcttggtccatagctttttgtacttgatcatcatattttttaatttcttttttatctatagtacatccagctaataacactgctgacgttaggacaattgctacagtctttttaaaattcatgaactgttacctcctcaaagttgttcgcttgtaatattaaataataaattataataaatcaatataaagctatcattctatattctagtgcaaacatttaaagcaataaaatctttgagtatctattaatgtacttgtgtctatcttatctgatatattatttaataaggaaggtgtatgacatgataacaatgaaagatattataagagatggtcatccaacacttcgtgaaaaagcgaaagaattaagcttcccactttctaacaatgataaagaaacattgcgcgcaatgcgtgaatttctaatcaatagtcaggatgaagaaaccgcaaaacgttatggtttacgttctggcgtaggtttagctgctccacaaattaatgaaccaaaacgtatgattgctgtctacttacctgatgatggaaacggtaaatcgtatgattatatgctcgtaaatcctaaaataatgagttacagtgtacaagaagcttatttaccaactggcgaaggttgtctaagtgttgatgaaaacatcccaggtttagtgcatcgtcatcatagagtcactattaaagctcaagatattgatggaaatgatgttaaattacgtctcaaaggctatcctgcaattgtatttcaacacgaaattgatcatctaaatggcattatgttttatgattatattgatgccaatgaacctctaaaaccacatgaagaggccgtagaagtctaaatcatgaattatattaaaacacttcattaagttgtattttatacttacttaatgaagtgtttttttaaaagtaattcaaatgtcattaggattaattt

SEQ ID NO: 3339 - DNA, 3177 bp, Artificial Sequence
  Description of Artificial Sequence: synthetic nucleic acid sequence
tcaatattatttttccttcaatatcattttattaatataattaggtagaagtctacgctgtctctaagtggtagatgaatgatctctattttttattatgttatacatttatattattttctgtaaggttctgattctaaaagatatttataataggagtctttcttttgtaaatctgtttccccccacaccttatattctttatcatctgtccatggtgctggtgtcacgttatactcatactcactatatggttgatctttaaaaacaatatctttttcagcatatcccattataatattaaaactcattttttcattttttatttttttatcccaacccttacgttctataacgtgattgatgattttctcactcttgtgtttctgaatatattgtagtataaagaaaataaagtttataaaatagagcttgatgatatgaatgacaataaatagacaataaataaccgcatcataatctaaaatgattataatacggtaaattttgatattattttataactcaattgtagctggcgtatctagttcatcatcattcattaatttaattgaacgaggtataactttgagtacacataattcaggatcttcttttgaattgaaaaatgttttgtcttgagtttcccataaccaatcaataactttttgatttttgacaacttctatagtggcatctatttcaacaaagctattgtttgttgtttcgttatagcctaataaaatatgagcatcaggattattttctatttcttcgacttttagtgaattgatattcgtttttgtatataagtttaagtcatcgttgtaaaagaccatatatctgctattaggtttattatgatgtgctgttgataggacaccaatttttgaagaatttaatactttttctattgcttttgtcacttgttgtttattcaaaattatcatctccttattattgtatatatccttatcacacataatttaaacgaaacaaccttatgatgatttttaagaaggtttaaaacaaatatatttgacttcatcgtgttttaaggtgacttggaaaggaagatgatggtcatgttgtatagctaattctgtttttggttgatttgatttatcaagttcatcaagaatactacgttcaatataaaattgttgtttagtttgtggtagaaggttttgaattgcgccatgctcatgatttaacgttttaataataattaatgagttggttgataatgtatttttaaaaacgtagcgctgttgactatcagatagataacgatcatttattttattaaataataaaaagtgatagttaccatctttgcgactcattaaaaaattgttagctatctctaaaggttcatttaaaaatggttcgattaatttatagaggtgcatgagaggtaggggactaccataacgattaaataaggcaataaaaggactctcatcttctatcagttgataacttacaccacccccgtaacgcattaatgcgactaaatgacaaacaaggtcagataattgaagtggataagtaccattgtttgtatatttaaaacactttaaagataaattattgtaaacaaatttagttgaaggtataccggaatctaatataaattgtttataattttcaaagtgtgtggacgaatgtaagtacgatttacgtttggtaattaatgagtttttggtttctagattttcaatgtctataaaatagtaatcgaaatttaatcgcttcatcatatcataagttcgatcaatagaagaattttggtgtagtaatccttcaacagttatactataacggatagctttatttttatttttaatttttaaatggcataaatgtatatcgttcactgacatattcttagtttcaaagactaacataaatttaaccatttttttgttcattttataatcttggtggctattaagaaataataaaattatttctttgatagattcaaattcatttgtagatgttaatctcatggctaaacctatatttttttcgaataatttttcaaagcatcgatttaataaattaaagttcacctctcgcgtcgaaatatcagtgatatcattgataaaaattacagcttgtggcagggaggtaaaatcaatgttgtaatattcattaaaaacaaattgaaataattcgttgaaattttgaaaacgtataaacgctttagagtttttagtctgatcttgaggataaaattcattgatatctctttcagtcgtttcagtagccaaatgatcactaaactcaaattgattaattaaatcaatatattgtgaaaagtcagtatcactaaaacttatcgaaggtaaggagtctaacttagagataatcgttcggtattgttttgggctacaacctaaataatttttaaattgatttgtaaaattggtatgactactaaatccagattgttctgaaatagcgttaattgagtcctcagatgaaagtagcctttttatagagtcaatcacttttaagcttgtaaaataatctttaaaattcatattaagatatcttgcaaataggttagaacaataagattcagatatattacaatgttgagctacttctcgtagtgaaagtgactgtgatacttttgaatgaataaatgttaatccttcagtaaacactgaatgattaactgcaatttgaggaatatattttttcttatatcgaatgactgcttcttttagtagcgtttgtattattttagagatggattgctcatcttgattttctccttttattaaatgttgaatagcttgtaaaataattgttttaacaaaactgcttgattgtaataaatgtctgtcaaaataacatttaaaaaatttattatctttactataaaaataaataactggaatagagagtaatacgagatttgaagcactattaataaaatagatgtcagattgattaatgatagctatatgattacctaaatcttttgtttcaccattaatagtgatttttaagtcatttgtaagtgaaaacatcagaataattctattaatattgcgttcagggggagaatgatattctttatatatatttaaaaaacatgtcattgtatattacattagctccttgaatgaattgaataactaaatttaaatgtgaccgtgt

SEQ ID NO: 3340 - DNA, 3649 bp, Artificial Sequence
  Description of Artificial Sequence: synthetic nucleic acid sequence
ccataaccatgatcaataactagtggataatatttaatccgtccagaatgtgcaaaataacgttcatcttcaactatcaaatgattaaccttactcattgagttccctcccaatagtgactctttttaatatagctatctacatatgaagctataaaaactatcaactgctatcgttttaaaataaatcaatattaataggatagtaatcaatatactaataattttcagatttgtaaatattttctgataatttagaatacttacgttccgaatcttttgtgataaagaaatatatgtcattgaggcttagaatatatgtttaaagggaatttagaataaaatattttacggaggagattaatatgcattggttaaaaatattttatcatttattatgcgcaaccacgattagcgtgatattacttattataactatattaatggatgcgttactacaaaacacacacttaactcagttattactcaatattgattttttaatcaaccctgatgaagtgccaacaattattgaagtactgattcatttaagtattggaatattgatttatctcgcctttttaattatctatcattattcaaaatccttgtatcatctagcatacttacctttagtattgatatttactttgatgtatccacttctcgtttttcttgcgcaacgtccatttttttcctttagttggaacgaatttgcatggtggttagttgcacatctttttttcatcattttaatggcgacttgtctacctatcatttcgaaaaaaattttatgattttaaaactcatatctcaatgtcttttacacattataaaataaatattggcagtagaaacatcatagataattagactatgatatctctactgccttattagttattctggctctccatcttcatcatacttcgttacttctccatctttatcgataatataagatccttctaaatggccttctttatctgtaaatgagaacccccaactaccatcgctatctttttctggttctttgtaaatatatgtgtctgtatctaattgatgcccttcgtagtcttcaactatatcgataacattacttcgtgtcaccgttgcttcatcagaactacttgattgatcttcagattcagaagtatcatcttcatctgttaaattatcaccaactgaaaattcagtcctcatcatctgacttatcttattgatttcactttcactagcgttgtataacttaactgtacgagcatcatctataatgcgttgagattctcttttagagtaatcagcgtcacgccaactcccttggaaatgtgatggtacactatatattgtaattgtgccatctccattacttttataataaactgaacctgctgcagtaacacttgctgttaacaattctgttccttcaggtagtttggctgattcgtctgggtgatagggatctaaaactttattagaaatattttgatgtacaatttctaaatcgtcaaaaggaaggtcactttcacctctataactatctaaagcagttaaccaaacttgagcatagtatctattcgaatgggtatcttgttgtgtgtcctgctgattatcttctgtttgatttctacttatacttgattttgaatctctgttacttttatatcctgattgttgatcatcatttatcgttgagcttccattattatcactatcaccaagaccacaaccagctaatattaatattgtaaacgcacatatcactgctaatttcttcaattcaaatactccctcacattctaatatatttaactcaacaaaataaaccactttataaaataattataaactaactatttttaaaaatgtacaacaatttaacaaattcttaaagattcgctatttacgaagcaatacttgccgtctgttttactgctatatcattagcaatggtttatgattattaagatttttaacgtatcttaaaatttgtatttgaattcttttaaactactatcatctcgcaatcaaggtgctaaactataatcgtaaagtaatttaaatacatcatatatcatcaattcgaaatggggttatcaatgtgaaaaagatttctctaattgcaacgactgtattaacaggattattattatttccaagtgtcaatgacacaacgacacatgcagccgaagtaacatctcatgatgcaaaagtgctttaaatgaagctcagcagtcattgtcacaatatgacagacaactcaatgacagcatgaatgcatcatttgatggtaaaattaacattaaaaatgattcagatgtaggcgaagggcaacctattttgcaattaatttcttcaaatcctcaaattaacgcaactatcacagagtttgatattaataaaattaaagaaggcgatgaagtaaatgtcactgtaaatagcacaggtaaaaaaggaaaaggaaaaattcttaaaatagatgaacttcctacaagctatgatacaagtgacgatagtacagcatcatcggcacaagcaggggcacaaggtgatagtgaagaaggaactgaaatgacgacatctaatcctacaattaatcagccaacaggtggtaaaagtggcgaaacatcaaaatataaagttatcattggtgatttagatatacccgtgagatcaggcttctctatggatgctaaaatccctcttaaaactaaaaagctaccaaataacgtgttaacaaaagataataacgtatttgtcgttgataaaaataataaagttcacaaacgtgaaattaaaattgaacgtaataatggtgaaatcattgtgaaaaaaggattgaaatctggcgataaagtccttaaaagtccaaaaggtaatttaaatgatggagaaaaagtagaggtgtcatcatgattgaattgagaaaaatcaatcgacactttaaaaatggaaatgaatcaaatcatattttgaaagacatagatattcatattgatgaaggtgaatttattgctatcatgggtccgtctggttcaggtaaaagtacgttaattaatatcttgggatttattgatcgtggatatgaaggagaatacttttttaacaatgagaattatcaaaaaagctcagataataagctcgcagaaattcgaaatcatactgtaggtttcgtctttcagaattttaaattgattcaaaataacactattttagaaaatgtaagtattccgctaatttataatggtttgagtaataaagcgagaaaaagcaaagttttagacggacttcatgacgtcggtctcaaaggtaaagagaatctcttaccaaataaattgtcaggagggcagcaacaacgtgtagctattgcccgggcaattattaatgaccctaagtttattattgccgatgaacctactggcgctcttgattcgaagacatctcaagatattatggagcttttcgtaaaactgaacaaagaacagaatacaactattattatggtaacgcatgatcgtgaagtggcggaaaaagctgatcgtattatccatattttggatgggcgtgtgcaagaggaagaggtgttgacacgtgaataacttttcaaatgtcatatcagttgctattcgttccattttaaaaaacaaacg

SEQ ID NO: 3341 - DNA, 3156 bp, Artificial Sequence
  Description of Artificial Sequence: synthetic nucleic acid sequence
aaaattaggtccagaaagtttcccatctttcgaaatatcggtataaatcacaccacccaaaggtaaatgctcaattttggcaacataatcaaataaattgagtttagcatcctctttccatccattaatctttattttctctccaaaagcatctacggataagtagagtttatttggaaattgatgtgtcatatgtgttaaccactctatatcttggataccttttgtacctacaatacaatagtctattcctgaatgaatataattttcaattgtttgttttgaacgaatgccgccacccacttctataggcttagtggtcacctttcttaaggaacggatgtagtcgaattcttttacctcttttgctttagccccaattaaatctacaatatgtatacgtttcacacatttaaattgactataaaatcggatactgtcttctacagatttttccattttttcttttgaatcatatttgccttctgttaatcgaacacttgttgaattaattaaatcaatagctggccataaatcaatcattaataaaccctcctttaagcgcttgatttagaatctctaatccatacgttccacttttttcaggatgaaactggatacctatataatttcggtattgaatgactcccggaatctttgtaccatagtcagcataagctactacatattctgacatttctgcttgatatgaatgaacaaaatacacatcactttgcagtaagggatgtgtactctttaattcattccaacccaaatgaggaataggatgagatgattggattggcactatatttcccgggacaagttccaatccactaacgtcaccttctgcgctatgttgaaaaagtaattgcatacctaaacatattccaattatcggtttatcatgtatatttttaagcatatctttaatgcttttttcttctatagaatgcatcgcatcctgaaaatgtccaacacctggaagtacgatagcttcagctttttgcacgtctttatcatcacatgtcaaaatcacatcatatcctaaatgttgaattgctcgagtgacgttacttatgtttcccaatccataatcaataatcgcaatcattcaattactcctttagacgatggaatacgtccatcttcattttgtgcaagagaaatctttaatgctcttgcaaaagatttaaatattgcctcaatctcatgatgtgtatttccacctcttaataagtcaatgtgaacggttaatcgcgcattaattatcaatgctctaaaaaattcttcaactagttcagtgtcaaaagttcctaccttttgagcgctcaacttgctattaaatgagaaatatggacgaccactaatgtccactactgttcgagcaagcgcctcatccatgggtacatatgagcaaccatatcttgtaaaactttgttgagtctttattaattcaagaagtaattgtccaataactatacctatatcttcagttatatgatgatcatcaacatacgtatctccagtggcctcaatagataaagttaatccactatgaaaagtaaatagcgttaacatatgatctaaaaatcctacaccagtattaatatgagattgtgttccgttattagccagtgaaatattaagctgagtttcttcagtgtttcttttgatttgatagttcataacatacgctccatttcttcactatttttccagtagaagaagttgttcttctgtagcaatagagtaacgaacatacgctttcatttttattaacagatatcgtaataacctatctttatcggcgtacgtgaatcgatttttcatgattaaataaagattctatatgtgcaatatgctcagctgattctgccacttcgttaaatgttttttgtgataaatgaatgactgaatgtcgtgtcataaagtcattcacagaaagcccatttgtaaatctagctgtttgattagtaggaagtacatgacttggacctgccacatagtccccaataacttcaggagaaaaatgacctaaaaaaagtgcgcctacatatttaactttatctatatacatttcaggtgctcgagtttgaatagatgcatgttcaggtgcaatcgtgttcataattaaacatgcttcttcagtatcttgagctaatattagataatgatggttagcaatactttgtgatatgatatcttgccgttcaacatactgaagtttctcttgtattatagtgttcaattgattaagtaccttttcattttcactaatcacataagtacaagccatttcatcatgttctgcttgtgcaaatacgtcataagcgattgcgtctaagtcagcactttcgtctataatcaaggctatttctgtcggttctgcgatttggtctatgcctacttgaccgaatacaaactttttggcataagcaacatattgattccctggacctacgattttgtcgactttttttatagtttccgtgccataagttagcgccgcaatactttgtgctccaccgacttgataaacatgatgaacgcctgtaatgtaacaagcggctaacacctcttgacatataccgctattttgaggtggggtaacaacagtaatctcattaacacctgctacttgagcaagtgttgcagtcattaatactgtagacggatagctagccttacctcccggcacataaatacctacacgttcgataggatggtatcgttcataacattcagtttgttgagatgattcctgttttaccttaatattttcttggtacactttaattctctgatagctttgctctaatgcatctcgtgtttcattatctagcatgtcgtatgcattttttagttggctttgctctaattcaagcttctcagtttccacttgatcaaattgtaaattataattttttaaagctttatctccctgtaatttaacttcttcacaaatctgactcactatctcgtacaaagattcatctagagattcaacattattaaattcttttaaaaattgttgtgcgctaagcatagttaatagacactcctaactgcttgattagtctctctatttcagatgattgcttaaaatatgattctttatttgtaattaacttagcgttaatttcactgatatgc

SEQ ID NO: 3342 - DNA, 2397 bp, Artificial Sequence
  Description of Artificial Sequence: synthetic nucleic acid sequence
acaccatccctatcatatatacggcagtaaagatgaagacccaaacaacatctaagaagtgccagtataaacttactataaataatttaggagcattgtatgaatccaaaccacgagtgccgatttgaattaacaaacaaataacccaaacaatacctaatgatacgtgtgcaccgtgcgtacctagtagtataaagaaactagaccagaaggagccaatagttgggttaacaccttcagaagcatagtgtgcgaattcgtaaatttcgaaacctacgaatacaagacctaggataactgtgataatcatccaaaacatcattaagttttgtttttcttgtcgcatgtaataaattgcaataccacaagtataagaactaattaataatgcaaaagtcattattaaaatcaaatgtaattcgaataagtcggtagttaatttaccgccatatccgccaccatgttgtaacgttaataacgttgcaaatagggtaccgaataacgcaaattcagctgtaaggaaaatccaaaagccaagtttatttaattcgccttcgtgtgtacgagaatcaatagtatttgcatcatgactcatgacttacagcctccctttctttaattcgagcttctcttaaacgagcttcagtttctgcaacttctgaagcagggatgtggtaaccatgatcaatttggaaacttctccaaatcatagtaatgaagatacctgctaaacagataagtgctggaacaatagattcgaagattaagaagaaaccaccaatagtcataaatatacccatccagaatcctactggagtattgtttggcatatgaatatctttgtagttatggttgtctaaataatgacgaccatgttctttcatatcaacgaatgtatcgtagtcattccaatcaggagtgatagcaaagttgtatttaggtggaatagctgatgctgtagaccattctaaagtacgaccaagtccatcccagttatctccagtagcttcacgtggagctttgatatgactataaacgatacttgcaactaggaataagaatccaattgccatcaatactgcaccgatagttgagatgaagtttagtaaccaccaaccatcagaaggcatgtaagtgtatagacgacgtggcataccatctaaacctagaatgaattgtggtaagaaacaaacgttaaatccgatcatgaagaaccagaagcaccatttgtttaatgtttcatttaacttgtagcccatcatttttggataccagaagattaaaccagctaagcaggcaaatactacaccagtaaccaatgtatagtggaagtgagctactaagaaataagtgttgtgatattgatagtcagctgatgccattgcaagcattacaccagtaacccctcctaataagaagttagggatgaatgctaatgagaatagcataggtgactcaaatgtaattctacctttgtataatgtgagcaaccagttaaatagtttaactccggttggaacaccgattaacattgttgagatagagaagaatgagttaattaacgcaccattacccatagtgaagaaatggtgaacccaaactaagaaacttaagaatgcgatacctgcagttgcccaaatcatactttgatgaccgaataaacgtttacgggcaaaagtagggatgatttctgagtacataccgaatgctggcaaaataacgatataaacttcagggtgcccccatacccagaagaagtttgcccaaagcattggcataccgccatttgctacagtgaagaactgagttccaaaaattctatcagcagtcattaaagcaagtgctacagtgaacactgggaatgctaatataacgattaatgttgtaatgaatgttgttacactgaacattggcatttgcataaacttcattgttggagttttacatcttagaatcgtaacaaagaagttgataccagtcattaacgatccgataccagatatttgaattgcaattaaataatagttaacacctggacctggactgaattcaccagcaagtggtgcgtagttagtccaaccagcagctggtgatccacctacaataaatgataggttgaataaaatcataccagcgaagaatagccagaaactaacgttattcattacagggaaggcaacatcgcgtgcaccaagttgtaatggaataacaacattccataaaccaaagataaatggcatagccataaatataatcataattacgccgtgcgtagtaaatacttcattatagtggtttgcttccaagaatttgttatctggaattgttaattgagtacgtaacattaacgcatcgataccaccacgaacgaacattaatacggcagaaattaaatac

SEQ ID NO: 3343 - DNA, 3473 bp, Artificial Sequence
  Description of Artificial Sequence: synthetic nucleic acid sequence
tgtgctctaaagaagatccaaataacatagttattagaccaacaaatgtcactgtataaatataaacattactaagtcccaataaaggtgtaaatctaaatagtaaaaagattccagcctttaccattgttgccgaatgaagataagcacttactggtgtaggtgctgccatggcctttggtaaccaaatatgaaacggaaattgtgcagatttggtaaaagcacctaataatagcatcaaaatcattggtataaataaaggatgtcgtgaaattgcattgcgttgattaaggatatcagtaattgtgtttgttcctgtaatgatatataaaatgataaatcctgttaataacgctagcccaccaaacactgtaatcatgaaagattgaatggcgcctaattgactttcaccattattgtaccaataggatataagcaagaatgaggaaatacttgtgagttcccaaaatacatacattaagatggtattattagctattacaatgccaatcatactgaacataaataatagtaaatagatgaaaaatctaggaagattgtccgtactgtgggataaatattgcgtagcataaaaaaatacacccacacctattagcgaaataattaagccgaacattaaacttaaaccatctaatcttaaatctaaattaatatcaattgaaggcatccatggtaatcgaacagcaataaacttatttcgaatcacatctggtattttcataataaaatatgtagatgtcacaataggagctattaatgcaacatagcccgcaacctttcttagttgacgatgactcagagtgaataaaactatgagcatgactaataaattagtcgccataagatatactaaactcatttaacccctccttttctttttacatttatattaagtgtaatcatttattaagtgtaatcattgtatggcgatttgaaacatatcgtatttcaataaatctcaatatttcttaagttatctgatatccaaaatattgttgaatgatagaaattaatattcccgattgaaagagaagataatcaaatgtttttcttaaattagttaaactaacaggttttaatccttattatggtgcaacacgatttatgatttgatattgctagttgatttgaatgagtttattgagcatacatagattcaagcactgtcgctttttttctgaattggcatatcacaaaaaggtaactattcttatttatatccaaaagggaatagaactttattttatataagatagaatccatgaggctataatttttcaatcatcgataaacttaaactaattcattctcatattgggagatcttaatattttaattcatatataaatagtaattttagacactgatcaatcttttaagttggttattttaaatatcaggttccaattttttcttttacaacttaacaattctacttacctcatataccttctaaaacaggtttcataattaatgataaatgacgtttgtatcacatcaaaggcatttgcctatatttttcaaaaaatgtgtccttttttttcaatctatttcgatatatatagtgaaaggaggttttattatgaatgaagtcaatcaagtgacgattatctttactcaaatcaaacataattctgaaggtaaagtagtcgaacataagcgtcgtttttctaacattaatccgcttgtttctaatgatcaaatcaaatcttttcgttccatcattgaacgtatcagtggcgaagagtatgacaaagtcgagatcgttaaaacagaatctttaatttaaggaggatacatcagtatgtcaaaaactttggaactcgtatttaaatcaaatcttaataaacccgtcaaattactattacccgattttaacgctattactacagaacaattaattaaagaaagtatgaaccaacttttagaattagacattttaagatttagtttgggaaagcctgtcaaaatttatgctgcacaacttattgataaaagtacaactgttatatttgaagataaaaattaattcataaaacattatttttgacgctttatttaaagtactaaaatcataaaaaagacttatcgaagaacaaattttttaaaattgttcaagtctaaaaaagaacttaatttacattgttcttttattaatatgaagtgagatatcaaattcaaaatgatgtctcgctttttttaattctaaaacttgtttaatgtgcattttattataatgattcatcaaaatagtatcggctgtatgacacctcggaacattcacaacttatttctatactttgcttatggctcaatcattttagaaacatgattatgaatgcagtttttctatgataatcataaattctatatgaaatatctgatgattgcatgacttcatacgccataatgcctgcacctatggaatgtatcgttccagctggtataaagtaaaaatcacctggttgcacttgtattgttctcaaataattttcaaatgtaccttgctccaattgctcttcaaattcatcacgagatttcgcatacgtacctatagtaatctttgcaccttcatcagcttcaatgatgtaccaacattcagattttccatattgaccttcttcgtgttcatatgcataagaatcgtcgggatgtacatgaatagacaatggcgcagcagcatctacaattttagccattaatggaaaatctttacttggaaaatctccaaatatttctctatgattgttccatacttgatccaatgtttgaccagcaaatataccattttcaatcacactttttccgtgtggatgtgctgaaattccccaacattcacctatgtgattattaggtagttgatacccaaattgacgaagattatcactgccccatactttatccagaaaaatgggttttaaaaataacggcatgttcacacctccattattaaaagcttaaacttaaatcattatctatgcttgaatatcacacaatgttaaataataaaactacttttgatacaacatagcccttcttttaagatatgtatttgaagctaactatctttctcactcgtattgagtgtagcatatatgattatttcacaaactactatatgaatatactatcattttataaactttctatcctgtgtccatttgacgtaggattcttacatattatatcaactgcctaataaattgaatagcatcatttttactaatctaataaagcgttttattgattactataccattattttctgaaaatgaccctttaaaataacaatgctttaaattggattcaatagaatcaagcattacacttttttcaagttcatttaaaagtagaaaatttagtataattatactcattaaaatatttaactttgaatataaaaagggaacaagataagacttttgatttccttatcttgccccctcaaatac

SEQ ID NO: 3344 - DNA, 3465 bp, Artificial Sequence
  Description of Artificial Sequence: synthetic nucleic acid sequence
tcttcgtttaattgatagttctcactaatgaaatcgatgggttttttatatctataagctttaaataaaactttagcaacttctttatttgttagtgtcatattgtacccctcccctaaattatctgaaaatttatactattatgataacttttaaatgtgaagtgtgcaaattgatttaaatatacttcatttagggtataaaataattaataatgtaaattttgataggagtgggtatagtgtcagattatgtttatgagttgatgaaacaacatcattcagttagaaaatttaagaatcaaccacttggttctgaaacggtagaaaaattagtagaggcgggacagagtgcttctacatccagttatcttcaaacttattctattattggtgttgaagatccaagcattaaagcgcgtttaaaggaagtgtcaggtcagccttatgttttagataatggttatttatttgtatttgttttagattattatcgtcatcatttagtagatgaagttgcggcgtcaaatatggagacatcatatggttctgcagaaggactattagtaggtacaatagatgttgcattagttgcgcaaaacatggcagttgctgccgaagatatggggtatggaattgtttatttagggtcattgcgtaatgatgttgcgcgagtgcgtgaaattttaaatttacctgattatacgtttccgttatttggtatggcagtaggtgaaccttctgatgaagaaaatgggtcacctaaaccgcgcttgccatttaaacatatttttcataaagaccagtatgatgcgaatcagcatcaacaacgtaaagaattggaagcatacgaccaagtagtgagtgaatattataaagaacgtactcacggtgtgcgtacagaaaattggtcacaacaaatagaaacatttctaggacgtaaaacacgtttagatatgttagatgaattgaaaaaagcaggatttattcaaagataaaaagaacctgagacagaaatacatgtctcaggctagggtggggcgatattttcaacacgaatgttgccccgctctttttataattgtatgtcgtaatgatcaatgaccacttttcttacatttaatttgcagataaatcgccgtaatcatttgagtcaaatgtttttttgtcccaatgattcgttaagcgtgcggtacctgttccagctagcattgagtcattaacgttaagtgctgtacgacccatatcgatgagaggttcgatagatatcagtacccctgcgagagcaactggtagattaagtgtagataatacgagtattgatgcgaatgttgccccgccacctacacctgcaacgccaaatgaacttataataacaacagcaataagtgtaacaacaaattggaagtcaatttctacatttgctactggtgccaccataactgctagcatagcaggatagattcctgcacagccattttgccctatggataaaccaaaagttgcagagaagtttgcaattccctcaggtacacctaaacgttttgtttgcgtttgaacatttaacggtaatgcacctgcacttgaacgtgaagtaaatgcaaagattagtacttctattgtctttttcacgtatttaacgggattgatacctaagacactcagtataattaaatggataatatacattgtgattagagctgcgtatgaagcaattaagaatttacctaacgtccaaattgcagaaaaatcacttgtcgcaagagtagaagccataatagctaaaatgccataaggcgttaatcgtaaaacaaaagttacgatagccataacgatagaatagattgcttctataccacgtttaagtaagcttccatgttccggctgttttcttgcaactctaagataagcaaagcccacaaacgttgcaaaaataacaactgcaattgtcgaagttgtacgttgtcctgtgaaatctaaaaatggattgcttgggaatacttcgagaatttgttgtggtaaagtgtttgcagttaaatctttggcttgttttgaaatttctgtaccacgtgaatgttctgcactacctaaatcaatagacgatgcatctaaaccaaagatcaaagcgtaaaaaattccaacgatagctgcaatggctacagtaccaattaaaaacataaaaatataagaaccgatcttagcgaatttttcaccaatttgtattttgctaaaagcggcaacaattgaaatgaatattagtggcatgacaatcatttgtaatagtgcaacataaccatctccaacaatactaaaccagtctgttgattgttcgagagttttagactctgcaccatatatgaggtgtaatacaatgccaaatacgatacctattgctaaagcggtaaagacacgtttagggaatgagacgtgttttcttgccataatatttaacattattaggaaaacaagtaacacgatgacattaattactgtaaaaagtatttccatatcgatatatagctcctttttaatttttagtattccgacatatgtaataagaataaagggggttaagaagaaattcaagttgttgatttatagttttcagattcatttaaagttgaatagagtgaaggtgattactagaacaatgaaaaatgagaagtttatgtttatcagaaaagtgagcaaagaggacgtaaagaggtttatattaataaaaaagacgcgtgcaatcatgctataagaagacatgattgcacgcgtttttatttaatattatgaataaacatgagtcagctatgaatacaaatcatttataagttaaatagacgtgcaaagaaacctttcttctcttctttaggttgttgttggtaagtcgattgagaagaaggtgtagctgatgttgattgagaatgagaaattgactcagatttttctgagttagatacacttcctgattctgacaagaactcgcttgtagacgtactttttgattcaatttccgatttgctatttgtattactttcggatgttattgagttagactcggacagagatgaactcattgaatcatttgctgattcagattggctcaaacttgctgtagtactttgacttgcgacgttgctctgagatattgaagcgctatttgacattgaatcaaaatgactacgtaattcaaaatattacatttaataaagatataacacctaattacgtttgtacgttaataaatgaagattccagaaaaataattttaagtaatgtagacaatccgaatatcattattgaaatgattcttattaattcaaaaaaattggtttttaatgctataagtaaagaaggcttaggtacctcgcctaaaatcacatttacaaaataatttataccctgtaactctttcattaaaaaaacaatatgatataactaaaaagctcccagtaaaggtcacattttaaatgct

SEQ ID NO: 3345 - DNA, 2975 bp, Artificial Sequence
  Description of Artificial Sequence: synthetic nucleic acid sequence
ataagctgttgtggcagcagcaaatgtgcatcctgcaccatgattataactttgttggaacatgtcagtagttaattgataaaattgttggccatcatagtacaagtcataagatttatcttgatcgagtgctttaccacctttaataatgacatgaggtgtgcctttgtcataaatcacttgagcagcttttttcatatcctcaattgatgttaattttcctaaaccagagagttgacctgcttcgaataaattcggggtaacaactgtagctttaggtagtaaatattgaatcattgcttctgtgtttcctgggttaagtacttcgtcttctcctttacaaaccattactggatcaactacaaaatagtctgcaccagattcaacaaaaacatctccggcacgtttaataatgtcttgtgtccctaacattcctgttttaatagcatcaggtccaattgatattgcagtttcaagttgtttttcgaaaacattcatatcaataggtgttacatcatgggaccatgtttctttatccattgttacaatagatgttaaagcgaccattccatatacatcaagttcttggaacgttttaagatctgcttgcataccggcaccagcacttgtatctgaaccagctatcgttaatactttttttaaagccatcattcattcactcccattaatttctagtgtctttatcatatcatgtttatcgcgtacgctaaattattataattttaaaatgcaaatcaatcatcatacttagctattgtattgatgttatctttaattcgtgattaataggtaagaatgtcatctcattcttacttaaaaggtcttcagttaattttattttgaaaatttgattgctaaagtaaggcttaatataataacttctttctttactttccatcactaattgatattgtgtgtaatgtattttattggcatcgataactgcaccttgagggatactgactgattctagaactttaaaacaattcattaaattttcatcttcattatgggaacagcgtagttggtgtcttaaatatgtagcgcgtataaaacgatctgttgacgtataaccacccggtaagccatttgttcctgcttcacagcccattgatcttactagcactttacctattaattgattggttgatttctgtggcgttaaaaaagcgtaatttcttaagttagatagatgccaatctaatttaggttcatttgttaaggtatgaacataattatctttaactattaataagccattgtgaggttctatggctacggtatgtcctgtttcatcagtgaccatgaaatgtaaaggaggaacgatattcaaagtcgtatttttttcattcataatattgattttcttaaccttttgttttaattcgctaatacttttattaaaacctaaaacccaaacaataaactcctcaggtgctaagttaaaataaccataacgtttatgggtactgtatgaggcttcaccagtgaagtaatggttcgaaatagctaaacctttttcgtttataccatcaccaaatctataacgtcctacttttaaatttgttccaacaaaaccatattcaagacgcatgtctgaatctagatcaaattggtagtgataatggcgtggaacaatggttgggataccattaaattcaaatgcaaagtccattgttctagctaaataatggtaacgttgttttgtatataaagaaatggcagtacacatatataacactccaaactactgaaatttatctatattaattgtaatatagataaaaatgcgcttattgtaaacctgaatcatataaaagtttacaaaaattaatgcttataaaatcagtcatttttctaatatgaatatgttaaaatgtagcttgaggtgaaaacgaatgaaatggtcagaggtatttcatgatataacaacgcgccatgattttcaggcgatgcatgactttttagaaaaagaatatacgactcaaaccgtctatccagatatacaaaatatctatcaagcatttgatttaacgccgtttgaagatatcaaggttgttattttagggcaagatccttatcacggtcctaatcaagcacatggtttagcattttcagtgcaacctcatgctaaatttccaccatctttaagaaatatgtatcaagaactagaaaatgatatagggtgtcatagaacttcgcctcatttacaagactgggcaagagaaggtgtcttgttattaaatacggtattgactgttcgacaaggtgaagcacattcacatcgaaatattggatgggaaacattcacggatgaaatcatacaagctgtttctaattatcgtgagcatgttgtttttattctgtggggaagaccggctcaacaaaaggaacgattcattgatacatctaaacacttaatcattaaatcgccacatcctagtccactatcggcttttagaggattttttggttctaaaccttattcaactacaaataactatttaaaatctaaagggaaaacaccagttcagtggtgtgaaagttaggtgagaataatgaacaaagaacagattctacaattgattgagcaagaattgatacaagcagatgaagctcagacagatacggaatttgaaaagcatatgtatgctatacacatgctcacatctcttgttagttctcatcaaagtcgttctacaatagagaaattaaatcattctaaaccaatgaatagtaatatcaaagatgattatgagatgaaacaacagtcttcacaaaaacatcatgtaactgcagctgaaatagaagcaatgggtggtaaagtaccacaatcaatgaaaaagcatcatacttctaataatatgatgattacagatgatcaagttggtaatggtgaatctatttttgatttttaaatataaaggagtacattcaaaatgatgaaagttttt

SEQ ID NO: 3346 - DNA, 3501 bp, Artificial Sequence
  Description of Artificial Sequence: synthetic nucleic acid sequence
cttcttaaattacgtaatttgtatccaatatccatctttctaaccacctaaaaaagctatatcatgtttacttatatcaaacattttgtttaatgcttaataaaaataacagaatatagctacgtaatcaatagttttatattaacttattattgtggatttaatagaaaaagttagtcgaaatctttactaaataaagtttgatttggattttttttaatttcttgaactactttgtaactattataaccacttttattttcaaattctttaaaaatctgtttttcatcagcttttccaggcacaatatgtttaaaatttttataagcatttaaaacttcgtcaccttttacagatgcctcataataattttcgattttattaaagaaatgaattactttcatcatttcatcattagtccaatctaaatctaatggatattgatattccatagtgtcctctccttcatatacttttatttttcacatttagatatattaaaaataacacagtatacctttattggcataaaaagatgggataaaatccatttttgaattctatcccaccatgaataaatacccctagcagattgctattatttagagtagctaaacgctaagggtattttgaaatgatttaagatacgtatgtctttgccagtccgtgactatacaaacgaaaaagtaatatacgtacaaatcataaataaatcatattaatttatatacatttatcattattaactagtaattacatagtatgaattggataaccaattgctttttcagcagcttccattgtcatttcacctaaagttgggtgtgcatgtacagttaatgcgatatcttcagcattcatacctgactcaatagctaaacctaattcagagataatatcagatgcgccagtacctacaacttgtgctccaataagcgtatcatcttctttaagtgtaattaacttaacaaaaccatttgtatcatctaatgataaagctcgtccattagctgcataagggaatttagaagctttaattgataaaccttcttcttttgcttgagcttcagtataaccaacttgtgctaattctggttctgtaaagcaaactgctggcataccaatatagtctacctctgcggcttgaccatctatcgcttcagcagcaactttaccttcataactagctttgtgagctaatggtaatccaggtacaatatctccaatcgcaaagatattttcaatagaagtacgactttgtttgtccacttctagtaatccacgatcagcaaatttcagaccaagttcttctaatcctaattcatcagtattagggcgacggccaactgtaactaatacataatcagcttcgatagtttgttcctcaccttttgcctcataagttactttgacaccattttcagtttcttctgcagattttgccattgcttcagtaacgatttcgatacctttttctttcataccttttttaacaggttgtgtcatttgcttttcaaatccgcctaaaatatcttttgcaccttcaaggatagtaacttcagagccaaagtttgcaaaagcagtacctaattcagaaccgatatatccgccaccaactacaactagtttgttaggtacttcttgtagatttaaagctcctgttgaatcgataacacgtttaccaaattcaaaatttggaatttcaattggtcttgaacctgtagctataatcgcatgtttgaaattgtaagtttgagcactcttttcgtccatgacacgtaaactattgttatcaacgaaataagcttcacctctaacaatctctactttgttaccttttaaaagtccttcaacaccgccagttaatttattaactacagaagtcttgaattcttgaactttttgatagtttaacgaaacgctttcagcaattacccctaagttttctgaattttgcgcttcaacaaagcgatgagaagcatgtagtaatgcttttgaaggtatacaaccaacgtttaagcatacaccacctaaattacctttctcaacgattgttaccttttgtcctaattgagccgcgcgaatggctgcgacatatccacctggacctgctcctattacaatagtatctgtttcaattgggaaatctccaactaccatgtttttacccctccattaataataattctggattatttaataagcgtttaatgtgattcatagcattttgtccagtagcaccatcgatttgtctatggtcaaagcttaatgataaagctaacactggtgcagctacaatttctccatctttaacgataggtttttgagcgatacggccaattcctaagatagctacttctgggtgattgataactggagtgaaccattgtccaccagcggaaccgatattactaattgtgcatgttgcacctttcatttcttctgaagttaatttaccatcacgtgcttttacagctagttcattaatttcatcagaaatttcgaatattgatttacgatcggcatgtttaactactggtactaataatcctttatccgtatctgcagcaataccaatattccagtaatgtttgtgtacaacctctccagcttcttcattgaaagaagtattaagtgctggatattttttaagtgcagaaactaatgctttaacaacatatggtaagaaagtaagttttgtaccttgttcagcagcaatttctttaaatttcttacggtgatcccataattcttgcacatcaatttcatccattaatgtaacatgaggtgcagtgtgtttagaattaaccattgctttagcaattgctttgcgcattgcaggtattttttctgtagtttcagggaagtcgccttctggtaatgcttgtgttgcagaagcattaacgacatcactagaagttgattcagatgctgcgctagtgtttgaaccttcttcggaactaccaccatttaagtatgcatcgatgtcttcttttgtgattcgtccatttttaccagaaccatttacagctttaatattgacaccattttcacgtgcatacttacgcactgacggcatcgctttaacagttttactttcatctacttctgtcttttcttgtgattgagttgatgaagcttcttcttgcactggtgattcttgttctttttcttctttcttagaatcctcatcatcgccatgacctttaaattgcatttcttctgcatcaggtgcatcaattttaacgatgacatctcctactactgccactgttccttcatctactaacacttcttcaacagtaccacttactggagaaggaatttctactacagatttatcattttgaacttctgctaatacatcatcttcttcaattgtatcgccggctttaataaaccatttaacaatttcaccttcgtggataccttccccgatatcgggtaatctaaattcaaatgccacgttcttgtcctcctaagatttacgtatttaaattt

SEQ ID NO: 3347 - DNA, 2961 bp, Artificial Sequence
  Description of Artificial Sequence: synthetic nucleic acid sequence
aattttaacctctcaacaaaaagtcgtgatggaacaattttttacacctacacaaaaagttaaatttcaaaaatattacaaccctgagcacgaacatcctacggtacaatctatcatttataatacttcacgagacgttcgttttttcaacgatgaaaatgaacttttagcgtttgcaattaatgcgctatatcatttaggagacgtatttttatgtgataaaaacatcgttacagggccaatcattgatcaaactgatactaaaataccagttctcgccgttttccacagtacccacgtaaaaaatatcaatgatatatatcattctgaaatcaaacaagcgtataaacctgttttagataacttatcccgatattcaggaatcatagtatctactgaacaacaaaaaacagatttatctgtaaaaattaataacgttattcccatttacgttatacctgcaggttatattgatacaaatgaatctcatcatagtagtgacaataaaccattgcctaacaaaatgatttctatcggccgttattctcctgaaaagcaattagatcatcaaatagaactaatgtctaagctagttccagcatttccaaatttacagttacatttatttgggtttggtaaagaagaaacacattatcgtaaattaatagctcaatatcatttagaaaatcacgtgtttttacgtggcttcatttatgatttaaatcaagaaatagagaccgcctatttatctttattgacaagtaaaatggaagggttcaatttaggtgtacttgaaacgattgctaaaggcgtacctacagtaagttatgataccaaatacggaccttctgagttaattgttaatcataaaaatggctttttaattgaacaagataataaagaacaactctatcacagcgttaaaaagttattactcgattctaacttaagagaacaattttctaaggaaagtattaaacatgcccaaatatttaatgacaaaaatgtttttgatacatggctcactgttttcagaacgttaaaagttaatttataatcgccaatttattaagatatataagggtgaagagaagtgtgaaacatcatacatcatcttcacctttaatttattctataatatttcatctttaatctgtgccttttgatattgaacatagcctgatatataatgttcgatatcatcaatccgaactcgatacccatggtgttttatgaagaaactaccaagaattcgctttggatttttgaagtacattgcaatttcaggatagaaaaatcctactcgttgatattctgctcttgtatgaatcacattgattaatttttcttcatcaatcaactgagtcacaagctcttgacgatgtgtagcttttgctttttgaataagcttataggttgccattaacatttctaaaaatgttgggaatgttgtttcacgttgttcaatatattccaaataggtgttcacattcttaatcccaaattcaaaatatttatcttgcggacacaattgaactaactcgttcgtgcaatacccaagccaatgatcatggtattgccaatactctttttcaataaatcgatccattaacttcttcacaacttccaaccatttatcattatgatcttggtgatataagcgtaataatgctaaagctgcttcaccatcataataaataattctaaatgattctttcacagttaaatccggataatttaaaatatgagttgtttcgtatgtatcttgattaatcattgataaaattcctcgagcaactttttgtgccacgcataagtattgcttattggggttatgctttaaatattcacaaaccgcaaatataaaggcagcattttgtcctaattttatttcgttaatatcttttgtatcatcaaagatatatccaacaccttcattatcatagaaataattctcaataacgtagttaattgccttttcgactatagttaaatcttctcctaaataatctaaaccctctattaatgcataagttgaagaagcatgtcttaatatattatagaaattgatttctttatcaaaatgtggaaaataaccatattgatatcttccagtatctgatagcatatttcctaggaaatatgtaccactttcaattaattggtctatttctttatgtaaataatcgacctttcttaatccttttttataaccttcatcgtgtaattcatatatcttttgttcgtctaagataaaacctttagttttgaacttaatgacttctttgttttcataaaaatcataagcaaactttttcttatggttcgtatactttcttaaatagttatttatattttgttcagatagaataagcttcgttttcccatctgttttcactggtttaataaatgcattagtgtttatttcttcaggtaaaaatgataaattccagtattgatctaaagctataccaaaatcaatataatttcttctagtttgcgttaattcatctttaacatctttaaataaagtaacttcttcttcagtaacaatgtctatttttacccatgaaggaaacgctcctgttttctgtctaaacttttgaatttctttagtaatatcccttctaaggtaattaggcttttttaataatttaactttggcttttatattagattttccaaggcttaaaaaagcatattcttttatttctattgttttttcaacatgattaatcaatctttctatatgattttccatactcatctttttctcctttcaatttaatatgatttcaaaccaggccatatagacctggcttgaaataacttatgaatgaatcaatagcgctatttttctttattatcttttttacgacgtcttcctaataataatgctcctaaacctgcaaataaagttccaagtaatgtgcctttagaatcatgatcttcatttgctcc

SEQ ID NO: 3348 - DNA, 3153 bp, Artificial Sequence
  Description of Artificial Sequence: synthetic nucleic acid sequence
cgtgactatatgatggtagaaatgtgtcctcgttgtaaagcgcattttaacagtcgttgtaaatttcattatcatttatattttgaagtataaataacttgttacaaagtttttgaaatatttgagctcctaaagtgaattttatttaaaaattcgctttaggagctcttcttatatcaacattctattcatgcatttaaagttttcttcttatacctcggttgattttctcttattataagattatttttcaactttctctactacttcatttaattcatcaatttgtttgatagttgtcgttgaagatcctgaagagaaataccatagttttggatctaattcgtaaatatgattactttttactgcttttacattttttataactttgttttttaaaacttgatttgttgttgctttaccacctacaactgaaccacgatccatagctaaaataacatctggattctgcttgttaatatattcattatttatattttgaccatgcgggcttttgctaacctttttgtctgcaggtttaaatcctaatgtatcaaacactaaaccaccaaatcttcctcctggtccaaacgttgatagttcaccttcgttaaccaataaatacattactttcttattaaagtctttagttttatctttcatatcagatatttttctatctaaatctttattaatttttttagctttatcttctttatcgtagattttccctaaattttctgtattttttttcatatctttaattaagttgtcatcacttgtacctacatatacaactttagcttttggtgcagcttttttaaattcatctaaatttttctgattagctgttcttcctgaaataaaaatcacatctggtttagctgatgcaactttatcaaagttcacttcttttaaatttccagtattaatatacttatcatctttaaattcatctaaaaatttaggtaaagattggttattttcacctttaggtaaaccttttactttatcagccacacctaattctttcaacacatcaagcgctccataatctaatacaacggcatttttaggattctttggtacttcgacagtattagagatttttttcttatcactgccattattttctttaccacttgcttcaaaactatttttgatggttacagtttctttagaatcactatttttctttttcgaagttgaattattattcgaactattactacaagccgttaaaactaaaactagagacaataataaaaataagactgtttttttcatatgtgcaactccctaatcaaatttataatttcttttcgtatggataacctcttttactatgcgtctcaattttaatcattaaactgagtcaaaagtagtttcatcataatatagacaaatacgttgtccccttatctcctctatacgtacttccatttcatataaactttttaaaatgtcagactgaataacattatctttatcatcagctttaactagctcaccttgtttaagcgcaatgatgtcgtctgaataacaagaagcaaagttgatatcatgtaatacgataatgattgttttatttaactgacgacataaatctcgtaacgtttgcataatctgtactgaatgtttcatatctaaattatttaaaggctcgtctaataatatataatcagtatcttgtgctatagtcatagcaatatatgcacgttgtcgctgacctccagatagtgttttaatattacgatgtttaatttcattaagctgtaataagtcaagagcatattccactttgtcatagtcttcttgcttcattcgaccttttgaatatggaaaacgaccaaatttaactagttgctcgatagttatgttcatatcagtgtgattagattgttttaaaatacttaattttttagctaaatcgtcagttttatattctgaaatttctttgtcttcaatcaaaattgaaccgttctcataactaaataagcgactgatagcagataataatgtactcttaccagcaccgttaggacctatgagtgaagtcaattttccctttttaatatctacgctaatatcttttaaaataggtttattgtctatcgttttatctaaatttcgaatttgaatcaatttgcatttctccttttgacaagcaaatatatgaagtaacttccaccaactaaatctactatcaaactgaattcagttgttgcttcgaatagattttcaactacccattgcgctataaataaactaatccagctgaataatattgttgccggtaaaataaatttgtgttcataggtcttcataaattcgtgtgctaagttgacagttaataagccaagaaatgttacaggacctattaatgcagtagatatagagacgagtaaagcaaccaaaataagaaacatacgcgtcatattctcataagaaacacctagattaattgcttgtgctctacctaacaaaagaacatctaaatatggtcgaagtattattgtaacaattattaatataactaataatatgcctgaaacagttactaatttagaatttgatgcttcaaagctagcaaacataacattttgaactgctaaaaaagattcaggattcattataagttggagaaaacttgtaatactacggaagaaagttcctaatattacaccaactagtaatatgaaatagactgaaaagtgacctagtttaaatataacttgaaataatagcaatgaaaaaaacaccattgcgatcaaagtgattaaaaaattaaggtagatatttgtaacaacagttgcttgttcacctaaaataaaaataggtaagactttgacaaataaatacacagaatcaagtcccataatagaaggagttaataatctatttgtagtaatagattggaaaataactacggacgttcctatcgatgctcctactaataatataagaataaattttttgaaacggctttggaattgatattcaaatatatcaaaatctaaacctaccaataaataaaaaattgccatacaaattgccataacgaccagtatacttatttttttattagcgctcatttgcataatttttcctacctttcattagcaagattaggaaaataattgtgccaaatac

SEQ ID NO: 3349 - DNA, 2950 bp, Artificial Sequence
  Description of Artificial Sequence: synthetic nucleic acid sequence
caatggacttttatcgacttgagtttcagaagcaaatataaaaaaagaacctcgagccatacctattgttccaataaataataaagaaataacattaatatattccatttcagtcatacggtgtattttcttcatgtttctacccactttctatcattaagtgcagcacaaatagcattagcataataatacatatcttctgtccaattatgtgtattttctctattctttttactaaaatcgtttcgactaaaaaattcttttctttgttgagtcgatatttcaatctgtacacccatgccataggcatttttgttggttatattattaatttctctgcccgcaattctgtcaggagcagcttccacattaaaacctgaaacttttaaattgtgagtaataagagatataagtctttcatccaatccaccaatataactatttgcttgattgctcgaataaccatgtacggctatcgttacattcataaattgattccaatataataaattggggttatcataatttgttgaagtgacgtgtagagttctattgtttttcggttttaaacctttaaaagtaaaatagtttgcattcgataattctgcaaccaataacgctaattcagaagtgccacactctataccgcctccgtgtatagcagttataagtgatttactatttctatcttgtgtctcaatcatccaatctttttcattcctcacaagttcagtcatagatttataagtatccatcactttattcacctcctttatctatcattctaatttctccgtaaatataagcttcacgacttactgaccactgatcgctctgagaaatataaactttaacatctccattaggttcaatagttaattgagcaccacaagctttaacaggcaccgatcttaggaacgcagtttgcgtacttgtaattagttcactcggtaacttcgctataacagttccacttttaaagttgtcagcgttaattcttaacatcacttccttatagtcttgatgttgaatgattttataagcgcaattaaaaccattttgtccttcagctttataatgcctattttttatagctccattaatcaaatcatattcaatccagtctgaagattcaggtaacttttcttgtatttcagtaatgcttttacgatgttcatcaattgtgacgtatccctcttgacttaatatattttcaatattcctaacttcgattcttaaatcttttaaatattgacttccttttgtgtcaatttcgttgtcatattcttcataaagattttgaattgtatttttagccgcgttaagagattcctcgacgtcttttaaacttttactacgctgttgattaagtttgtccaatcctttttttgtttcaatctgaatctttgtaattccttcatcacttgcatctttcactttaacaacgtaatcttctaaattatctaattgttcttgtatttcagtggctcgtgcattaatttgtctttttaattcatcaaacatacggatatatttaattttagttgcaccattaattttatttattattgcgtcacccacttcgaattcaaattcagttaaaactgcagttgatgatttatcgctatctacctgatttcgatggttaatcgaaatatatatttgacctataacagttgtattcgttgaagcttgtaagaattcaataggtatagttacttcaataacaccatttaaagggtcaataaaacgtacattttctactacttgattagaaccgttagaggactcaagatatatatacgtttcagtgttttcttcactaattaataaaggctttttgtttttagtcacataaaaccttaaaactgcagttttatcatctaagttataaaaaccgataccttcatcagatatcggttttaagtaaggttcatttttaacttcaattttaccaatcttttttaattccattatttttcctccccatttataacatttcttaaatcatcatcatatatagtattagggtaaatttgtgtgaacgtatcttctttaagattaccgtattctccagattttaatatctgaatggaattagcagaatgcgtaggagtgaacttcgcaaataatttaatttgtttgattgttacaataccagcaccttttttcttaacatctagtaccggcattactgtatcagtacgttttgtacctggttcagtaatcgtcgacatttgaactccagcagcagcgtaaatagggaaagttgtatttcctttgttgagtctatgttcaattgaaaataaattacgttttctacttttattaaatccaaagaatggatgataattctgaacaatattaggattaatccccactgtgacatctctatcaacgtttatagtcacatatccatagagctctacaaatccatttgctaaaactttgaaacgctgctgactcatcattatacgttgccattcattcctttctgcacgtagggtaatgacttcagatgttttattgttaaatctatcatcatataccatcactttaatgaaaggatctaatgatgtttgaccattttgataagattcaaattgtgccattctaaaaattacattacctacccagcgtactgaacgtctcatttcttcgggacttttcttttcaccgacacgtttttcatttatttctgaaagatatgacgttgttttatttcggattcctacccaattactaaaagatgataatgtactggaaccccaaacaacgaggtctccgttactttttaaattgttaataagatgagtcatattattatttttttgattggcccaacgcggataaaataaacagtaatcattatttactgaaataatatcatgcaaatctaagtgagcagttaaattatctatactttgaactaagctacgcatattttgtg

SEQ ID NO: 3350 - DNA, 2104 bp, Artificial Sequence
  Description of Artificial Sequence: synthetic nucleic acid sequence
caaagtgagaggcaacacaggtacaatggctcttaaataaagcataatgaacccaggaatatatccgaattgtcgaaatgcgtcaaaccattcttctaactgagaaagcgacaatacatcaaatcctttcttagggttgtattacttattcattatagttgtaaatgatattttttgaaacattaaaattaggtcaacaacataaatcagacttaggtaggaattaataaatctatatattgatatctaattcatcaattttattattccattctttatcgaaactctaatgaattgaaaatttaatatttcctatctgaatttgacttcttattaatctgacgttaatcaattttcatttactcttattaatacacataataaaaatgagcctagataatcctaggctcatttttaagttcaacttaaaattataaacgattttctaattcttttttcttatcttcaaagcctggtttacctaatagcgcaaacatattttgtttataggcttcaactccaggttgattaaatggattaacacctaattgatatccactcattgcacaagctaattcaaagaaataaacaacatatccaaatgtttcttcatctaactgaggaatatttacaacgatatttggaacgccaccatcggtatgtgcaagtaatgtaccttcaaatgctttagtattcacttcatcgattgatttgccagcaagatagttcagtccgtctaaatcatctgcatcctcttcaattttgatatcatgttttggatggttgaccttaaccactgtctcgaataagaaacgacggccctcttgaacatattgtcctaaggaatgtaaatcagttgtgtaattcgcacttgatggataaatacctttgaaatctttcccttctgattcaccgtataattgtttccaccattcgttgaaatactgcatagagggttcgtaattaattaacatttcagtagtataacctttgctgtataaaatatttcgaatagttgcatattgatatgcgatattttgatctaaatcatcagaagataactcttcacgtgccttagccgcaccaatcatgattgattcaatattgatacctgcagttgcaattggtagtaatcctacagctgtaagaacagaataacgacctcccacatcatcaggtacaacaaacgtctcataaccctcattgtctgctaattgtttaagtgcacctttagatttatctgtcgttgcaaaaatacgtttcttagcttcatcttttccatatttttcttcaaccaattgtttaaataatctaaatgcaactgctggttctgtcgtagtacctgattttgaaataacgttaactgaaaaatcttttccttgtaaataatcaagtaattcttttgtataacttgaggataaatgattacctacaaatacaatttcagggtattccgtatttgttctaaatgaagatgtaagcatctcgattgcagcacgtgcacctaagtatgaacctccaataccgataacaacaagtacatcggaatttgatttgatacgtttagatgcttcgacgattctagaaaattcttctttatcataatcaacaggtaaatctaaccaacctaaaaagtcattacctgctcctgtacctttatgaatagtttgatggatagttttaacaatatccttttgctgatctagttcatgcttatcaaaaaattctaaagttttgccatagtctaattgaatgtgagtcatcttattgcctcctgttataagtacttatactaattctactaagtttagatgcgctattcaattctcaaggctaacttatcacaggaaaattattttttatgtaacctttcattcataaaaaagttatttttaatatcaaaggtcacaccaccactttagatatacaatttacagaaattttaaaatatatataaaagcttttataacagtatttcaaacaaaaatatctaaatataatcagatttaaaaatgaatatttatgtaaaataatggttttattttcattatcaatctgatatgatagatgcatattaataatcataaaaaattatttgaggtgt

SEQ ID NO: 3351 - DNA, 3513 bp, Artificial Sequence
  Description of Artificial Sequence: synthetic nucleic acid sequence
tccccttcgggggacagagtgacaggtggtgcatggttgtcgtcagctcgtgtcgtgagatgttgggttaagtcccgcaacgagcgcaacccttaagcttagttgccatcattaagttgggcactctaagttgactgccggtgacaaaccggaggaaggtggggatgacgtcaaatcatcatgccccttatgatttgggctacacacgtgctacaatggacaatacaaagggcagcgaaaccgcgaggtcaagcaaatcccataaagttgttctcagttcggattgtagtctgcaactcgactatatgaagctggaatcgctagtaatcgtagatcagcatgctacggtgaatacgttcccgggtcttgtacacaccgcccgtcacaccacgagagtttgtaacacccgaagccggtggagtaaccatttggagctagccgtcgaaggtgggacaaatgattggggtgaagtcgtaacaaggtagccgtatcggaaggtgcggctggatcacctcctttctaaggatatattcggaacatcttctacgaagatgagggaataacgtgacatattgtattcagttttgaatgtttattaacattcatttgtacattgaaaactagataagtaagtaagattttaccaagcaaaaccgagtgaatagagttttaaataagcttgaattcataaataatcgctagtgttcgaaagaacactcacaagattaataactagttttagctatttattttgaataacaattcaaaatatggtggaaacatagattaagttattaagggcgcacggtggatgccttggcactagaagccgatgaaggacgttactaacgacgatatgctttgggtagctgtaagtaagcgttgatccagagatttccgaatgggggaacccagcatgagttatgtcatgttatcgatatgtgaatttatagcatgtcagaaggcagacccggagaactgaaacatcttagtacccggaggaagagaaagaaaaatcgattccctgagtagcggcgagcgaaacgggaagagcccaaaccaacaagcttgcttgttggggttgtaggacactctatacggagttacaaaagaacatgttagacgaatcatctggaaagatgaatcaaagaaggtaataatcctgtagtcgaaaacatattctctcttgagtggatcctgagtacgacggagcacgtgaaattccgtcggaatctgggaggaccatctcctaaggctaaatactctctagtgaccgatagtgaaccagtaccgtgagggaaaggtgaaaagtaccccggaaggggagtgaaagagaacttgaaaccgtgtgcttacaagtagtcagagcccgttaatgggtgatggcgtgccttttgtagaatgaaccggcgagttacgatctgatgcaaggttaagcagcaaatgcggagccgcagcgaaagcgagtctgaatagggcgttgagtatttggtcgtagacccgaaaccaggtgatctacccttggtcaggttgaagttcaggtaacactgaatggaggaccgaaccgacttacgttgaaaagtgagcggatgaactgagggtagcggagaaattccaatcgaacttggagatagctggttctctccgaaatagctttagggctagcctcaagtgatgattattggaggtagagcactgtttggacgaggggcccctctcgggttaccgaattcagacaaactccgaatgccaattaatttaacttgggagtcagaacatgggtgataaggtccgtgttcgaaagggaaacagcccagaccaccagctaaggtcccaaaatatatgttaagtggaaaaggatgtggcgttgcccagacaactaggatgttggcttagaagcagccatcatttaaagagtgcgtaatagctcactagtcgagtgacactgcgccgaaaatgtaccggggctaaacatattaccgaagctgtggattgtcctttggacaatggtaggagagcgttctaagggcgtcgaagcatgatcgcaaggacatgtggagcgcttagaagtgagaatgccggtgtgagtagcgaaagacgggtgagaatcccgtccaccgattgactaaggtttccagaggaaggctcgtccgctctgggttagtcgggtcctaagctgaggccgacaggcgtaggcgatggataacaggttgatattcctgtaccacctagtatcgttttaatcgatggggggacgcagtaggataggcgaagcgtgctgttggagtgcacgtccaagcagtaaggctgagtgttaggcaaatccggcactcataaggctgagctgtgatggggagaggaaattgtttcctcgagtcgttgatttcacactgccgagaaaagcctctagatagataacaggtgcccgtaccgcaaaccgacacaggtagtcaagatgagaattctaaggtgagcgagcgaactctcgttaaggaactcggcaaaatgaccccgtaacttcgggagaaggggtgctctttagggttcacgcccagaagagccgcagtgaataggcccaagcgactgtttatcaaaaacacaggtctctgctaaaccgtaaggtgatgtataggggctgacgcctgcccggtgctggaaggttaagaggagtggttagcttctgcgaagctacgaatcgaagccccagtaaacggcggccgtaactataacggtcctaaggtagcgaaattccttgtcgggtaagttccgacccgcacgaaaggcgtaacgatttgggcactgtctcaacgagagactcggtgaaatcatagtacctgtgaagatgcaggttacccgcgacaggacggaaagaccccgtggagctttactgtagcctgatattgaaattcggcacagcttgtacaggataggtaggagcctttgaaacgtgagcgctagcttacgtggaggcgttggtgggatactaccctagctgtgttggctttctaacccgcaccacttatcgtggtgggagacagtgtcaggcgggcagtttgactggggcggtcgcctcctaaaaggtaacggaggcgctcaaaggttccctcagaatggttggaaatcattcatagagtgtaaaggcataagggagcttgactgcgagacctacaagtcgagcagggtcgaaagacggacttagtgatccggtggttccgcatggaagggccatcgctcaacggataaaagctaccccggggataacaggcttatctcccccaagagttcacatcgacggggaggtttggcacctcgatgtcggctcatcgcatcctggggctgtagtcggtcccaagggttgggctgttcgcccattaaagcggtacgcgagctgggttcagaacgtcgtgagacagttcggtccctatccgtcgtgggcgtaggaaatttgagaggagctgtccttagtacgagaggaccgggatggacatacctctggtgtaccagttgtcgtgc

SEQ ID NO: 3352 - DNA, 3514 bp, Artificial Sequence
  Description of Artificial Sequence: synthetic nucleic acid sequence
ttcattacctaatgcaggtaaaattttcttaattgcctgtggcataactactgattgcatagtctgtctataattcaatcctaaacttctagcagcttcagtttgtcctttatctacagcattaataccagctctaataatctcggcaatgtaggctgaagaatttataacaagcgcaatagtaccacaaattaaagctgaaatatctaaccccaaagctgcagtagtcccaaaaaatacaataaacacttgcacaagcataggagtacctcttaaaaattctatgtatatacttgctatccattgtaatggtctaattttacttatttttaataaagctataaaagagcctaaaatagaccccaataccacacctactaatgaaatcaaaatagtatttttaattcctttaatgaaaaaactgccatatttagaaataaaatttccatcatcttgcatatcttcggctgcttttgtcatgtattgatcaattaaatttttttcttttacattatcaatcgtttgatttagcttatctaaaagtacaggagagttcttaggaacagctatacatgtttgtttcttttcttcattaaatttaatctttgaaaatgttagttctgaattttgttttaaatatgcctcacctactggtttttcaacaactacacctgctacttttccactttttaaagataatatagcttcaggtaatctattgagtgaagaaattttactatcttcaatctcagtttgtgcaattttttcttgatctgtccctttttgcgcagcaatttttttgccttcaaaatctttacctgttgtcatcatcattccaggatgtgtgaacattacttttcgtgcttcattaagcatcatcccccattcggctgtaggtgccttaacacctaatccaaggaacgagaatcctgacatttgtaatatcattgagcacatcgaactactagcaataatcgctatgtcagtaaaggttagtggcaaaatatgtttgcgaatgattgttaaatcattcataccaattactttggcaaattttacatgatcagcttcaatatattgcattacactggttcgaatcacgcgacaaaaccacgcccatcgagtcaatataaacgcaataataatattttctacacccatgccaaacaacgtaatcaatgccaatgtcaccacatagcttggaaaagctaacatcacatcgcatatacgcataattattgcatcgatataacctgggaaataacctgaaataaacccaagtatcgctcctatcacaacggaaataatcaatgcgacaaatacatataacaaactaggtcttatggcgtatattatccgtgttaatacgtcccggcctaaatggtctgtccccaaccagtgagaccaacttataccagcaaatttatttgctgtatcaatgtgattcgcttcataaaatgtaattaaaggagctaaaactccaagcactacgtagattgtaataatagctatagcaactatggcacctctatcttgaaatagacgacgtaacacaatcatttcattgcctcccttaaacgcggatttaatattgcattaatgatatctgcaagtgtattaaaaagaataaacaacaccgcgacaatgagcacgtatgcttgaattactggaaaatcatgttcagtaatcgctttaacacttaatggtcctaaacctggccacgcaaatacattttcaataacgactaaacctcccatgatcattggtatcgacatacaaaaaatagatacggctacctgtaatgcattacgtaatacatgcagcaacattgtcagacgaggtacaccactagcttttaaatacaaaacataatcttcatttaattgttcaagcatagatcgtcggacatttctaaaataaattcctgcataggtaatcgtaataacaaagactggaagaatataactttctggacctgtgagtcctgaagttggtaataaattgagttttacagatacataaataactaatattgaagctacccaatatgaaggcagagctgttagtagaaaagctattgaacgtatagcacgatctgtaaatcgaccactagtcaaagcactcactatgcctagaacaacagatgttatcatcaccaccacactggaaatcaaagtgagttttaatgtattcataaacgctggacccatacgctcagatactggatcccctgtgatataactcgttccaaatttaaactgcaaggcatcaacaagccaatttttatattgcgtgaatatcggttgatttaatccatatttttctttagtttcagctattaaatcttctgttatattaggtgttccttgggcatgtaaaattgttactgctggatcttcgtttgtgagataggtcatcatgaaagtcataaaagtcactacaattaataatggaatcatgagcgtaagacgtttcataataaatttaaccatgacgacgctcctttatttatattgcatttcattaaatggaagctcatattgtgattgtgtaaaggataatttttgtaaatctttaggtgcaacaacagtcattctgccgtgagtaattggaataaagacaccttcatcgtcaacttgttttaaaatttgctgatacgcttttgaacgtgcctttgcatcttgaattttgaaagcatcatcaatatctttgtacagttgtgtcttattcttaatacctaatgttgcactttcatatcccgttttcgtcttaaatgctgctaatgtactctgaggatcatataatagcccccatgtttgattaaacattaaatcgtaatcaccagaactacgacgttcagctactttatctgacgtttctccgtttatatctagttgtacacctaacttcttaaattctgcttctaagaattcagcttgttctttttgactggaagaccctttgtcataatacaacttaagattcaaatctttgccctctttttgacgaacttgtcgatcttttgaaagcacccatccagccttgtctaataacgcttgcgcttttttcttatcatatgttcttgttggtaaattaaagtttatatctgtcacatttttagcaaatagttgtgtggctggcttttcttgtttgtctaaaatatcttgagctattttatctctatttaccatgtgacctaatgcttgtctgactgctttatcactgactgcactatctttcttaccagaattaacaacaagcatttttgtattcatagcctggctacgttttacttggtagcttccggtttcttttaattgttttaaactatctttatctaagctgtctgtacctctatcatctgtataagcaaagttggtttctccttttttcattgataaaaatgttgtttctcctgcaggtttaacttttgcttctactttatttaattttgccttttctccccaatattgattatttttattaaactctgcagatatatcttttttgtgtc

SEQ ID NO: 3353 - DNA, 3589 bp, Artificial Sequence
  Description of Artificial Sequence: synthetic nucleic acid sequence
ttaaagtaggtcaaccaagagaagaaggaactcaagtaggtcctattattagtaaaaaacaatttgatcaagttcaggattacattgataaaggtatcaatgaaggagcagagttattctacggtggtccaggtaaaccagaaggattagataaaggatattttgcgcgtccaactatatttattaatgtagataatcacatgacgattgcacaagaagaaattttcggacctgtcatgtctgtaatcacttataataatcttgacgaagctattgaaattgctaatgatactaaatatggtcttgctggctatgttattggtaaagataaagatacattgagacatgttgctcgttcaatcgaagctggtacaattgaaattaatgaagctggtagaaaaccagacttaccattcggtggttataaagaatctggcttaggtcgtgaatggggcgattatggtatcgaagaattcttagaagtaaaatcaatagctggatattttaaataattagtaaattaaattaaatgttgcaattaaacaaagcacggaactaattttgttctgtgttttgttttttatgttaaaattcctaaaatcattttgtaattaaaatgaaaatttgctatagttagtctagtaattagaaggttgagaaatatacaaacgtataaatatagctataatgtgactttttattattgtcagtcacataaatatcgagataagaatctattatttggttaagctaactatacgtttattatttttgaacttcgtaaaataaataattaatgaaatgggtgcaagtctatgcctggtagagaacgaacatctccgcagtatgaatctttccacgaattatataaaaacaatactactaaagagctcactcaaaaagccaaatctttaaaattaactaattacagtaaattaaataaaaaagaattggtacttgccattatggaagcacaaatggaaaaagatggtaattactatatggaaggaatattagatgatattcaacaagatggatatggtttcttaagaaccgttaactattctaaaggtgagaaggatatttatatttctgcaagccaaattcgacgttttgaaataaaacgtggtgataaagtaacgggtaaagttcgtaaaccaaaagataatgaaaaatattatggtctacttcaagttgattttgtaaacgaccataatgcagaagaagtcaaaaaacgtccttcacttccaagctttaacacctctttatccggaagaaagaatcctattagaaacgcaatctacaaattattccactcgtattatggatttagtcacaccaataggtcttggtcaacgtggtcttatagttgcaccacctaaagctggtaagacaagtttattaaaagaaatcgctaacgcaatagcgagtaataaaccggaagcgaatttgtttatattactagtagacctactcaggaattaagagagcaaggtgtacgtgtgaaactgtcggctgttaaggatattgttgatggtaaagatatcgtacttgtagatgattcgattgttcgaggtacaacgattaaacgcatagttaaaatgcttaaggattcaggagctaaccgcattcacgtaagaattgcttctcccgaattcatgttccctagtttttatggtattgacgtatctacaacagctgaactcatctcagcaagtaagtctcctgaggaaattaaaaatcatattggtgcagattctcttgcttatttaagcgttgatggcttaatcgagtctataggacttgattatgatgcgccatatcatggcttgtgtgtagaaagttttacaggtgattatccagcaggactttacgattatgagaaaaattataaaaagcatttaagtgaacgtcaaaaatcatatatagctaataataaacattattttgatagtgagggaaatttacatgtctaaagcatatgaggaatctggtgtaaatattcaagcaggatatgaagcagtcgaaagaataacaagtcatgttgaacgtacattgcgcaaagaagtattaggtggtttaggtggatttggtgcaacatttgatttgtctcaattaaaaatgaaagcgccagttctggtatcaggtactgacggtgtgggtacaaagttaaaattagcaattgactatggaaagcatgacacaattggtattgatgctgtcgcaatgtgtgtaaatgatattttaacaacaggtgctgaacctttatactttttagactatattgccacgaataaagtagtgccaagtactatagagcaaatcgttaaaggtataagtgacggttgcgaacaaaccaatacggcacttataggcggtgaaactgctgaaatgggagaaatgtatcatgaaggtgaatatgatattgctggttttgcagtaggagcggtagagaaagaggactatattgatggttcaaatgttgaagaaggacaagcaattattggtttagcttcaagtggtattcattcaaatggctatagtctagttagaaaaatgataaaagaatcaggagttcaattacatgatcaatttaatggtcaaacctttttagaaaccttccttgcaccaacaaaattgtatgtaaagcctattcttgaattaaagaaacatattgatatcaaagcgatgagccatattactggtggaggtttctatgaaaatattccgcgtgcccttcctaaaggtttatcagcaaaaatagatacacaatcattcccaacgttggaagtctttaattggcttcaaaaacagggcaacatttcaacgaatgaaatgtataacatatttaatatgggtattggatatacaattattgttgacaaaaaagatgttcaaacaacattaacaacgttacgtgcaatggatacaactgcatatgaaattggtgagattataaaagatgatgatacacctattcatttattggaggtagaatagtgaccaatatagcgatttttgcctcaggatcaggtagtaactttgaaaatattgtaaaacatatccaaacagggcaattatctggtatcaatgtaacggcactgtatacagataatgaaggggtaccctgtattgatagagctaaaaatttaaatattccaattcatattaacaagccaaaagacttttcatccaaatctttatatgaacagcatctacttaaattattatccagtgaggaagttcagtggattgtattagctggttatatgagactagttggccaagacttattacaagcttatgaaggacggatattaaatatacatccctcattattgcctaaattcaaaggtttagatgccataggtcaagcgttagaaagtggagatactgtaactggatcaactgtccattatgtagatagtgggatggatacgggagaaattattgaacaacagcaatgtgatataaaaccggacgatactaaagaacaattagaagatagagtaaaacatttagaatatgaactttatccaagagttatagctaaaatcattaaatagaggagtatcttatagaatgaaaa

SEQ ID NO: 3354 - DNA, 4043 bp, Artificial Sequence
  Description of Artificial Sequence: synthetic nucleic acid sequence
tagtgaatgaagaccctgaacgtaaaatcattatcgtttcagctccaggcaaaaggcataatgacgacattaaaactactgatttattaattcgtctctatgaaaaagtacttaataaattaaattatgaaagtaaaaaacaagaaattatccaaagatatgctgatatagtagaagaattaggtataggaaatgacattttaataacaattaatgacactttagaggaatacattaaacatctttctgacaaacctaaccgtttatatgatgctttattatcttgtggcgaaaattttaatgctcaattaatagcccagtataataatagtcaaggtattcctactcgttatatttctcctaaagaagctggattaactgtaactgatttaccacagcaagctcaaattttagattccgcatataatgaaatatacaaattgcgtgattatgatgaaaagctaattattcctggttttttcggagtttcaaagcaaaattatatcgttacgtttccacgcggtggttctgacataactggtgctatcatagcacgtggcgtccgagcctcactttatgagaacttcactgatgtatcaggaatatataaagctaatccgaatatcataaataatcctgaactcatagaggaaataacttatagagaaatgcgagagctatcttatgcaggatttggagtttttcacgatgaagctctacaacctttatacaaagatcgaattcccgtagttatcaaaaatactaatcgtccaaatgataaagggacctacattttacatgaccgtgaaatcgattctaaaaatgtcattagtggaattagttgtgataaaggctttactgtgattaatattaaaaaatatttaatgaatagattagttggatttacacgaaagattcttggcgttttagaagaatttaatatatcatttgaccacatgccttctggtattgataacataagtattatcatgcgtacaaatcaaattcaaggtaaagaaagtcaagttcttaatgccatacgcaaacgttgtgaagttgatgaattaagtatcgaccatgatttagcagtactaatgattgttggtgaaggtatgaatcaagttgttggtacagctagtaaaattactcacgccctttcagaatcaaacattaatttaataatgattaaccaaggtgcttctgaaatttcaatgatgtttggaattcatgaagcagatgctgaaaaagcagtattatctacgtacgaattttgttacaacggtgtttgtttaaaaaatttgtgtaaataaaataaaaaagatttctacatcactttcaatacataaagtaaatttattaactctgtatcaatgatgtagaaatctttttaagatatctttttagtggaactatttactatagcttttttaatacgctgttcacctactaccaattttaaaatatagaattgataataactaagagaatcaataacagctttataattactaaactgatgatatttttgttcactcattaaatcatacataagaactatttctggcttaatataatctacgttccaacttaaagaatgaaaatatatattattttttggtaaacgtatatgatgatctaacctaaatagccattcatcatttacaacatcataaacaaatattgtcatgacttctgtatcgtttttaaagactttaacatgttcaacatctgataaagataaagattctcttaatctttcatataactgattatcataatagtgaatcgtaaattcttcaggaatcaccctgataatttccaataactttttgcgctcaacacaaatatctattttcgatggtaatataaaatcatcattcagaaatagatgcatcgctacctcgccgtgaaatttgaataaatgagatgatgttttccttaaaatttcgactattttattcactggtttttcttctttaacaaacatgttaccacccctatagcaagcgctttcacaatcaaattatacattttcttttttcacttatcaaacaaataaatgtgaacatttagtaaaatttattttattttcaataaaattattttcataaaaagttactatatcactattcgctacgcatatgatagggctctcataaaaattcacgaaagtttaattgatatgtaaatatttcgtcactactatttgataaaacacatttcccctttcattttcattgaactcaaaatttaagaagtttataatttatcttgcaaatagaatttaatattaaaagatttgggtgagtagtaatgtctttaacgattatcttatctataataattattattttgattatggctatggttcttaatcaaaaatttatgaaagatagggttgaaacagaagaatatgctagaaatcaattaatctctaaaaattcaattttaagtgaagaaaatttatcattgaaaaaccaaatgttaagtacaaacaatgacgtcggtcaacacgcttttaaaaacgccaagcgtgaattaagaaaaatattaaatagatttaaagaagagggtcgtttacgatcatatacaattgttcctacgagtaatttggctgttaaacatccccttttcgaatatgcacgttcattcgattttattatcattactgatgttggtttgataaatgtggatgttaaaaattggaaccaaaaaacgttttatcattttgatgtgccagatcaacatcttgaagaaggacaaccacaatataataccgaaaaagttgtcggtcattatattagcaatcgatatcatagtcagtttaaaacaacacgttctggtgtctatacttttattgagattttacaggataatcgtgtaatatatgaattttatgaccacgatccatacgataaagccgcaaacaatgcaaaagcattaaaagataaaattgaaaatgattataattttaaaattcaaagtattggcgtcatatattttagtgatggtagcgttaatattattgaaggatccgacgagagtgataaatacgtcgacaccgtatctacaccgatatcacttgaaaaagtaattgaggaagctatcgatttatctaagcacccccttactgataaacaaatcgaagaaatttctgaaaactttaaacaacatatgaataattaaaattcaaaaagagtttggggcatgaagttatttgactaataaaaagacaatttctatttataaaatgtagaaattgtctttttattataattatttaaattgttgagcaactactttttttatattcattagcattaatacaaatgcaatttctcttttgactttaattatgtttcgaatcgacattctgatgaaacttaaaataactttcgtaaatccatcaacaagttccacatcaaatttctttaactgcaaacgtttcttctaaaataagaaatcttatcccaatttgaattttaaaatatcttaaattgtaattttacattccaacttattaaattatctattatcaacaatgttgtcatatatatttttaattttaacgttttaatacgattcagtagtcatagcacacatttatatgacaacacttatagcaattatttcatgaataaataaacttaattataaactgtatcagtttacattagaaatctttttaaaacataatgtttttcactagactaagaagtagatatcctaatttctactttattgaaacactagtcagaaacgtagttgaaatctactaaatatcactctttttttattctaatctctttagctagaataagaaaacgctgctaaacaaaatggtccaactgagtttctacttattgatataacaaatgaattttatatttccactcaatatcagactctaaattatcgctactagctccaaatatttaattttctcttttttgcctcttcttgagcgtttacgaaggtatccctatattttccgtttggagaaaaatacttttctctggctagaccttttttcaccagcgatt

SEQ ID NO: 3355 - DNA, 3423 bp, Artificial Sequence
  Description of Artificial Sequence: synthetic nucleic acid sequence
acttgaaaaatcaaatgcagatcgtgacattttctatttaaaatctattgataacaatattcgtgaatatcatatagcagaataatctaaactcaattcttttgcttttttaattttttaaaatgaaagaaacgaatttactattcatacttgccccctaaaaacaacgtcatatagctgtttttagggggtttttaatcccaagatagtgcatttcatctattatagacctctactatttatatactgtttacctactattcatagataaaaacgaatcctatccatagatcaacattgacaaataactaaagcaattctatacaataacgtatctcaaggtttcgttgtttttttaggtctgtataaatgtgtcatatctatttcttccaattttaataattttattttgttgtctaaagtacctccgtatcctgttaaatttccatctttaccaaccactcgatgacatggtataagtatagaaataggattactcccaacagcacctcctacagcctgagcagacattgctggcttattcattgctcgtcctactgttttagcaatctctccatatgttttaagttctctataacgaattgtctgaagttcattccataccttctgttgaaaatcagtgccttttggtgctaacggtacttttatctcaggataattccctttaaaatactctcttaaccacgctttagtatctttaaaaacatctaacgtatcctttgttttaattcctttcaaatgttgattagggtataagacatgtgacaacgagatgccatcgtttgtaattaattgcaataagccaacgggcgagtcatacattgattgatacatatttctccaactccttaaatgtgtatatcattctagtcatatccttataaactaacgcattctattctgaacataattttataatatagataattgctatatttatgaaattggataaacattcgaatagaatgtgatacaccattaacgataactaaaattgaaaaatgtcatcatttatatattaagtcaattatcgacaggtcatactttaagaaagtctggaactttgatttacgtcccagactggtcaagatatagaatttaaagtccaactcacccttttgattagatgtcattatatttattgaaaattataaagttcataccctttattttttgcatattctaatgcgagaatttctaaaacattaatgaacgcaggttcgtcttttacttttatatattgaaaagtgaggccgtatttatctgcagtaatgtcttttaaatgatttggatttaagtccttattttgagcataagcttttctaaatttagtcgtacctgtttctgaacgtgaattgtattgtcctaattttgtatacaaatcactatttataggttgatgtgtggatgaatatcctccagtttgacctacaaacactggttttttctcatcgaaaatcacatagacaccaaacttatccttaacttttcccctatcctctggtgtaaacgccaaagcctttttatgatcgtacttaaataatttttttagtttcttctgattatcttctagtaactcatttaattttttgctacccttcatacatttattcctccccattagcaataaacttatatacatacattttacatgtagtatatcactttttaaaacttttaatcattttcagttttaataattttcactattacctcaggtactaaaaaacctaagattgaaaacacaaaaccatttaaaacgtagcctaaaatactccatgtgtgattatagctcatctgtaattgtgttctcgtttgagctatacggtcacgttcaaatccatgcacgagtcccgcaactactgctgcaataatccctgatgcatggaataattcagcaatcaaataagtgacaaacggcgtcagcaattgtataaatgtaaacatgttaatgttctcaatgccacgtctcattaatgttaaacgaaatctcactaaagccatgcctataattagaccaacaatagcacctccaatagaggcaatcaaaaattgttgaatcgcatcaaaaatggaaaaagttccagtaatcaatacacctacggcaattttaaatgaaatgatacctgcagcatcattaagtaaagattcaccttcaagaatggtcattgaaccttttggtaaaaccttacctttcgtgattgcttgtaccgcaacagcgtctgtaggacaaagtatagccgcaattgcgaaagcagcacctataggtaattcaggccaaatccaatgaataaacaatcctacgcctataacggtagttatgacaagacctagagccatcatcataacaggtttgatatacttccttaaatgtactcttgaaacattaacaccctcaacgaatagtagtggtgcaatcaatgtaaccataaataattcagaatcaaaattgaattcaactggaatgggagtgaggtataaaatcatcccaaggaaaatttggataaatgcaagaggtactttaggtatgaaagtatgtacaaaggagctcacaataactagtgcgacaaatatgagtagagtttcaaatatctccacactttcacctctttattaatttttaattgcaaatttagtcatcaaaacaataaaaagttgcaaggttatctactgcaacactgaagaagtgaaataataacaatagagtcattcctgtaaggacataactattaacactcaatcatgccacaaatatactattcaaaactcaattattttctttatcagtgaaatcaaacatgaacatttaaattaacttatgaagctcgcttcttcgaacgagaaaatgcttatgtgtaatttcattgaaaaaattagtgacaactgtcattcacaattattcttgtttacaattttatcatttattaaccagattcttaaataaatagcttttatatcattaatatcttcacctcagatatacaaaaaactactagcatataaaagatatatcttttatatgctagtagtttaaaagcttaaacaatcaatcgtccattttattaatatattctttttctttatagtataatttttctcgtctttcttctcgtagttttgcacgtttttttaattcttctggcgtattaaactctttttggcttaataagatagtagattgtctagatgcatcgtctttcctgtacatatatgcaccattacggtaggccgctctacttatcaaatgcattccaaccggagatgtaagattgataaaaactagtgataataataatctgacactgaaaaaacctgaaactatgcactcatacatcataacaaatttgaatcttttatagatgatttcaaccttactgtaaatcaagagatgaaatgggcaat

SEQ ID NO: 3356 - DNA, 3169 bp, Artificial Sequence
  Description of Artificial Sequence: synthetic nucleic acid sequence
tgggctgtttccctttcgaacacggaccttatcacccatgttctgactcccaagttaaattaattggcattcggagtttgtctgaattcggtaacccgagaggggcccctcgtccaaacagtgctctacctccaataatcatcacttgaggctagccctaaagctatttcggagagaaccagctatctccaagttcgattggaatttctccgctaccctcagttcatccgctcacttttcaacgtaagtcggttcggtcctccattcagtgttacctgaacttcaacctgaccaagggtagatcacctggtttcgggtctacgaccaaatactcaacgccctattcagactcgctttcgctgcggctccacatttgctgcttaaccttgcatcagatcgtaactcgccggttcattctacaaaaggcacgccatcacccattaacgggctctgactacttgtaagcacacggtttcaagttctctttcactccccttccggggtacttttcacctttccctcacggtactggttcactatcggtcactagagagtatttagccttaggagatggtcctcccagattccgacggaatttcacgtgctccgtcgtactcaggatccactcaagagagaatatgttttcgactacaggattattaccttctttgattcatctttccagatgattcgtctaacatgttcttttgtaactccgtatagagtgtcctacaaccccaacaagcaagcttgttggtttgggctattcccgtttcgctcgccgctactcagggaatcgatttttctttctcttcctccgggtactaagatgtttcagttctccgggtctgccttctgacatgctatgaattcacatgtcgataacatgacataactcatgctgggttcccccattcggaaatctctggatcaacgcttacttacagctacccaaagcatatcgtcgttagtaacgtccttcatcggcttctagtgccaaggcatccaccgtgcgcccttaataacttaatctatgtttccaccatattttgaattgttattcaaaataaatagctaaaactagttattaatcttgtgagtgttctttcgaacactagcgattatttatgaattcaagcttatttaaaactctattcactcggttttgcttggtaaaatcttacttacttatctagttttcaatgtacaaagaatgttaataaacattcaaaactgaatacaatatgtcacgttatccctcatcttcgtagaagatgttccgaatatatccttagaaaggaggtgatccagccgcaccttccgatacggctaccttgttacgacttcaccccaatcatttgtcccaccttcgacggctagctccaaatggttactccaccggcttcgggtgttacaaactctcgtggtgtgacgggcggtgtgtacaagacccgggaacgtattcaccgtagcatgctgatctacgattactagcgattccagcttcatatagtcgagttgcagactacaatccgaactgagaacaactttatgggatttgcttgacctcgcggtttcgctgccctttgtattgtccattgtagcacgtgtgtagcccaaatcataaggggcatgatgatttgacgtcatccccaccttcctccggtttgtcaccggcagtcaacttagagtgcccaacttaatgatggcaactaagcttaagggttgcgctcgttgcgggacttaacccaacatctcacgacacgagctgacgacaaccatgcaccacctgttactctgtcccccgaaggggaaaactctatctctagaggggtcagaggatgtcaagatttggtaaggttcttcgcgttgcttcgaattaaaccacatgctccaccgcttgtgcgggtccccgtcaattcctttgagtttcaaccttgcggtcgtactccccaggcggagtgcttaatgcgttagctgcagcactaaggggcggaaaccccctaacacttagcactcatcgtttacggcgtggactaccagggtatctaatcctgtttgatccccacgctttcgcacatcagcgtcagttacagaccagaaagtcgccttcgccactggtgttcctccatatctctgcgcatttcaccgctacacatggaattccactttcctcttctgcactcaagttttccagtttccaatgaccctccacggttgagccgtgggctttcacatcagacttaaaaaaccgcctacgcgcgctttacgcccaataattccggataacgcttgccacctacgtattaccgcggctgctggcacgtagttagccgtggctttctgattaggtaccgtcaagacgtgcatagttacttacacatttgttcttccctaataacagagttttacgatccgaagaccttcatcactcacgcggcgttgctccgtcaggctttcgcccattgcggaagattccctactgctgcctcccgtaggagtctggaccgtgtctcagttccagtgtggccgatcaccctctcaggtcggctacgcatcgtcgccttggtaagccgttaccttaccaactagctaatgcggcgcggatccatctataagtgacagcaaaaccgtctttcactattgaaccatgcggttcaatatattatccggtattagctccggtttcccgaagttatcccagtcttataggtaggttatccacgtgttactcacccgtccgccgctaacgtcagaggagcaagctcctcgtctgttcgctcgacttgcatgtattaggcacgccgccagcgttcatcctgagccaggatcaaactctccataaaaaattatgatgtttgattagctcataaatactaaatagtttgtaacgtttcgttactgtttattggaattaacgttgacatattgtcattcagttttcaatgttcatttagtaaaatcaatcttttttattgtactatattgttttaagaaaagtcaataactaattgatattacttaattaattttaaaagcttttaacgataagtctttttctatattctttataatcatccattaaagttaattcataacctacctcatcaaatacttcaggttcaatctttttgattttatataatcccccaaaaataaaatattctgg

SEQ ID NO: 3357 - DNA, 4055 bp, Artificial Sequence
  Description of Artificial Sequence: synthetic nucleic acid sequence
tataacttccgtgaaactttagcagttttgcatcatcttgtgtaatggatccagtgattggattagctaaactttgttcaatagttccacgcaaaaagtcactatttgcttttaaaaattccatttcatcaagatttttatctaattcttccgaaatatgattatttgtattaaccatgtatcccccgtcccttctattaatacacgtctctttgatatcttttatctcttttcatttgttttaagtattcttctgcatctgtttcagataggttttgctctttgattaacacatttttaatcgcttgatgaacatcctttgccattttactttcatcaccacatacataaatagtagcgccattttcaatccatcgattaaattgttcactattttctgcaattttatgttgcacatacacttttttatcagtatctctagaaaaagcaacatctaattttgataaagttccatcttcaagccattcttgccattccgtttgatacagaaaatctgtagtgaagtgttgatctccaaagaataaccatgtatttccttcaaaacctagttcctctcgttcttgcatataggatctaaacggtgcaacacctgtcccaggacctatcataatcacaggtgttgattcatcttgcggaaacttaaaattcggatttcgttttaaatagataggaattgtatcgccctcttgtattctctctgcaaattgtactgaacaaacacctgaacgttcccgaccgtgtgcttgatatctaactgctccaacagtaatgtgaacttcatctggtgttgctttataactactagatattgagtactctctaggtggtaactttcttaataattgatgtaaattttcaggttgtagttctgtcgttgcgaagtcatttaataagtcaatcaaatcccttccctcaacgtagttttgaatccattctttatcttgaattttttcagaaagctcttcattatcaaaaaatatcgcagcattttctattaacggttttgttaatttagtaatttcaaaatgcgatgttaatgcctcttcaagatttaaagtatctccatcctcgttaattaaaacttgtgtttctggactccaacctaatgtgctaataagtaagtctacgatagctggatcattttgaggcaagacaactacacaatctcccggttcatattcctcaccaaaattatcaagtaataactcaatatgtctcgtctctttgtctgaacctctaccattcaaattaatattggtcaatacttcagcatcgtaaggattagacttactatatttcttttcttttgctgattttatagattcgctaacaacttgttcactttcagtaccagccggtgttgaatcaatcgtattaataacattggccatccacttttcagcgtcttcttcataatcaacatcgcaatcagtacgatgataaagtctttctgcccctaattcagccaaacggttatcaaaatctttaccagtttgacagaagaattcataggtttgatctcctaatgctaatactgaaaatctcaccccatccaattttggcgctttacgtccgtggatgtattcatgtaattcaacagcgttatctggtggatctccttcgccatgtgtagatgtgataataaataaatcttctactttcttcaaattcttaggtttaaagtcatccattgatttgagcgtaacgtcatttccaatatcagataaacgttgttcaaatatttctgcaagtccttgcgcattaccagactcagatccatataaaattgttatcgatctagcttccggctcaactgaaggttccttttcatgtagcatcgcttctgtattgtcatctgagttatgttgttctacagaatctgtagatgtatttgattgttgatttgccatcagatagccacttaaccatacttgttggttagatgataaagtgtgaagcaattcattgatttgtttagcttgcccttccgtaaaaggactattggtaacacttaagttcaatcttatccacctcttatactttgttattccgatatttgtcattatttatatatgtctatttttgaaagttattaattatatcttcaattctagtatgtaccatttgttattttcagtaaatgtaatactcaattgataactaaaatcgaaaagacaattcataatatcaaagggcaatacaaacttttattactcaaaattatcgttactaaataaagctgtatcagcttttaacaaacaactctttatttcttatcggaatactatgttttgaaattaaaattttttgactatctcttatggtttatcagctacatgtaatccacattcagtcttactagaattggaccaacgaccagcacgtgaatcattagaatcaaatacgggtgatgtacatggaatacaaccaatacttggataattttgatcatgtaattcattatatggtaaatccttatcacgtatataagaccatacttcttcttctgtccaatagattaagggacacactttaattgacttaaatctttcatctttgttaatgaaatttgtatgtgctcgtgttggtgattgtgctcgtctaagacctgatatccaagctacagcaccagataatacgtcttctagtggtttaatcttgcgtatgtagcaacattggttaggatcattcttccataaagcaggattatatttctcaccttgttcctctaacgtaagttccggttttttcattttaatgcgtaattgcggatatttatctttcaccctatctattaagtcatatgtttcttgaaaatgtaaatcagtgtctaaaaatacaatttgtgcgtcgggtttaatttgagaaatcaagtcaatcaaaaccatactctcagcaccaaaactgcaagaataaacaatatcattttcataagtttgatatgcccattttaaaatctcataagcaccttttgtctcatcattaatatctaattcatttataaatggatcgttttgaaaattgtcataagtaattctttctatagacattagcggagccccctctcaccttatcaatccatccaaatcaacaaaacatatcagaattgtcagaataattatgtttaatactttaactacttttataacgaaagtcaaggtaactcgagaaattatcgaaataaagataagattaatttaaattttttgtcctatatgctcataaaaaatttaaagagcctacacatatgatatggcagactctttaataatttcttttacattcgtttatagtgacttcattcaaaatattacaaatggaacaagattattttattctttaatccaagaagaatataggcatttattttaataattgtcttattaatttttccatttggttaggattatcacaaggtaaaaatcgtttaacaatatttccctgttgatctactacaaatttagtaaaattccatttaatttgcgaaccaaataatcctggttgtttacattttaataatgtgtacaaagggtgttcatgctctccattaacattaatcttagcatggatggggaaagtaataccaaacttatatttatatactcgataaatatctttgattaattctggctcctgattattaaaatcattgcaagggaagctcaaaatttcaagaccatacttatgatattttttataaagcatttctaatttattaaattgatcattcagagtacaattcgttgcagtatttacgataatgagcactttccctttatatctttttagtaaataggtagagccatcataattctttaccgcaatatcataaatactcatttagatacacctctacatcattgccaatttcaataaatctataacgccactagaagctccaggaaatgcaaaaatatttttatttaagtcttgtgcagtaagtttttgattaatgataaagactaggagattaaccaaatcaccagcgtcattaccataaatctctgctcctactaaacgtttgtgactatcta

SEQ ID NO: 3358 - DNA, 3115 bp, Artificial Sequence
  Description of Artificial Sequence: synthetic nucleic acid sequence
taggctagtggtactaaaacacggtctttataatgtttgaatctgttgtaataaaaactatcttctctatctgcaaaatctttagtttcagaggtatcctccataaatgacctaaatataggtaactcttcttcagataaaaagcggactttaactccatttttcttaacttttttagtattacgctttcttaaaccatccatgttttttaaaacatcattagcacttttgtttgctaaatttagaacagaatgatatcggatttgtaatacaggatcaaatcctttgtggaatccttcgtgtttatatcctaaactctctaattcatcaaaaatccaatcatgacctgcatttccagttatttctccctcatgatttaaatattgatatggaaggtatgggtcaactcttaaatataaacaattatatttttttacatatttactcaattcattaaagaaaaaatgtacaagctctttattattataatctattactggaccgcgattggaataaaaatatttaaatattttcattacaggaacagctgttaataaacaagctgcaatcacttcgttatcattatttttaattccaactaaatgtgactcggtaccttcagcaacctttaattcgtaattaccttccatttgtgtaaaatgactatatgtcatacgatcagtaaagtcactaaattctttagctgtcaaattcgtaaacttcatcttcataactcccatttatatctttatatctatttctttttatttttagaaaaataggtcgttttacttcaccttttatatttaacatttggttcatttaatactatttatatttctaatctaaacaagtatacaatagttgtagtgaaaactaaaatattatcctgcaaaacttttatataaaattaaaagttaaatctcgtttattctgtttatgtataaaataatatgggctaaacactaatgtcgcccatatcactaattatttactattattttaattcatttgcaagtgctttaccaatgtcttcacttgattggggattttgtccagtgataaattgaccgtctttttctacgtgagatgtaaagtcatctttcactacaaaatttgcaccttgctcttctaatttagattgagttaaaaatggtactttattttcaaatcccattgctttttcttcactatcagtaaatgaagttattttgacaccatctactagatagtgattatttgcatcttttacacctacaaacgcactaggtccatgacatactgaagagattattttattactatttttaaattgaagtaaaatatcagctaatttctcattattggcaaaatcgtatacagtaccatgtccacctggtagataaatagcgtcatactcatctgcatttacattttcgatactaggtgtatcgtttaagtgtgacacgaatttagcatactgattcagtgattcattagaaacagaattaggatcaagatttacttttccacctttaatagaaataacatcaacattgataccttcttcagtcaatatattatatggtgctccagcttcttctaaccataatccagtttctgtaccgtctgtaaattgacttgtacttgttaaaacaaataaaacttttttactcatgaatatatacacctcttcaaattaattgtgattattatttacccacattagtagtagattattcaatagtgatcatttaattttttgaagttactattagtatagtagttaattcatagagtaatcattgtttttgatatgtatatttttcatctattttcttaactttgatttaacttaatattaatttttataaagaattcaacgtagttcttattgatttgatataagtgataaattcttttcttgaatctatttcaatacgttttacaatttcactaccaattacaataccatctgcaacggacgctatatctttaacatgttcaggatttttgataccaaatccagcaaccacaggaatttttgaaactttttttatatattcaatttttctctttaaatctggatggaactccccactgttacctgttgtggcattcattgttaccgtgtaaataaatccttctgagttctttgcaatttgcataatcctagcatcacttgcggtcatggcaattaacgatattattttaacagaatgatgataaaaatcttttttaaacttttttgtaagttcgtaaggtaaatctggaataattaaaccataaacaccagcttcatcacacttatccaaaaataattcttctccataagcacttagaatattataataagtcattaatacatacttagatgaaatagtatttttattttttattaattcatcaaaaatgaatttaatgtttgaaccctcgtcaatagcgttgcgccctgctttcatgattataggtccatctgcaacaggatcagaaaatggcacaccaatttcaacaatgtctgctccattctcagttaatgtttttaaatgatgaataaaatttaaatcacccataatatacggaatgaataatttactcattttgttcaccaccgttttctttgtattgtttaattgtttccatatctttatctccacgacctgaaatagtcacaacaataatttctttttcatccatatttggcgctaatttttcaacataactcaatgcatgtgcactttcaattgctggaatgataccttcaacttttgagaatgttataagtgcttccatagcttcattatctgtagcacttacatatgatacacgaccaatatcattataatacgaatgttcaggtccaatacctggataatctagtcccgctgatatagagtgtgccaattcaatttgtccatcatcattttgaataaggtacattttggaaccatgtaatacacctggtttacctttccctatagctaaagcatgattatgcgtatgacttccttttcccgcagcttctaccccatataatttaacatcatcttgtataaatggatagaacgtacctattgaattggatcctccaccaacacacgcgactaacgcatctggaagtcgtccttctttactt

SEQ ID NO: 3359 - DNA, 2954 bp, Artificial Sequence
  Description of Artificial Sequence: synthetic nucleic acid sequence
cacaactgaagcttgtaaacctggcttaataattgtatttgctcctacttgttgatcgtattgttcatataaatgatgtttagatgctattgttgggtgttgtaataacttgataaatgtatcatgtacatctatattgctgtaatcgttttttgatgtattatattccttttcttctccttctaaaatatacactggtgcctcatcagcaagaggttgcacaggaatgtctgcatacacttcatcatcgtatgtaagcacgaatctatcagtgtctgttacttcaccgattactgcactatctagttcgtgtttattgaataaatctaaaaacttttgttctgtacctttttctacaactctttaagcccatgttttttataggttctgttgcaaagtaaaaaaatatagctaaccactaatttatcatgtcagtgttcgcttaacttgctagcatgatgctaatttcgtggcatggcgaaaatccgtagatctgaagagacctgcggttctttttatatagagcgtaaatacattcaataccttttaaagtattctttgctgtattgatattttgataccttgtctttcttattttaatatgacagtgatcttgctcaatgaggttattcagatatttcgatgtacaataacagtcaggtttaagtttaaaagctttaattactttagccattgctaccttcgttgaaggtgcctgatctgtaattaccttttgaggtttaccaaattgtttaatgagacgtttgataaacgcatatgctgaatgattatctcgttgcttacgcaaccaaatatctaatgtatatccctctgcatcaatggcacgatataaatagctccattttccttttattttgatgtacgtctcatcaatacgccatttgtaattagctttttatgctttttcttccaaatttgatataaaattggggcatattcttgaacccaacggtagaccgttgaatgatgaacgtttacaccacgttcccttaatatttcagatatatcacgataactcaatgcatatcttagatagtagccaacggctacagtgataacatccttgttaaattgtttatatctgaaatagttcatacagaagactcctttttgttaaaattatactatagattcaactttgcaacagaacctatattttgctataattattaaattaattgcctttgtgttagtattccctggattactaacactttggttagctgttctaagtgatacaggtgcagcaatattagttatattaaattcattacgtttattaaaaaaataaaaaagcctaaatactctctcgatttgtgagaaagtatttaggctttttgaattaataaatttcttacttcttatgtttatttaacaattagtactgggacagaacttcttttagcaatcttatgtgtaacatctcctaaaacatgtttaatattcaaatcgactctatgattactcataattactaaatcaaattcaccattatttatatctccagaagtaattttttctaagattgtatctttaatatgcccaaaatctacatctattttatattgaatatctcttttttctaattcacgtaaaaatggagtgagttttttctctttttctctaataatatcttctttatgcttattataatacttgacactaattgcaagatcattttctgttacaacgtgataaattacaacaactgaatcttcatcggtgactttttctaaatagtcagggatagcactaaaatcattttcgaaatcatagggtaataatatatttttgaacatctacaccagcctcctattacttattatttagatgtctattacttatatataccctaaatatgtatgcttattctcatattcaaattattcaaatatattccttatcatgtattagattctattttttatattatttttgtaattctttgtataaacctatttatttataaagcgctctaatacatacctaaatatcttcaacttataaactactttttatttcaatgcctttttccaaacttcttttatgagatattgtggttattacctaactctcattattaatgttattattttatttatacatagtaaatgtaactgtaagacattctcacctaacatgttttgttattacctgacatttacaatttacacatttcgctattattacgcaaattattttgattttataattatgatgactataatctattctaattaatctctccttttaggcataaaataatctacttataattaaagcatccactatttcaaaattatttgtaaattgagatttataagtgatttttatacagttatttaaaatctatttcataatcaaaaataataaagggggtaataaaaatgaaaaaagaaaaacgtttaaatcttatcttaactgttatacaacagaatcagtttaataaaaaacaacaaatagtggattacatggcaagacattttggagtttactatagcttgacaactatttctcgtgacttacaagaattagaaatttacaaaatccctgttgaaaataaaaagtatatttacaagaaaataaatcaaacaaatcaattaagtgcaaaaaaacaattagaaatatttagtgatgagattattgaatttataacgctaaataactatgtcttaataaaaacatctcctggctttgctcaaagtataagttattacatagatcaattacaaatgaaagaaatattaggaattattggaggtaacgatactttgatgattttgacttcttcaaatgaaatagcagaatttgtttgttatcaattattcccttaaaaattaaatgattatattaataggaatgattactaatacaaaaaaatgagtaaaaaatctttttgcttgaataagataaggttttaacaatgagatttt

SEQ ID NO: 3360 - DNA, 3165 bp, Artificial Sequence
  Description of Artificial Sequence: synthetic nucleic acid sequence
aacacaactcttattaacttttgataagattttatagtattaaagttccattctttacgagtattcatagcttctaaataatacccagttataatatcaaatgctttcttctctaagctctcttctctatttgaaacatgataaggagcaccacctttagtaacccacttatcttttttataattagataaataggcagtatataaagagataatggtctctttgaaaccgaaaaatttatactcttcttttaaagaatcttcactagccactatagaaaatagatgagcgttaaaaactgaggggttataactttctgatttaggtggagcaccaccaccaccagaattatcaataggcaaaccatctttatattctactccaaataattctccgattttagcgctcatctcatcagcatcaaattctatacttttatcattttctttttcaaactgtcttaaatactcttcctgatctttttcaatacctttacgtgttacttttatcgatccactagggaatttgaattcacccactgtaaaatcagtcaaaattttttttatttgttctttaaataaaaaaatgatgataagaaataaaactggaaaagaaaaattctgatacaaaaatttaacgaaactaaaaattgattttaatatctcataaatacactccaaaacttacctccaaaattttaattgacttttagattattacactaagaaatcattaatagtaaaaacatatatttattctaattactttattgacgttgatcctctgaacccttaacaaatccaaaacttgtcgaatggttggtttaataacttacgctatgccgacattcgtttcaatctgtttgataagttaaaatttcatatatagtcgtgaatttcaatgttctctttaaaacaaggatcgtgaaaatatgcctaaaaatcaaaactaaatgattcattagtctttaattattttctgttacttataggtgtgataaccttttgtgcttattattttttaggtgaagttaatgttaatatagatttataacgtttaaattgcatgttttaaattgtattttcatgtttgcatctctctttttttatttatctcttagtcaagatttaaaatcttaactaagagatttttgtattctttacataataaagtcttatgggtagttgaattgtatactctattcatttactgaattatatcaataattttattcatcttatctttatcacgtgatactacgcctacaactcttttataactttgtaattttttttgatataagttcatactttcaagtcttgtagtcaaagattgaggagtcaaagtaatacctttatttgctttgacattagctaatatagtttcataataatcaacataatcaatatgtaacttatctttcaaggaataatttttaagaagatcatatgtatcacatggcggtgtttgtatataaatattctcattttttaaagattttatacttacttggttagtgtttttaaacttattttcatcaccataagccacaataaagtcctcagtgtaaatttcttgtgtatagagcgagttattttttaaatgtgtaatatcaccaataacaacatctatattatctttataaatttcctcaagtaaaattgaagtactattttcaataactaaaacgacactttcattaatataattcttttcatgtagcttatataaagaaaagctaggtatgactcctaatttaattcttttatctttagactcacttattttactttttaattcttcaaattgctcgtttatttttaaaaacgaatgataaacagcatttcctttttgagttaaaaaaatacccttagaagttctataaaataactgacaatcaaaataatcttcaatacttctaattcttttacttaaggctggtgtacttatattcaattctctagaagctttatttaagctattgtactcgacaactttaatgaagtccttcatataattaaaattcataaaatcccccatggtattaactatttgtttatacccatattaatacattacttattcatatatttcaagtaaaggtttatccttctattgttcccaaaaataggcaactaatctcttaatgaatcaaaattgactgataggatgagataataatgaaaaaaatatggattttaactataggtatgtttgccttaggtatggatgcttatatagtagcaggattaataccttcaataagtaaaagttttaataaaagtagctctgctattgggcaaggagtaacagtttttacattgtttttctctatctctgcccccattttttcaacaatattagctaaatccccagttaaaaaaatactaataatagcattcagtatatttactttagccaatattataaccgcaatatctatgaactacatgctatatatcgtatcaagagcaatcgctggtttaggagctggcgtattctcaccaattgcaataagtgcaagcaatcatttagtctccgaaaagcataaaggaaaagcaatcgcttttacagtaggcggaatgagtgtaggaactgttataggagttcctctcggactagaaattgccaacatttctaattggcgatttgcaatgttggttattattgtcattagttttattgcattaataagcatatctatattgatgcctaaatttaaaatagaagctcctccaaatttaaaagatcgttttcaattatttttaaacaagcatgtactaagagttatttcggttacattatgcgctgccattgctagtttaggtttgtatacttatttagccgatattattaaaacaaatacagatacaaaaaatttaactcattaccttacagcgtggggaataggcggattaataggaagttttggtataggatttattatagatagatttaaaaatacaagatttgttatgctaattattttaattttactagcattaagttttggtttaattcctatttctattaacttgcctatattaggtttaattccctttattttatggggagctatgggatgggctacacaagctcctcaacaacatatattattgaaaaaacatcctgaatatggaggctctgctgtcgctttaaatagtt

SEQ ID NO: 3361 - DNA, 4039 bp, Artificial Sequence
  Description of Artificial Sequence: synthetic nucleic acid sequence
ttaattaattttatttatttaattaatattttgtaaaattaaatacaataatacatatttatgatatgtttttaaatgtaataaagtcaaataaaaggaggaaatttatgaaaaagttaatgatgagcttattatgttgcacaatatgtggaacagttttaactacaggaagtgtaaatgcacaaggtgatagctcaactaactctgagtcgttaaaggaacttcaaaatgaaggtattgtgtctaaatcaattactgaacaacaatggcaacaaatgaaagctcaagagcgtaaagatgaagcagaatttgagaaaacagctgaagtacaatggcagaaacaacaaaaacaagatcgaatagatcgagaaaatcgttcaagaaaaaagaaatttcatttgaaaaaaggtgattttttcatcacaaataacgtaagttcaaaagggtttacaggtcatgctgcaatatatactggaaaaggaaaagttaaagaagcgcctggatatggacaacctgtgagggtaaaaagttttagtgattggaaaaagagtactttgaaaaaaagaaaaggaagtcccaaacatcgttatatcaaggtttatcgagcaccaaaaaaatatagaggtaaagctggaaactatgcgaaatctcattttaacggtgtaccttacagtataacgacgaatccatattctaaaagcgttacatactgttcgaaacttgtttggcaatcgtattattatggtgccggacgattatcagttcttccggttgttacatctcaatttattattgagccatatagtctcaataaatatattccatcaaaagcagttaggtcttataaaagaagctaaaaaattaaggtgttaaatatataatttatacattttaattacccataatcgttaattatgttacttttctttgatttcatcgtttattagaacactttgataatacatcatttatgaacttcagtacatattatgtgataatcgaccattaaaaaatacgattaaatgattaaaagaacaataaaaaagcaagcgactaataatatgattattagtcgctttcaaactgtcaataagcgctcttttcagatactttatttatctaactctactgtttttatctttggtatttctggaagaaatgcatacttaatctttataaataatgaagctggctttccattgatatcaatacgataataacctatatgcccacttccttgattatcagattttccatctatagaaattttattttgcttttttaagaattgatacgttttattatctttagcaacctcttttaatttcttagtatcttcatgcttaacataattatttaattgcttttcacttgaatgacacgcccatgaatcaaaatagaaaaagtttacaaaaatataacaaattgctaaaaaaattattataccaataacatagaatacttttttcattaaagttcacctagttttcaaaaaaatttttataatttatgataacttaaaagtgtatattttttctacataatatatttaattttcaaggagatgtaaaaaagttgaaaaatttcgcaaaactaattttggtgggcattttagtatcggggtcagggatagcgagtgtacaaacaaatataactcacgcaaaagaaagtcacgattcaactcctcaaaatattaaattagtgggaacgtatgatacttctcaagttgattccaaaacgatgaaacaatttaaagaaatagaaaaagaagataataatttccacataactaaacatggaaataaagtcgttgtagaagacaaattacctaatccagagaataaaacttcaagttattcagctgatggtagtgctgaaaataatacaaaagtaattaatttctctgattttgttggtaatatggatgggaaagatgatggaaaaatatcggatgggataaccttttatagtggtaaatcatataacggacaacacgatggtcaaaaagtaaaaaaagggactcatgtacattgtaatagatttaacggaacaaaatctgatcatagatactggtcaaaaaaacatcctagagcttatgtagatttttataaaagtgattgctggtatcacgccaaagcttataaatgttcttccttgggaaaaatgactaaatgcgatggtttgaatagtatttatagaaaaggtgtcaaagattgctcatcatggaaaggtaaacccaaacataaaaactggcctaaaacagcatggtatagaaattaaaaaatgaataaaatcttaaaaatattaataacttctattattgttatcattattaccttaacagtttggacttttagtgtgattacttatcagaaacacaagagtgagaaaatcatcaatcacgttatagaacgtaagggttgggataaaaaaataaaaaatgaaaaaatgagttttaatattataatgggatatgctgaaaaagatattgtttttaaagatcaaccatatagtgagtatgagtataacgtgacaccagcaccatggacagatgataaagaatataaggtgtggggggaaacagatttacaaaagaaagactcctattataaatatcttttagaatcagaaccttacagaaaataatataaatgtataacataataaaaaatagagatcattcatggacttctagtaagattcaaggtagaaatacagatggtggattagaatggtcaccagatcataaatcacttatttataaatatgatgcaacattaggtagacaaataaatactaatgacgtgttaactttacttcaagcaacagctaaaaactcaaatttacgttcaaatatcaatagtaatgaaaaacagttagcagaacgagggtctaatgggtattctaaatctataattagagatgatggcgagaaatcttatttacttaactcaaatcctattcaagtattagacttagtagaaccagataatggttacggtggacgtcaagtcagtcattctaacgttatatataatgaaaaaaattcttctatcgtaaatggtcaagttccagaagctaatggggcatccgcttttaatattgataaagttgttaaagctaatgcggcaaataatggtattatgggtgttatctataaggcacaattatacttagcaccatacagtccaaaaggttacattgaaaaattaggccaaaatttaagcaataccaataacgtgattaatgtttattttgtgccttctgataaagtaaatcctagtataactgtaggtaattacgaccatcatacggtatattctggtgaaacatttaaaaatactatcaatgtaaatgataattatggattaaatacagtagcttctacaagtgatagtgcaattactatgaccagaaacaacaacgagttagtaggtcaggctcctaatgttactaatagcacaaataaaattgtaaaagttaaagccacagataaaagtggaaatgaaagtattgtttctttcacagtaaatataaaaccattaaacgagaaatatagaataacaacttcatcaagtaatcaaacaccagtgagaattagtaatattcaaaacaatgctaacctttcaattgaagatcaaaatagagtaaaatcttcactcagcatgactaaaattttaggtacaagaaattatgtcaatgagtcaaataatgacgttcgtagtcaggttgtaagtaaagtaaatagaagtgggaacaatgctacagttaatgttacaactacattttctgatggtacaactaatacaataaccgttccagttaaacatgtgttattagaagttgtacctactactagaacaacagtaagaggacaacaatttccaaccggcaaaggaacttccccaaatgatttctttagtttaagaacgggaggtccagttgatgcgagaatagtttgggttaataatcagggacccgatataaatagtaatcaaattggtagagatttaacattacacgctgaaatattctttga

SEQ ID NO: 3362 - DNA, 1166 bp, Artificial Sequence
  Description of Artificial Sequence: synthetic nucleic acid sequence
ggtgcgatatatactttatttcaaccatatttaaatactatgatgcactattggttaatcaaataagattattatgagaaaaataacaattaaaattacgtatacataaggagcgttatcatgttagacaaaaatcaattggaaaagtataaccaagagcatttgtatgaatatgaaaaattaatgagtagtaatgaaaagaatgctttagatgaaaaagtagatcagttaaatcttgcagaaattcaagatttatatcaagatttatatgttaatagaaaaactattgatgatgtatcttctgtatctgaagtcaaatatgaagtgaaatcacgactcaatgaagaagaacgacatacatatgaacaaaaaggttatgaggcaatacgaaatggtgaatttgctgtattattgatggctggaggacaaggtacgcgtttaggatataaagggcctaaaggttcttttgaaatagagggtacgagtttatttgaacttcaggcgcgtcaactgattcgtttaaaagaagaaaccggccacacaattaattggtatattatgacaagtgacattaatcataaagatacaatagagtattttaaacaacataaatattttaactatgatgccaatcatattcatttctttaagcaagataacattgttgctttaagtgaagaaggaaagcttgttttaaatagagatggacatataatggaaacacctaatggtaatgggggtgtattcaagtctcttaagaaagcaggataccttgataagatgcaacaagatcacgtcaaatatatcttcttaaataacattgataatgtcttagttaaagttttagacccgttatttgccggttttacagtgacacaaagtaaagacatcacatcaaaaacaattcaacctaaagatagtgaaagtgtaggtcggcttgtaaatgttgattgtaaagacactgtgttagagtattctgaattaatgtcatatttccaggagctgcactccagttcatttctgaaactaaaatacttccatcgctattcacgcgctctacaaacgctacgtgaccatagtaaccagcgtcagtttgtgcaattgagcctactgtaggacgataatcaatagtatatccatcagcagctgatgcattgtcccaatta

SEQ ID NO: 3363 - DNA, 3383 bp, Artificial Sequence
  Description of Artificial Sequence: synthetic nucleic acid sequence
ttacctccatttaagattcaaagtgatatgtccaaaatggctctatttttaagaaactttgtgcttgaccatctatttcgggactagcaagttgttttaaaaatggtcctgtttgtgaagcatgtgcttcaaaagctttaagttttatatcactatattgagatatgtcattttgaatatcaggttctccaagaatttctgatgcatcattgctaaacgctacaagtgtaagacggggtcgatctgattcatgcatgcgtccaactgtacgtactacagcttctgcagttgcctcgtgatcagggtgaactgcaaatttaggatagaacgaaataattaatgatggatttgtttcgtcaataagtgattgaatcatttgatccatttgatcgtaaggttcaaattcaacagttttatctcttaaccccattttccttaaatctgtaatcccaattgctttgcatgcttcttctaactcacgttcacgtataaatggtaaagattctcttgttgcaaaaggagggttacctagattacgtcccatttgtcctagggtaagacatgcatatgtgacgggaatacctttttcaatataacttgcgatagttccagcagacgaaaaagtttcatcatcaggatgggggaaaatcacaagtacgtgtctttcatcagtcatgattggcaacctcctttatatagtaaatggctgtttacttatttctattgtagcagccaattgtccttcataattaaaacctgcaattaaaaattcgttattctcattaacttcatagtgcgtaagtccttgcacgtaaacccagccaccatcttttaatttaagacctacacgatatggatctttgtcgccgcctttaagttgtgcatgttcaaaagtcacgacaatatttcttaaaaatgttccagcgttaaatacgcgttgatcgaaatgatttgcataagcaccatttgttgtttcaacgtgtaggtaaacaggctgatttgagtaagaagttaataaatctagcacttcttgttctttaattggttccaacacgttcactcccttaaactaaacaatatgtcagtgacggactaccgataaacatattatttaccagcaaactcgtttatctatctattttactagaaagctatgtatatttgtacacgaatgctcgatttaattaggaaaaattcaagaaataacgttgaatattacatatagagcgttaatatgtttaaaatcttaatcatttgttacagtataatttaagagatataaaagagtaaggcgttagtcatcaatcattgtgatattgaaattagaggtgtttgatattgaaaattattaatttagattcaaaaaatcttgcgtcattttatgtagcatgcgagttgtttaaacaaatacagcagcaccctcatgccaaactcggtttagcaactggtggaactatgactgacgtatatcattacttagtaaatttattaatcaaaaataaagttgatgtgtcgcaggttgaaacatttaatttaaatgaatatgtaggtttaaaagcaagtcatcaacaaagttaccatacctacatgaataaagtgctatttgagcaatatcctcattttgttaaaaatcacattcatattcctgatggcttatcagaaaatctagaagcagaagcggaacgatataacaatttattagatgaaagagggccaatcgatattcaaattttaggaattggagaaaatggtcacattggttttaatgaaccagggactgacttcaatagtgaaacacatgtggtgaacttaacagaaagcaccataaaagcaaatagtcgattttttgacaatgaaaaggatgttcctagacaagcagtttcaatgggggtaaaaagtattttaaaagcaaaaaggattatcctactcgcatttggtccaaagaaaaaagaggctataagtaaactgttaaatgaacaggttaccgaagatgtacctgcgaccattttacacacacaccctaatgttgaagtttatgtagacgatgaagcagcgccagattgtttataattatatagttgttttatatacaaaatattttatatgtttaataagtttagcgaagggtatacaactataagcaaaagagaatttcccaaaacgaaaggatgaatttcattggaactacaattagccattgatttattaaataaagaagaagcagcaaaattagctcaaaaagttgaagaatatgtagatattgttgaaattggtacgccaattgtaattaatgaagggttacctgcagttcaacatttaaatgaaaatattaataatgctaaagtattagctgacttgaaaattatggatgcagcagattacgaagtgagccaagcagtaaaatatggtgcagatattgttacaattttaggtgttgctgaagatgcttcaattaaagcagcagttgaagaagcgcataaacatggaaaagcattgcttgttgatatgatagcagtgcaaaacttagaacaacgtgctaaagaactagatgagatgggtgcagactatatcgcagttcatacaggttacgacttacaagctgaaggaaaatctccattagacagcttgcgtacagttaaatctgttatcaaaaactctaaggttgcagtagcaggtggtattaaaccagatactatcaaagatattgttgctgaagatccagatttagttattgttggtggcggtattgcgaatgctgacgatcctgtagaagcagcaaaacaatgtagagcagctattgaaggtaaataagatgagtgaatttaataattatcgtcttattcttgaagagttagattctactttatctcaagtagataatacagagtatgaacgttttgctaatgatgttataggtgcagatcgcatatttacagctggtaaaggtcgttcaggttttgttgctaatagttttgcaatgcgcttaaatcaattaggtaaaaatgcctacgttgtaggtgagtcaacaacaccttcaattaaagaacatgatttgtttattattatttcaggttcaggttctacagaacatttaagattattagctgaaaaagcacaatctgagggtgcaaaaattgtcttattaactacaaatgcggaatcgccaatcggtaatcttgcagagacggttgttgaattgcctgcaggtactaaacatgatgttgagggttcgaaacaaccacttggtagtttatttgaacaggcttcacttatattcttagatagtgttgtattacctttaatggatgcatttcacattagtgaaaaaacaatgcaagagaatcatgctaatttagaataactagaatgagagatgagcactt

SEQ ID NO: 3364 - DNA, 3086 bp, Artificial Sequence
  Description of Artificial Sequence: synthetic nucleic acid sequence
agtatcagaattgtcattagatgtgtcgtcattaccacatgcgcctaaaattaaagcactactaaaaattaagactaaaaactttttcatatgtaattctcctttactatatatctttatattcaaacactcgtaacggctcaaattgaataacgtatttgctataccgagtggaataaccatatttttgtttataatgttcaatactttgtaggacaaaaccttctgtaacctcaaaaaaattagcaagttcatacaagtcatgaatgccttgcaaaaatgcttttacaatatctttaagagggattaacttttcataggctaacctacgtgcataaccttcaaattttctatgattaaaactactttgatcaactatatttccatatgtaagttcgttatgagcgagttcctctgcaagtgtttcaagtttggaagtaataggcaagttacgattaattaaaatcatatctccaagccacaaaccagataaccttttaggtaagttatcacattcaatgacttcaatatagtcatgttcaattaacatatcttcatatttccccacataaaacaccctttattttcttttacttcttatgtattcagcgtaatcaagaatttcttgccattcttcgtcagttaaatcaccatcaagatgcgctgcacgatgttgtggttgttcctcaacttcttctatccaacccatcaagaaagcagggttaacatttaatgcagtagctatactttcaatagtatcatttttaagatttttaatattcccgctttcataacgttgtacagtagcttcagttttaccgatttttcttcctagttcagctaaagtcataccttgtttttctcttgattgtttcattctttttgaaaagcacatcgtaatacagctccttttactttataactatattataaggaaaactttcgtgatttgcaatattttttcttaaaaactttcgtaaaatgcttgacctattttgtacagccatgataagattacttacgtaatacgaaaggtggtgaaatgaaatgcctatcgacactaaacttttaaaatcaaaaatggctttaaaaggacacaacatcaaaactctttctgaagaaataggtgttaatagagatacattgtccaatatgatacacggaagaactaaaccttcatatccagtaataaatggaatttatttcgcgttagatttaacacctcaagaaggaagagatattttttttaacaaagacttacgcaaaaagaaagttttaacttaaaggaggaattcaaatgactgaaaacaaggtattatacagggtttttgtaaaagaaacaaagaatagtggatatacattagtttttgaaagtttagaagaagtcgcagctaatataaaaaatgcagaagaatttgacgaaattataataagcccctcaaaaagagaggctcaagattaacgatactaaagataatcttttaaatgttgtgaactgcaaattacattagaccatgcggcttcaccagtcagcttaccaacgaacaaactatcatcgctatcaataaacatttttaattcgtttctaatagttttagcatcattagttgaattaataaaccaaactgatttattgattttagcaacattaggataatcctcaatacgctctattaattttggataatccttttggttatttaaatcatacgcaataataaaacttttcatattttcacctccttttataaggagtatagcagaaaggagcataaacaatatgcaagatttacaagtatttaattttgaagatttaccagtaagaaaaatagaagtagatggagaaccatattttttaggtaaagacgtggcagaaatattaggttacacaagatctgataatgcaattagaaatcatgttgatgatgaagataagctgacgcaccaagttagtgcatcaggtcaaaaacgaaacatggtaatcatcaacgaatctggtttatacagcttaatctttgacgctgctaaacaaagtaaaaacgaaagtattagaaagaaagctaaacgttttaaacgttgggtaaccgaagatgttttaccttccattcgtaaaacaggtacttatcaagttcctgataatccaatggacgcattgcaacttatgttcgacgcacaaaaacaaaccaaagaagaaatagcaactgttaaagcagatgttattgatatcaaagaaaatcaaaagctagatgcaggagaatacggattgataacaaaaacagttcatcaacgcgttgcttatatcagacaaattcacggactacctaataataaagaagttaacaaacctttatatagagatattaacagtaacgtaaatacgatggctggtattaaaacaagaacacaattaaaacaaaaacatttcgatgacgtaatgaatatgatcacaaattggtttccatctcaatcaacaatgtatgtcatcaaacaattagaaatggactttgaaaacgaagtataaggagtgatagcaatggaatacattggatttgcggacgctatcgagtttgtgaaaataagtggaatttctaaaaacgatttagaaaagcacgtttatagcaataaagagttccaagagaaatgtatgtacagatttggcaagaatcataaacgctacatcaagattagaccggcaattgactttatagaacaaaatttaatggtgtcagaaacgtcactttagaggagttttactgaagaaagaggatatatcgaaaaacttttagaaatgaaaggagagaatgataaatgaaatatctattaagttacatgacgatgtttatcgcaatgatcatcacattacttttaggaggtggtttctttacggtaatagcattttcaatgttaacacttatctttagcacattcttctgggaaaagtggcttgagataacaaaaaagactgaaacttgcgccaacaagtaacagtcagaatctaatcaaaatatacaacttaatttaatcaaaatatacggaggtagtcaagttgagacacaaattattaaaaacggccaatgatttaaata

SEQ ID NO: 3365 - DNA, 3394 bp, Artificial Sequence
  Description of Artificial Sequence: synthetic nucleic acid sequence
tctatttctttaaaaatgtttgtttctaaagattttagcgcacgttttttagtacgtactttttcgtgtggatgtattttaccatcttcttcaaaacgcaagacaggtttcattttcaataatgtacctacccaagcttgagctccagtgatacgaccacttttttgtaaattttttaaatcatcaacaattaagtatgcaccaatatgttgtcttatttcagttagttcattaataatatcatcaggtttatatcccttttgtaccaattgagcagcgtaaattgcaaagctaccttcaatcatcgcagcaagacggctatcaaacgtatgtacttgaatatcttcaaccatttcaccagcttgtgttgctgaaggatagcttccgcttataccacttgataagttaatcacgatgacatcagtgtatccttgttctcttaatctctcaaaattttcaatccaatcgccaatagcaggttggcttgttgttggtatagttttagatgaagccatttttttataaaaatcatctacagaaaaatcatcactctcagtgaaattcactccatcatcgaaagttacacttagtgaagcgactggtatgttatattgttctattatatgttgtggtaaataacttgtagaatcggtcataactgcaatcttcatcttaatacttatcctcctcaattatactcatagttatgatacaataattttttaaaaaagaaaatatcatcgtaataatttagaacctatcttgttacgtgtataataatgttagaaaactgaattgtaggtggcaaaaataagatggataaatccataattactattaaacaagcacattcaattgaaaatgtgataagtaaatcacgctttatagcatatattaagcctgtttcgactgaaaatgaagcaaaagcttttatagatgaaattaaaacaaaacataaagatgcaactcataattgttcagcctatactgtcggaccagagatgaatattcaaaaggcaaacgacgatggcgaaccaagtggaacagctggcatcccaatgcttgaaatactgaaaaaacaagagatacacaatgtttgtgtcgtcgtgacacgctacttcggtggtatcaagttaggtgcaggcggtcttattagagcatatagcggcgccgtgcgtgatgtgatatatgatataggtagagtcgaactaagagaagctattccagtaaccgttacgttagattatgatcagacaggtaaatttgaatatgaacttgcctctactacattcttattaagagaacaattttataccgataaagtaagttatcaaattgacgtagtaaaaaatgaatatgatgcttttatagactttttaaatcgaattacttctggaaattatgatttgaaacaagaagaccttaaactattaccttttgatattgaaaccaattaaataaaaaacactatgcaagttaaagcaacgcgtgcttatgacctacatagtgtttttttattatgaacggtgatgctcatcataatgatgttgcttaccatttcctttttttgtaattaaatttaatattggtcgataattatcatctattaatccagtaaattcaacgatcaactcaatcgtaaagacaatgagaatgaacatcataagtgcacccaacggttgggataaatagaggataacactagataaactaaacataatcgctattgaataaataagtaaaacggtttgtctatgcgtatatcctaaagcaagtaatttatgatgtaaatgtgacttgtccgcttgcattatatgttgcccttttttcattcgacgaatcattgcaaataatgtatcaataaatggcaccgctaatataactataggaaagaataatgcaataaatgtgatattcttaaagccgagtaaggataagaaaccgataataaatcctatcattaatgcaccactatcacctaggaaaattttcgctgggtgaaagttatagaataagaaaccaagtaaagaccctaaaagtacacagcaaatcatgataataaatatgttcgcttgtaaaatagcgatgaatccaatagtcattaatgccaatgctgagacgcctgaggcaagtccatcaagtccgtcgataagattaatagcattggtaattgctacaatccatattactgtaataggaatgctgaatatgccaaaatgaatcgttggaccaattggcaatgaaataaagtctattgtaattccataaaacgtaacaattaaagctgcaacaatttgacctgctaactttaaataaggtcttagatcgtaaatatcatcaatcaatccaaccatatacattgtaattgcacctaatataagcggtttaacctcacgttcaatagggtgtccgagccaaatccctattaagaaagaaaataaaatgaccgttcctcccatcactgagataggtttcgtatgtacttttctgaaattaggacgatctactaaatctaatttttttgatattacaataataatgggtgtaattattaaactgactatcatagtaaaagctataagtaatagtgtatacatcagttcaccttcattgaataagttgtacctcacgctaccactgttttgtgatttgctttcacttttagttctttcacctgaagatttttgactattttcaacatcatcttttcttaaaacatcattgccttttccggatacttcgcttaaatcaacgccatttttacgcgcatgtcgacgtgcagatggtgttgcattgatacgttgctggctattatcttgtgtattttcactttcactagaattcggatttgattgttttggcgtttctttctctttagcttcatctttttgtgaattttattatctttagcaacctcttttaatttcttagtatcttcatgcttaacataattatttaattgcttttcacttgaatgacacgcccatgaatcaaaatagaaaaagtttacaaaaatataacaaattgctaaaaaaattattataccaataacatagaatacttttttcattaaagttcacctagttttcaaaaaaatttttataatttatgataacttaaaagtgtatattttttctacataatatatttaattttcaaggagatgtaaaaaagttgaaaaatttcgcaaaactaattttggtgggcattttagtatcggggtcagggatagcgagtgtacaaacaaatataactcacgcaaaagaaagtcacgattcaactcctcaaaatattaaattagtgggaacgtatgatacttctcaagttgattccaaaacgatgaaacaatttaaagaaatagaaaaagaagataataatttccacataactaaac

SEQ ID NO: 3366 - DNA, 3335 bp, Artificial Sequence
  Description of Artificial Sequence: synthetic nucleic acid sequence
gggagtgggcatttatgattcaaataaaaggagcagtcgatttccctatttcattggatagtacgacttggatatttgacgatagaaaagttactattgatgatttagaacgtggggtatttgatggtactagacccatcaactttgatgataacaaggaatggaaccgtgctattttagaaggacaaacaaatccaccaacgcttgattctgaaattaaatataaaaaacgatcggttttagatgaaacatttgtgataaatatgacaccatttttcaaaaacgccgaacctatggaaaatgctagcacaataaaactttctaataaagattattccatcaatgtacccatggacttattaccttatttgttctttcaattttctagtaatggcaaacgtttatatagtgataatgctgttgatagtttcatatatattcctgaagaaggatactctcatcaatttaagtatgtcacacatatagaggtgatttaatatgagaaaggttcaatgtattatttgcgatactaaagtttttattgatgaacatacagtcgaggctaaacgcttaaaaaataatcctatacgcactttcatgtgcgatgattgtaaaagtagactcgatacacctaaacaaagcaaacgagattaaaatgatatattggaaatttcaaactatctcacataaataaagagtgtgggacttaaagttccaagataaataaaaaagacaatttctattgaaattatatagaaattgtcttttttattatttttttgattattttcagctcgttgagctgttacttttcttatattaagtgccattagcacaaatcctagttctcttttgactttatttatccctcgaacggacattcgagtaaaacccaaaatagccttcataaatccaaaaacaggctccacatcaatttttcttgactgtagatgctttttgtttttggttctgaaaactttttaataatttggactttaaaatattcccaattataatttttcattatttttttatttgcttttgaatcgattaattgttatataagaaggcttttgattttatgatagacacatcattcgaatattatcattaagtattttttctatctacgtcctgaaaacacagattgggtataggcatataaaactacttttaacattatttttggatggtatgatattgcatcacgatgatgtctgaattcagtctctagaattgtttctacaatatcatttacatgtcgtgaaatatcatttgtggggataagaactgaagtttccattggtagagtaagttgagtcatgttataatctttatacataaggcacctcgttaatttagtttagtgatgtttattaaattatacgaaagggccttatttttttaaagtattttaatgtaaaattacatatgaatacaaagtattttggcgagactcttgagggaacaggacaagctgaagactacaggctgaagctgtcctctaagaaagcgagccaacaatacgaagtattgtaaataaagaagccagtaaatgaatttatgaaaactcatttactggctattttgctaggaattatgtctcaggctctttcctacgattagtcaagtacttataattaaaataagcattacttaactaaaccgttcattttaatttttttgaataaggtgttaaactatatttgattgtacgtttggctaatgtggtgacatttgataatcgtacaatttatgattcattacaagataatgaattgtttttaataatcgatttatacaagcaatgatggcagtcttatgaggtttctcattaggctgctttcttagtttgtagtaataatcgacgacatgattgtcataatgatgctgccctcttattatattcataatcacccaaaataaaagttttctcgcttttttattaccacgcttgttgatggtatctctacagtgtgtatgacctgattgatatcgtttgatatcaatgccaacaaaagcattgagttgtttatttgatttaaatcgcttaatatcaccaatctccccaataatcatagctgtgcttagcttaccaataccaggtatcgaatgaatattttcaaaataatcgagttgttgtgctaattgaatcatggcatcatctaattgtttgagatgatgaatagattgttttaattgttgaataagtaagcgtaatttttcgactagaaaggaatgtctatcgacattaggatagctttcttgagcaatcacccttaattgaagtgcatattttgtagctttatccattgacattcccttatctgtagaattgaatatatgtgtaatcagtacctccttgtcgatatcaagaaccatgtctgaatgagtaaagatttctgcgatgttgagtgcaatgattgaatatcgactactaaacaatctttctaaaccagggaatgtttgatggagtaattcaaggatctgaaatttaagtcgattttgttcattctcgatttctagatgaaaacggacgcgttctcttaattcaaagaatattaactcatgtataggtaagctgtctgtttgtttaagcgtcggtcctaaacaagcaagcttatgagcatctgcctgatcagttttccatgatcttagagcgctcgttttaaatttggcttctaacggattcatttgaatatagttaatttgatttacacaacaaaatcgttccatacctcttgaatagatacctgtagattcaaaaatgagttgtgggtggtctaagtcattcaaatacttgagtaaataattgtaaccatttttattattctggatgaaaaactctttttggaattttccatttttataatgtgcaactacactacttcttttactaatatcaacacctaagtaatcgataaaaaaacctcctttgaataattgagaagctaaaaactttacttaacctttctcatttcattttcctatacacggtttcaagaacccaacatactacaaacgaatttcaaaaggcgagagtaaagctgacttgttttttatacggatttaaaatccaagagtctggacagtctacttctctctataactataaaaaatagctatgaaaaaatctatcgtcatagatttcttcatagctaatcttagtatgtttgtaatatatttaaattattgttcgtcttgcattaattgtttaactctttttgcttctttttcacgggcagatttattaagtattttctttcttaagcgaatactttcaggagttacttccaccaattcatcatcattgataaattgtaacgcttcttcta

SEQ ID NO: 3367 - DNA, 3818 bp, Artificial Sequence
  Description of Artificial Sequence: synthetic nucleic acid sequence
ctaaaaaataaattgtatataacttactttgaaattgatcgaatatatagtatctttaataaaatgcagatattgtggcgtagaatttgagaatcaaaaaatgattaatatagtttgaagaaactgagcataagtactagaaaaatagccagtaaatgagtttattatgaattcatttactggcttctttaaataatgatttagacagtttgcttttctagaactactttgaaatgcgttattttctttaagaatattaatatataacttgtgttgctaatgctaaccttggtcagagtgtattgtcatgcgatagttaagatgagatcttttaattaaaaccttgttttaaacatcgatgacaaggtctaatgtaggaggtgtagaaataattttcagaatgatataaataaatccataaatgaagataaatcgaaactatttataccgtaggggggtatatgttatggtataagtaactttactatcacgttttcattgggaggggttaatttgaataataatggtgaagagcataatcatcaaaatcacatgaatcattccaatcacatgcatcatgataaccatgcctcacatcatcatagtggccatgcacatcatcatggaaattttaaagttaagttttttgtttcattaatttttgcaatacctatcattctcttatcgccaatgatgggtgttaacttaccttttcaattcacatttccaggttctgaatgggtagtgttaatattaagtacaattttattcttttatggtggtaaaccgttcttgtctggtggtaaagatgaaattgctacaaaaaaaccaggcatgatgaccttagttgctctaggtatttcagtagcttatatttatagcttgtatgctttttatatgaataactttagtagtgcaactggtcatacaatggactttttttgggaattagcaaccttaattttaattatgctattaggacattggatagaaatgaatgctgtcggaaatgctggagatgctttaaagaaaatggcagaactattacctaatagtgctattaaagttatggataatggccaacgcgaagaagttaaaatatcagacatcatgactgatgatatcgtcgaagtaaaagccggagaaagcattccaacagatggtattatcgttcaaggacaaacatctatagatgaatccctagtcactggagaatctaaaaaagtacaaaaaaatcaaaatgacaacgtcatcgggggttctattaatgggtctggaacaatacaagtcaaggttacagctgttggagaagatggatatctttctcaagttatgggacttgttaatcaagcacaaaatgataaatctagtgctgaattgttatctgataaagtagcgggttatttattctactttgctgtaagtgttggcgtgatttcttttattgtctggatgctcattcaaaatgatgttgattttgcattagaacgtcttgtaactgtgttagtcattgcttgtccacatgctttaggcttggcaatacctttagtcactgcacgttctacttcaattggtgcacataatggtttaattattaaaaatagagagtctgtagaaatagctcaacatatcgattatgtaatgatggataaaactggtactttaactgagggtaacttttctgtgaatcattatgagagctttaaaaatgatttgagtaatgatacaatattaagccttttcgcctcattagaaagtcaatctaatcacccattagctataagtattgttgattttgcgaaaagtaaaaatgtttcatttactaatccacaagacgttaataatattccaggtgtcggattagaaggtctaattgataataaaacatataaaataacaaatgtctcttatcttgataaacataaacttaattatgacgatgacttgtttactaaattagctcaacaaggtaattcaatcagttatttaattgaggatcaacaagtcattggcatgattgctcaaggagatcaaattaaagaaagctcaaaacaaatgatagctgatttactatcaagaaatattacaccagtcatgcttacaggtgacaataatgaagtggcacacgctgtcgcaaaagaattaggtattagtgatgttcacgcacaactcatgccagaagataaggaaagcattataaaagattatcaaagtgacggtaataaagtcatgatggtcggagacggtatcaacgatgcgccgagtcttataagagccgatattggtatagcaattggtgcaggcacagatgttgcagtggattcaggtgatatcatacttgttaaaagtaatccatcagatatcattcatttcttgactctttcaaataatactatgagaaaaatggtgcaaaacttatggtggggtgcaggttataatattgttgctgtacctttagcagctggcgcattagcttttatcgggttaatattatcaccagctgtaggagcaatattaatgtctttaagtacagttatagtagcgattaatgcttttacattaaaattaaaataaaagaggtaaaccttatgtataataaagtttttgcaattttaattataattttttccataataattattgcgtctaatgatactttcgcagaaagtaagaatgatatgatgaatatgaaagaagataagaaaaatacaatggatatgacaaatatgaaacatcatgacgaaagaaagaaattaaattcttcacaaggaaaaaatgaaataatatttcctaaagttgcagagtcaaaaaaagataacaatggttataaaaattatacattaaaagctcaggaaggaaagacagagttttacaaaaataatttttctaatactctaggctacaatggaaatttacttggaccaactttaaaattaaaaaaaggagataaagttaaaattaagttaataaataacttagatgaaaatacaacatttcattggcatggattagaagtaaatggaaaagtggatggagggccttctcaggttataaaaccaggaaaagaaaaaactataaaatttgaggttaatcaagattctgctacgttatggtatcacccccacccctctccaaatacagctaaacaagtttataatggcttatcaggattattatatatagaagatagtaaaaagaataattatcctagtgattatggaaaaaatgatttgcctataataatccaagataaaacatttgtatctaaaaaattaaattattcaaaaacgaaagacgaagatggcactcaaggtgatactgttcttgtgaacggaatagtaaaccccaaactgacaacaaaagaagagaaaatacgtttgagacttttaaatggttctaatgctcgagatttaaatcttaagctaagtaataatcaaagttttgagtatattgcttcagatggcggtcaattaaaaaacgctaaaaaattaaaagaaattaatttagctccttcagaaagaaaagaaatagtaatagatttatctaaaatgaaaggcgagaaaatcagtctggttgataatgataaaactgtaattttaccgattagtaacaaagagaaaagttctaacaaaggtaatacaccaaaagtaagtaaaaaaataaaattagaaggtatgaatgataatgttaccattaatggtaataaattcgatcctaaaagaatagattttacacaaaagttaaaccagaaagaagtatgggaaattgaaaacgtcaaagataaaatgggtggtatgaaacatcctttccacatccat

SEQ ID NO: 3368 - DNA, 3345 bp, Artificial Sequence
  Description of Artificial Sequence: synthetic nucleic acid sequence
tgataaattagtggttagctatattttttactttgcaacagaaccgttttttgtatatagtcttataggaattgctatattttttgtgccggtaacgattaataataactcttcaattttattagatcattttgtcacatggataagtagcgcattacctcttttaactaagatattcataatgattatcattatactaggtgctatttatccatttattaaagggacatggaatcggaataccgttgaaacaatttttagtttatttaaagttttgggagtcattataggcgttttgttaatttttaacattgggccaagttggttacttaatgaacaaacgggaatgtatgtttttaactatttggtaattccggtaggattaacagtacctgcaggaggcgcggtattagctttattagtaggatatggcttattagaatttgtaggtgtttatgcgcaaaaaattatgtacccgatatggaaaacgcctggacgttcagcagttaatgctttagcatcttttgttgctagttttgctgtgggtttacttataacgaataaagagtataaagaaggtaaattcacggaaaaacaagctgttatcatagcaaccggcttttctacagttactgtagcttttatgatagttattgctaaaaccttacacttaatggatatatggaatttatatttttggtctaccttgtttgttactgctgcagtaacagcttgtacagttaggatttggcctatcagtaaaattagcaacacatattatgatcagccatttatagaagaagatacaagcgaattaaaaggttaaaaaaagctactttttgcatgggaaaaagcaatggaaactgttgaatcatcacctaacgtgatgaaaaatatttggttgaatttcaaagaaagtctgattatgactatgaatatcttacccaccatattatcaataggtttaatttgcttgttactcgcagaatatacagtgattttcgattatttagcatatgttttttatccattaacttggatacttcaaataccagattcctttttaactgcaaaaggcgcagctattggtataacagaaatgtttttgccttcattaattgtagtcgaagcaccattaatcactaaatttataattgctgttacttctgtttctacaattatattcttttcagctagtgtgcctagtattctctctactgatatacccatccgcataagagatttagtggttatatggtttgagagaactgtattgagtttaattatagtaacacctatcgcatatatttttttataattcaataataaaatatcgtatataaaaaaatcaccttttttacaaatatttatagtgataaggaaagcaaggatatgaaatttccatcttaatttactgttttttattttaaactcaattatatatttagggtacaccctaatcatacaaaatgaattgttgaaattacagcaattaaaatgtatgattagggtgtatattaattatgaggtgaaactaaatgattgtgggctatgcgcgggtatcatcagtagatcaaaatttagaaagacaacttgaaaatttaaaaacatttggtgctgaaaaaatttttacagaaaaacaatcaggtcaatctatagaaaacagacccgtctttcaagaagcattgaactttgtgagaatgggagatcgttttgtcgtggaatcaattgatcgtttaggtcgtaattatgatgaagtcattaataccgttaattatcttaaagagaaagaagtacaattgatgattaccagtctaccaatgatgaatgaagtcattggtaatccattattagataaatttatgaaagatttaattatacagatattagcaatggtttcagaacaagaaagaaatgaaagtaaacgtcgacaagctcaagggattcaagttgcgaaagagaaaggcgtatataaaggacgacctttattatattctcccaatgcgaaagatcctcaaaaacgtgttatctatcatcgtgttgtagaaatgttagaggaaggcaaagcgattagtaaaattgcgaaagaagtgaatattacaagacaaactgtttatagaattaaacacgataacgatgatttgggttctgttgcaaagtaaaaaaatatagctaaccactaatttatcatgtcagtgttcgcttaacttgctagcatgatgctaatttcgtggcatggcgaaaatccgtagatctgaagagacctgcggttctttttatatagagcgtaaatacattcaataccttttaacttcgaaatgtttttttatttcttcggcaaaatattggggtgttaaaatattcggaggcatttgacttagttcacgagcataatttatagattcacccaattgttggccttcgttaatcttcgtttctatattatgctctgtcgtttgtatatagactctaccttgatatggaggctttttatccgatttataatggtcaaattcaaagatagattgtgcactttgtaaacctaaagtttgacaaatttcaacaatgttaccatgtttagatttgaaagtatctaacaataattcacaatccgtgacatgaacgtcttttaaatattgaaacaactgaccccaaacttttaataaacgttgatatgataagatttttaagtttcctagtcctacagttaataatcttttaggcttttcatcaatgtagataagcgttgatgatattttgccgattgagctattgatgacatgatattgttttaatgtttctaatcgttctttaattaacgtcttatgatattttatctcacctaattggttgaggtgatctggcacacccaccacaatcgtttcaattgatgttggcgtatcttgattaataaaaaattgcatatagatcctccgttcctcattctgtataacaataattataagttatgaacaccccaatattaaacaaaaccactttttactctaactctaaataaaaaccacttttgtttaattaagtgtgaaattcttcttcatcatatttttctgataaaaaataacctgggacaatcattttgtcccaggtattattaaaatataaacaatcgatgacaaaattaatttgagttgtttacatattttaactctagtcatctttgctaagggagacaacaaattatgtctcgtacctttttattgtttttttatatctattacttgattaaaattttccttttttaaaggctaatcctatgccaccaagtttgtaaatcgcacgagtatcaataactttcttcaagaatgctgcttttttaccagcgat

SEQ ID NO: 3369 - DNA, 3148 bp, Artificial Sequence
  Description of Artificial Sequence: synthetic nucleic acid sequence
caatatgttcgagtaatgacttgcgcgcatcgtcttgctgtttcaaatattcaaataaaaagccagtccatacccaaattgtttttgtattaagagcactacaaggcgtatttgctgcatcattttctcctgtagtcatgacttatacaactgaaacttatccacgtgtgaaacgtgtaacagcaattagtttcatcagtacaagttttatgttatcaggtgtgttagggcaaaatatgagtgaattagtcgtaagttatttgaattggcagtgggtatattttattttaacaatcttatatttaattctcgtattagttatttataaaaatgtacctgagagtccacataaaaatcctgatattcaactcattaagtttttcaataactttaaagatttcaaagacaatcttaaagttttctattgtttatttatttcactaacattactgattatgtttataagtatgtatgatattttaaatgaatatgtcacatcacaccaagttgggggagacatgtctgtgtcctcaatgatgaaattgttcggtgtgataggcatagaaactaaagtaatcatttttatttaaaagtagattttaatttttatatacatattagcgttgtggaataggtggaaagggggagtcaaaaggtgaaaacgctaatgattaaagcaatggggacggtgatacgtttatcgattgagcatcaacatccggatacattacttcaagaagctgaaataaaaattcgtgcttgggaatcacaatttagtgctaatgatccgaaatcagatttgatgaatgtgaatcagcatgcaggtatcgcaccagtcaaggttagttctgagatgtttaacatgatacgttttggttacgaaactacattatcttctaattttaagatgaacattttgatagggccactagtcaaattatggaaaattggttttaaagatgcattgaaacctaaagaagaggatatacaacgtgctttattgtgtatggatcctgaaaatcttgttctaaattcaaaaacacatgaagtatttcttacacaatcaggaatggagattgatttaggagctatagttaaaggctattttgctgatcaattacagcaatactttttagctcatggtgtatcttctggcattatcgatttaggtggtaatgttttaacaattggtagacaacccgaaacattagaaaaatggcatgtaggtgtacgtaatccatttcataaggatacactaccactcgttacattaagcgtagagcatcaatcagttgtcacatcaggtatctacgaacgctacttcatacaggaaaatcaattatttcatcatatattggattcaacaacaggttatcctgtagataatgatatcgctagcgtgacaatcatatctgatcatgggattgatggcgaggtatggagtacaatttgtagttttggtcagtcacaaaaaaatattgaattattaaatctcattgacggtattgaaggcattattgtgacaagagatggaagcgttttaatgacttcgaaaatgcaaaagtatttataaaaatttaaagaatactcatgaagagtattttatttttaagtaataatgtgaaaatattcacaaaaaaactaggaggatttgctatgagtaaggaaatattcgatacttttaaatttaaatgtggtgccgaattaaaaaatagagtattaatggcacccatgactatccaagctgggtattttgatggaagtgttacatcagaaatgattgattattatcaatttagagctggtgatgcttcagcaatcattgttgaaagttgttttgttgaaaatcacggacgaggatttccgggagctataggtattgataatgatgacaaaatacctggactcaaacgtttagcagaagcgattcaagctaagggatcaaaagcgattttgcaactttatcatgccggaagaatggcaaatcctaaatttaatgaaggagagcagccgatatctgcgagccccattgcagcattaagacctgatgctgtaccacctagagaaatgacacatgctcaaatcaatcagatgattgatgactttggagaggctacacgtcgcgctatagaagcggggtttgatggtgtcgaaattcatggcgccaacacatacttattacaacaatttttctctccacattctaatcggagacaagattcatggggaggcagtcgtgaaaaacgtacacgatttccaatcgaagttttgacaaaggttcaacacgtcgttgctgaaaaagaggcttctcattttattataggatatcgattctcacctgaagaaattgaagaaccaggcatacgttttgaagataccatgtttttactaaatacattagcagaatatgaacctgattacttccatatatcagcaaacagttatcaacgtacatctattgtgaatcaagaagatacagaacctttaattaataagtacatcaaaatgcaaagtgcacagttggcaaaaattccattaattggtgtaggtagtattgcccaacgacaagatgcagaacatgcccttgaactaggatatgatcttttaagtgttgggaaagcctatttagtggaaccacaatggacagataaaatttcacaaaacgaagaagtagaacaatttgtcgatatacatgatcagaaagtacttcacataccatcccctttatggaaagtaatggactttatgattttagataaagaagaagagcatcgtaaatatgaaaaattaaaagcacttcaaaataaaaaagttaaatttaacaaaggtacgtatcatgtctatgcaaaaggtcataatggcaacttacctatgaaagtccaattatcagaagataagattgtaagtatcgaggtagatgatagcggagagtctgaaggcatagcgaacccagtgtttgaacgtttacctcaagatattatcaatgggcaaacactgaatgtagatgtcatttcaggtgcgacagtaacaagtgaaggcatcgtgcaaggtattgcagatgcaattgaacaagcaggagaagacccagatattttacgggcgcgtcctaaaccagtcgttcagtggtctgatgaggttgttgaagaga

SEQ ID NO: 3370 - DNA, 3348 bp, Artificial Sequence
  Description of Artificial Sequence: synthetic nucleic acid sequence
gataagaattcttaattcaacttcggcaatattatagtctataatatacaagtcaatttattcagttgtttcaatcagaccgtatttgccatcttttcgtctataaacaatgcttgtgccatcagtttctctatcggtaaaaataaagaaatcatgtcccaataaattcatttgcaatactgcttcttcagaatccattggttttaagctgaattgtttagaacgaataatttcaatatcattttcactttctatatcatctgcatgattgtttgttgtagactcttgtacttcagcaacaaagatatcttgatctccacgatctctatgtttacgatttacacgagttttgtatttacgtacttgtctttccaatttgttagtaattaaatcaatgcctgcatataaatcatcatgtctttcttcagctctaagagtgacatcttttaaaggaattgtaacttcaattttagttgtagaattagaataagttttaactctaacatgtgctacagcatttggcacattgttaaagtatctttctaatttacctactttctcctcaatatagttgcgaattgcatctgtgatagtgaggttatctccatgaatttcaaatctaatcatagtaatctctccttaaacctctatattgatacttcttacctatattttaccatgtttatgttatcgtgcaaacgcaaacactttgaattttctgacttttttatcgtacaatttacaccctgcgtgatgaatagttaaccctgttgtataaatatcatctatgagtagtattactttcccttcgatatttatctcttcatcttttatataaaatggattaggggcttttgaacgttcaatctttcctaactttgactgcttaggacgtatatgtgtacctaatacatcttgatatgagatgcccattttatctaagacagtggtcacaggattaaatgtacgttcaatgtcgcgttcaattggagaaggaatgggaactatataatcatattgcgtttgaggtaaaactaattttctcgccaatacttctgccaaatagaagtctcgcttaatcttatactggtgtatgatttctttcatcataccatcataactataatcacaaaacaattgttccattaaataaaatgttttacttaagaattgacagtcatgacattcgccatcagtagaaattttgttgttaaggcacttaggacacctaccatctttatgaattttggagttaagccataatgtttcacatcgttcacaaaatatctgaggtggtttaaataagttataaatatgaatggtctcatgaataggttgattgcactggatacatttacgcatcaatccatccccttttaattgctaaacgattcattgaaataatgtttcttttagctaaaatcatcgataatgtaacaccttcatgaagaaataaaactaagccacttggagactgctgtttacgtcctacgcgaccagcaatttgaattaaagcctcttgttgaaaacttccagcatcaactacaacgacatctaagtgtgtcattgtaaatcctctttctaaaatagttgtagtgaatacaattttgtgttgtcctcgtcttaaagcttcaattttttcaaatcgtaaatcatcttcactgtgaacgcaaatcaaatcagggatgtccattttatactgttgatacattttattcataatttctatattattaataaagaccaaagtaaaacgttgttggttaatttgatatctaaatatattaagtaataaattttgttttcgtgttgattttaatttgaaatatttgaacttaggaataggaaggggggatcggtgaaaacgggctggtaacttaattattttttctggggggaattgttttaaaaaatgacgcggtggtgtggccgtcatgaaaatatgtgaatgattcgattttgaagcaagttgtattgcatttgataattgtggatccatagacaacggaaaagcatctacctcatcgacaaatacagtatcaaaatgctgtttaaacctcaataattgatggatagtagcaataacaaaatgaccattatattgctgtctactagattgatgtagcacatctatatgttcatcgataaaagcatctttaattcgatgacttatctcaataataacgtctacacgaggtgatacaatagcaatattatgtcccatctgacgagctatcctaattccctcaaacatcatttcagttttccctgctcctgtgacggcatataacaagaggtcattattattttttatagcttgaacgatagtttctgaagcgtattgctgttgctttgataattcaaagggtaactgataattcgcttttgttgctttttgaaaactttttacgagacatatatctgtaatactatccattctgcctaattgaatgcatcgtctacagtatgtgattgttttatccaatatcgttgaattgtaagtcacaaaatattgcaaggaagtgtttccacattgaatacaataccaacgctcactgtcttttataacaccttttgaaacttgagatactgattcatcttcaagttgatgcgttggagaaatcagtctaccgtaatatttaattttacttcactactttcaaaaaagtctgaaatactcaaataagcgaacacaagtgatatctaatgatattaccactgtgttctttcctatcaagctttcagacttttgattatatattaattaatgtcgattcttcttgggaagtaacccaatcctaaaccgcctgatcctaaatgtgatgctatcactggtccaaattcacaatactgaatatgaacattaggatgatcttcctttaattgctgaagaaatgactttccatcttcagttttatcaccgtttattacaaatactgtcacatcttccatgccttctatttctttaaaaatgtttgtttctaaagattttagcgcacgttttttagtacgtactttttcgtgtggatgtattttaccatcttcttcaaaacgcaagacaggtttcattttcaataatgtacctacccaagcttgagctccagtgatacgaccacttttttgtaaattttttaaatcatcaacaattaagtatgcaccaatatgttgtcttatttcagttagttcattaataatatcatcaggtttatatcccttttgtaccaattgagcagcgtaaattgcaaagctaccttcaatcatcgcagcaagacggctatcaaacgtatgtacttgaatatcttcaaccatttcaccagcttgtgttgctgaaggatagcttccgcttat

SEQ ID NO: 3371 - DNA, 2945 bp, Artificial Sequence
  Description of Artificial Sequence: synthetic nucleic acid sequence
atgtacatgttggtgtgtttgacgttcgatattttgtaatctttggtaaacaagcttccatgttccacatgcttcttctggggtttgataatcagaggttagttgattcataacatttaataattgcccagtatcttcgtggtcattaattaaatcttctaatatgattttaatgttttgtacatcttgtccttgactatattgaatgagtttaggaaaatcttcctcatcttctttacgtatatgatccaacatactatcacgaaactcgcgatataagtcttgtaattttaataagtatgggtgactaggaccatgtacttttgccaatttagtcatgtaaggtgtaagattcttaaattcttctttaagcgtttcgtgataagctgattgtatatattgtataagagattcaacatttaaaaatttaggattaatggtactgttaccttctgtattatcaatatgattcaacttatttaataaggaatttaagtcaatatttggtttatgattgacagctgaagcgatactctcttgtccgccacaacaaaattccattacgaagatgttgaaaaacgtagggaagaatttcatccttcaggaagtcgttctaatttaaccattaaagcaatgggaaaagaaattcttccttatatcgatgcgacatttccaacttataaagtaggtaatacaaggttacttattggagatagtttagcaggaagtatcgctttaatgactgcaatgacttacccaactatttttagtcgagttgcgttattgagcccaatgtataatgaaaatattaagaaaaaaattgatacatgtatgaataaaggtcaattgacgatatggcatgccattggtttagaagaagcagattttattttaccaactaatggtaaaagagctaactttttaacacctaaccgtgaattaaatcaactgattaaagaagataatattgaatatttctataaagaatttaacggtggacatcattggaaatcatggaaaccattgctaggagatattctcttacaatttttaggtgatccaataaatggaaaatatgtttaataaagtaagataaataaaatagtatgttagcgaatggttgttgaatgcgaaacactattaatttcagaaatgtaattgttttcatgataaaagtaacggttttcaaaaagttttgatataataggaataagttaaacaaaggaggaatttaaatgattttaggattagcattggttccgtcaaagtcatttcaagatgaggtgaatgcttatcgcaagcgatatgacaatcattatgctcaaataatgcctcatatcacgattaaacctcaatttgaaatcgatgatcatgattttaatttaattaaaaatgaagtgaaaaatcgaatttctagtattaaaccagtagaagtacatgctacaaaggcatctaatttcgctccaatcagtaatgttatatacttcaaagttgctaaaacagagtcattagatcaattatttaatcaatttaatacagaagatttttacggtacagctgaacatccttttgtaccacattttacaattgcccaaggtctaacaagtcaagaatttgaagatatatatggtcaagtaaaattagcaggggtagaccatagagaaataattgaagaactatcgttacttcaatatagtgaagaagaggacaaatggactattattgaaacttttacattaggataaaaagttcaaaattgtaaagtgaaattgaatttacagaatcattattgttaaatacgtgaagagcgcttaatcaactaaaaacgccaaatcctattgtgtttcagtgggatttggcgtttttatatgaaacataattatattgtatagttaatcattcaaaaagattaatgtacgttttatattgaatattcatatttcaaatgcatatgaatgacgtttcattaatatatacaactaatctttatataaacgatttatagattttaaggtttaacccttctgtttgttttaataaagtaatatccgtaaaatactgcaagtgcaagaaaaatcatcgctgaaaagtaaaaggtattatttaaattattagtaaattgagtaattagacctccgactagtgggcctatcattgaaccgaagccttgaacactgttgaacacgccccatgtttcttcctgttcgttaggattaatatgcccagccataaaggtattccaagccggtaagaggataccgtacattagcccaataaaaagtcctatggcccaaactatatatatatttgtaattgtagatagcccgaatataagaattgtatatagtataaagccactaaaaataactccatacataaaccctttgctattattgtcgatgatttttgataaaaataacatagagaaagcacagcctatgccaccaataatgattgctactgtatattcaacggttgatactttcacaacttgcgttgcatattttggaagaataggtacaagtgctgctatagctgctccttgtaacaagatacccggaaatagaataagatgacgttgtgtaacatctacaatttgctttaattgtgctttcacaggtttagtattgtaatttgttaagttgatattaacaaaatagtatagtacccaggcaataagcacaaccaaggccattaaaaatgcaaaacgagtaggatggaatttaataagcaagttcatgataaccatacccaccaataaacctagcaaccatgaaaagtagacataacccatttgtttgccgcgatttctttcatctacactagataacatgataacccaaatcggactcacagcaattcctaacataatagcactgaaaataattatgaatggtgatgccgggaaccatatcactaaaaacaagcttataaaagcaagtaag

SEQ ID NO: 3372 - DNA, 3563 bp, Artificial Sequence
  Description of Artificial Sequence: synthetic nucleic acid sequence
ttgctaataaatatggcaaggttaaggcgattgcgagtgaaatggttccatgtacaccacatagagtcatgattagtgcatataagctacgcttaggtttactctcagtaactttatcttcatcatttttagaaatcattttttggaatggactgacagataaatagaaataaggataaagtacatatacccacacaaatctaaagagatacaccgcaagagcgactagcaatgtgatgacgattaagaataataaattatgcggttcagttttaataattttcactattacctcaggtactaaaaaacctaagattgaaaacacaaaaccatttaaaacgtagcctaaaatactccatgtgtgattatagctcatctgtaattgtgttctcgtttgagctatacggtcacgttcaaatccatgcacgagtcccgcaactactgctgcaataatccctgatgcatggaataattcagcaatcaaataagtgacaaacggcgtcagcaattgtataaatgtaaacatgttaatgttctcaatgccacgtctcattaatgttaaacgaaatctcactaaagccatgcctataattagaccaacaatagcacctccaatagaggcaatcaaaaattgttgaatcgcatcaaaaatggaaaaagttccagtaatcaatacacctacggcaattttaaatgaaatgatacctgcagcatcattaagtaaagattcaccttcaagaatggtcattgaaccttttggtaaaaccttacctttcgtgattgcttgtaccgcaacagcgtctgtaggacaaagtatagccgcaattgcgaaagcagcacctataggtaattcaggccaaatccaatgaataaacaatcctacgcctataacggtagttatgacaagacctagagccatcatcataacaggtttgatatacttccttaaatgtactcttgaaacattaacaccctcaacgaatagtagtggtgcaatcaatgtaaccataaataattcagaatcaaaattgaattcaactggaatgggagtgaggtataaaatcatcccaaggaaaatttggataaatgcaagaggtactttaggtatgaaagtatgtacaaaggagctcacaataactagtgcgacaaatatgagtagagtttcaaatatctccacactttcacctctttattaatttttaattgcaaatttagtcatcaaaacaataaaaagttgcaaggttatctactgcaacactgaagaagtgaaataataacaatagagtcattcctgtaaggacataactattaacactcaatcatgccacaaatatactattcaaaactcaattattttctttatcagtgaaatcaaacatgaacatttaaattaacttatgaagctcgcttcttcgaacgagaaaatgcttatgtgtaatttcattgaaaaaattagtgacaactgtcattcacaattattcttgtttacaattttatcatttattaaccagattcttaaataaatagcttttatatcattaatatcttcacctcagatatacaaaaaactactagcatataaaagatatatcttttatatgctagtagtttaaaagcttaaacaatcaatcgtccattttattaatatattctttttctttatagtataatttttctcgtctttcttctcgtagttttgcacgtttttttaattcttctggcgtattaaactctttttggcttaataagatagtagattgtctagatgcatcgtctttcctgtacatatatgcaccattacggtaggccgctctacttatcaaatgcattccaaccggagatgtaagattgataaaaactagtgataataataatctgacactgaaaaaacctgaattcacaataaaatagatcagtacaccaactacagttagtaatactgacaatgtagaacttttcgttgaggcgtgacttcttagaaagacatcttgaaattttacaatccctattgcactaattaatgcaataatacttcctaagaaaataagtatcttattatctaattaaaaaacaatagaatacttagtttgactgttcatgattaaaatattcttttaattcttcccactaaatacgaataaaagcatatttttactgttcttacgcattcttccgattagcttttctgtatcgtttttcattcaataataattttcttaacatcttctaagtaatcatcttcaatcattggctttaaagtatttccatcaatagcatttaacattacatcttctttttccttcagtctgttataaactgctttatcgataaaacctttatgggctctatccccttcagacatcaaataataataccttgtatattgattattatttaaccctaaacgatgtattctatcacgtgattgcaacataaacgttaaattaaagttatattcaaaatatattgcatcatgtactgtctgatgtaaagatatggactcgcctaatgtattaggattagatattagaacttgtgcatttccattcctaaaattattgatcatatctaccctatcttctttaggtgtttctccataaatcaatattgaattaatatcactttctagtaacctcttattgattttattcattgtacctacaaacaatccccatactagaactttttttccttggctaactaagttttcaatcaattcaatacctttttcgaattttggagaagttacattttttaaatcaaaagaattataaatttgttgttttacttgattttcttcttctttatttaatgctttatccaaatcgaaatttaattcatcattcaacattcctagttcgctataattaatattcttttgcaataattctgggttagttgaagcttgtagtaaccttatataaatcgctagtatcccagattcattttcgtatatcgcttttgctaattcaatttgaatattactaggcttaacacataatataatatcattttctgcttgaggcacttccaaatcgttcttatttgtacgccagaaaaaagggttcaacttgtcattaatttcattaggatcaggattttgtaaatcagcaacattccaaccaaaataagtatcatactcatctttatataaaatatttaagaagttaaatatgtcttgataactatttggaattggggtaccagttaaaacgtatctgtaataacttttaggacctaaagttaatgcataacttgctctgctactattaataccttttatcctatgaacctcatcataaactatcattgtcttatcattaataagttcatttaaaacccctacatacttttgtattgcttcaaaattcaaaacaatgacatttgcacttccccaatctgttcgtactttacctaaatcattatattttttatctcttaggttcataaagtgtaattctcttttatcttgaaaaacttcaataaattctgaacgccaagcttcaaatgcattaattggagaaataactattaatttatcaactttccgctttatttcacta

SEQ ID NO: 3373 - DNA, 3180 bp, Artificial Sequence
  Description of Artificial Sequence: synthetic nucleic acid sequence
gccttcttataaaacgattaatcgattcaaaaacaaataaaaaaaaatgaagaattatagttgggaatatttcaatgtccaaattaatcaaaagctttcagaacgaaaagcaaaaaccatctacagtcaaagaaaaattgatgtggagtctgtttttggaattatgaagcctattttgagtttcactcgaaagtccgttcgagggataaataaagacaaaagagaactaggacttgtgctaatgacacttaatataagaaaagtaccagctcaacgagctgaaaattataaaaaatcataaaaaagacaatttttatattatttcaatagaaattgtctttatttacttatcctggaactttatgttccggactctttcctacgattagtcaagtacttataattaaaataagcattacttaactaaaccgttcattttaatttttttgaataaggtgttaaactatatttgattgtacgtttggctaatgtggtgacatttgataatcgtacaatttataattcattacaagataatgaattgtttttaataatcgatttatacaagcaatgatggcagtcttatgaggtttctcattaggctgctttcttagtttgtagtaataatcgacgacatgattgtcataatgatgctgccctcttattatattcataatcacccaaaataaaagttttctcgcttttttattaccacgcttgttgatggtatctctacagtgtgtatgacctgattgatatcgtttgatatcaatgccaacaaaagcattgagttgtttatttgatttaaatcgcttaatatcaccaatcttcccaataatcatagctgtgcttagcttaccaataccaggtatcgaatgaatattttcaaaataatcgagttgttgtgctaattgaatcatggcatcatctaattgtttgatatgatgaatagattgttttaattgttgaataagtaagcgtaatttttcgactagaaaggaatgtctatcgacattaggatagctttcttgagcaatcacccttaattgaagtgcatattttgtagctttatccattgacattcccttatctgtagaattgaatatatgtgtaatcagtacctccttgtcgatatcaagaaccatgtctggatgagtaaagatttctgcgatgttgagtgcaatgattgaatatcgactactaaataatctttctaaaccagggaatgtttgatggagtaattcaaggatctgaaatttaagtcgattttgttcattctcgatttctagatgaaaacggacgcgttctcttaattcaaagaatattaactcatgtataggtaagttgtctgtttgtttaagcgtcggtcctaaacaagcaagcttatgagcatctgcctgatcagttttccatgatcttagagcgctcgttttaaatttggcttctaacggattcatttgaatatagttaatttgatttacacaacaaaatcgttccatacctcttgaatagatacctgtagattcaaaaatgagttgtgggtggtctaagtcattcaaatacttgagtaaatagttgtaaccatttttattattttggatgaaaaactctttttggaatttttcatttttataatgtgcaactacactacttcttttactaatatcaacacctaagtaatcgataaaaaaacctcctttgaataattgagaagctaaaaactttacttaacctttctcatttcattttcctatacacggtttcaagaacccaacatactacaaacgaatttcaaaaggcgagagtaaagctgacttgttttttatacggatttaaaatccaagagtctggacagtctacttctctctataactataaaaaatagctatgaaaaaatctatcgtcatagatttcttcatagctaatcttagtatgtttttattttattgaaattaattgtttattagcgatataacttgtcaatgatagagtcgttatgtcattataaatgtaagggcttacatatatgttttgcatcaacatttagtctgtttcatacaattcaatttttcgattatgacgatattgattcattttattgttatattaaaaaataagtttgagagtcgatagaaatcagttatgatattgttaataagtttttattcgaaaacgaaggggagattttatgactcaatctgaaaaaattattaacttaacaaatcactatggggcgcataactacgttccacttccaattgttatttctgaagcagagggtgtatgggtgaaagatccggaaggtaacacgtatatggatatgctttcggcctactcggcagtgaatcaaggtcatcgacacccaagaattattcaagcattgaaagatcaagcagataaagtcactttagtatcacgtgcttttcatagtgataatttgggtcaatggtatgagaaaatatgtaaactcgcaggtaaagacaaagcattgcctatgaatacgggagcagaggcggttgaaacagctttaaaagctgctcgtcgttgggcttatgatgttaagggtattgagccgaacaaagctgaaattatcgcttttaacataaaagctatcaatagcaatacaaatacattgacgaccaaatttctcgcttgcttgtcgaattaattctggatgttttaaagcgcttgaattgagtgatattttatctgctccgtgatttaatagttgcgtaatatcatctaaattttgaatccctcctcctactgttaaagggataaataattgttttgccgttgcttctatcacttctatcataagatcatgtcctgcttccgtcttcgaaatatcaagaaagactagttcatctgcaccggcttcattataataaagagccaaatcaactggattaccgatatctcttaatgactggaactggataccctttacgacgcgtccatctttaacatctaaacatggaatcactctttttttaatcaagataatccctcccagaattcatccagatgtgctgcttttcctacaatagcagcatgaacatttaacgattctaatcgaaacaagtcctcttgatgtctaatacctcctgaagcaattacaggcaacgatgtataaagtgcgagacgacctgtcctttagagcacagtggcgatgatatc

SEQ ID NO: 3374 - DNA, 3852 bp, Artificial Sequence
  Description of Artificial Sequence: synthetic nucleic acid sequence
tatttagctgctatcaaagaacaaaatggtgcagcaatgagtttaggacgtacttcaacattcttagatatttatgctgaacgtgatttacaaaatggtgacatcactgaacaagaagttcaagaaatcattgaccacttcattatgaaattgcgtatcgttaaattcgcgcgtacgcctgaatataatgaattattctctggagatccaacttgggtaactgaatctatcggtggtgtaggtattgacggacgtccaatggtaactaaaaactcattccgtttcttacactcattagataatttaggtccagcaccagaaccaaacttaacagtgttatggtctactcgcttacctgaaaacttcaaaatctattgtgctaaaatgagtattaaaacgagctcaatccaatatgaaaatgatgacttaatgcgtgaaagctatggcgatgattatggtatcgcttgctgtgtatctgccatgaagattggtaaacaaatgcaattcttcggtgcacgtgctaacttagctaaagcattactttacgctatcaatggtggtaaagatgaaaaatctggtaaacaagttgggccaagttatgaaggtattaaatcagacgtactagattatgatgaagtcttcgaaagatatgaaaaaatgatggactggttagctggcgtatatatcaactcattaaatatcattcactatatgcatgataaatatagctatgaacgtcttgaaatggctttacatgatacagaaattattcgcacaatggcaactggtattgccggattgtctgtagcagctgactctttatcagcgattaaatatgcacaagttaaacctatccgtaacgaagaaggtcttgtaactgactttaaaatcgaaggcgacttccctaaatatggtaataatgacagtcgtgttgatgaaattgcagtagatttagttgaacgtttcatgactaaattacgtagccataaaacataccgtaattctgaacacacaatgagtgtattaacaattacttcaaacgttgtttatggtaagaaaactggtaacacaccagatggacgtaaagctggcgaaccatttgcacctggcgcaaacccaatgcatggtcgtgaccaaaaaggtgcattatcttcactaagttcagtagctaaaataccttacgattgctgtaaagatggtatctcaaatacatttagtatcgtaccgaaatcactaggtaaagaagaagcagatcaaaataaaaacttaactagtatgttagatggttatgcaatgcaacatggtcatcacctcaacattaacgtatttaatagagaaacattaattgatgcaatggaacatccagaagagtatccacaattaacgattcgtgtatctggatacgctgtaaacttcattaaattaacacgtgaacaacaattagatgttatttcacgtacattccacgaatctatgtaataaatttaaggtgggagcaaaatgcttaaaggacacttacactccgttgaaagtatgggcactgtcgacgggccaggacttagatatatattatttactcaaggttgtttgttaagatgtttatattgtcataatccagacacttggaagattaacgaaccatcaagagaagtgacggttgatgaaatggtaaatgaaatcttaccgtacaaaccttactttgaagcttcaggtggtggggtaacagtcagtggtggcgaaccattactacaaatgcctttcttggagcaattattcaaagaattaaaagcgaatggtgttcacacatgcattgatacttctgcgggatgtgtgaatgatacaccagcatttaatcgtcattttgatgaattgcaaaagcatacagatttaatcttattagatattaaacatattgataatgataagcacatcaaattaacaggcaaacctaacacacatattttaaagtttgcacgtaaattatctgatatgaaacaacctgtttggattagacatgttttagtacctggtatttcggatgataaagaagatttgataaaactaggagaatttattaattctttagataacgttgaaaagtttgaaatcttaccatatcatcaactcggtgtgcataagtggaaaaatttaggcatcccttatcaactcgaaaatgttgaaccatctgacgatgaagcggttaaagaagcttatcgctatgttaactttaatggcaaaatacccgtaacattatagaaagataaatatagtaatagcctgagacatcaatcgttgtctcaggcttctttacgtttaatcagtcgataaactgagtataaaatatatctcaattaactttatttaataaaaatatgattcataagtttaaatagtttatttttctagatatgctttaaatacatctttataaacatcgatgtaacttaaatacatatcttttctaataaattcatcaacttgatgcgccataatagattcaccaggtccaaagacagcaaaatccacgttattttcatttgttcctaggaaactagatgcatcagttgtaccaatcaatgcactcacaacaatgtcttcatgtacataattcggtgcaatacgtgtaatattttgaataagaggattatcacgatcacttgccactggatcgtgactgctaggtatatctacagttaaataatcttcgcccacatgacgaatgactttttcaaataaatccttcacgaaagtactgtcatattctggaacagttcttacattatatttagctgtcgctttatgaggaacagaattaacttgtttaccaccattgaatacagagtttaacattacaaatccagagtagatatgtgattcttcttcaccaatttttctgtggagatgtttctcaatcattggaacagcgtctaactcgtgtactttatcatgttctttaatatttttatattcttgtttcatttcatttacaaaatcaactaaaatatcaacagcatttgtacctaggtgtggcatggaactatgtgcagccttacctttcgctgtgactacacagctcatagaacctttatgagcatagtaagcgatattactagttggttcgccaataattaaaccactcacatcatctaagtaaccttcatcagctagtaattgtgcaccatattgttccgtctcttctcctgtagtagctaataaacgtatcgtaccttgctttaatgcgtttgattgttttaattcaatcatcgcgatgaccatcgccataagaccacctttcatgtcagtggtacctctgccgaataacttgccatctttatctgtgagttcaaatggaggaaaagtccaatcatcatggtcaccagcatctacaacatccatgtgtccactgattgctaagactggagcgccactaccaatttcagcaactaaattagcgcgtgaatcattaactttaacaatcttagaatcaatatcatattgacttaacaggtcttttaagtactcacatactttaatttcatgatcattctcagtttgaatcttgacgatatcagctaataatcttattttgtcttgctcactcaatacagtcatttcacagtcctcctcatttttagtaatgattttcactttttaataaaaaataaaaatccttgtacacttaatattatcaaaaacttttattaattaaaaattatatgctaaaataaatggatttttaataaaaaataaatattaacttaacatttcttataaaaaacaacaatgtatagaaatattaaaaatttttcattatttatagtttgaatcgtgttataaaatgaaaagctatga

SEQ ID NO: 3375 - DNA, 3146 bp, Artificial Sequence
  Description of Artificial Sequence: synthetic nucleic acid sequence
tcaacattataatattgattaattaaataacaattgcaagtataatttaaatatttctctaatatacagtgtcaatttattttattcacataagaaaatagctatgaagaaatctatcaatttaaatttcttcatagctaatttttttcatttaaatttattgacggcttgaaaaatgagtcaaaatcatcaataacatcaaattgcaaatatattcctttggtaatggattgaccattaaacttaattcgaattctattcttttctatacaatgaaacgggtgtcatacatcatcggtaactaattatgatagatatgaacttgtggttctttatcgtctttagttttactaatgagagcacgtggagtatttccatctttgattctaatttcatactcatctagtttatcaaaatatttttcggcttgctctgtaacatattgtgtaatacctatcgtttctgcctgtccgtaataatctataggcaaatcaactgtaagttgtttagcttttttatttacgaatttaaccttaccaactgcttgtgtgaagtttgaaaaatacgattgcaaattatcattaaactgtttaaagttattattcaacgtttcatcataatcagctgcagttgacgaaggaattaaggctgctttttcattaatattatcccatgagttaattttagttttaccctcttcaaccgtagtaccaactataaattcacctggtgtaatggaatcttgacttgattgtttatagatagcaaaatgaataggaatatctttcaaatcactattctcacgtaaacgagaaagcatttcactagccatctgtttaccttgcttttcaatctctttatcagataaatctttactaaatgtttcgccatctttctcttttttgtaataataaacactattcatagctaaaccaattgtcatcccttttatatttttacctttagaatcactatttccataaaaatcctgctcgagtatatttgaaagataggctggagaatttttagctattttctcttcatctgtttcaccattgtgagatggattgagtccaagattctcattagcatttttgcttttcttttctttttcgctcatcttgtcaatttcttttttcgtatacttcggatctaagtatgcattaatcgtttttttatctaaatattgtccatcttgatataaatacttatttgttggaaagatttctttacttaattctagtaaaccactttcaaaatcttctccattataaccatttgccatattatcttgtaataatccacgagcctggctttctttgaagggtaatatagtcctatagttatcaccttgaacttttttatcagtcgctatttgtttcacttgatttttattatggttatccttatgttcactttgttctttatctgatgaagtttgtttatgtccatctccgcaagccgttaataataacagtatcgacatgagtaaaaatattgttcgcttcattcacgtactcctctaattattagattccattttgtttttcaataaatgctgcttcagtccaaatttcagtaccatacttctcagctttggctaatttagaccctgcatctgctccagctatgacaatatcagtacttttagtcacgctgcttgtaactttagcaccttgcattttcaaccattcagatgcttcatttctcgtcatttgctcgagtttccctgttaatacaattgttttcccactaaaatcaggatgaccttcgatttcagttgttttaattcctttataagacatattaacatttttattacttaatttttcaattaatgaacgaatatcactattttcgagatatgttacaacagattgtgcaagtttatctccaatatcttgaatttcaattaattcactttcagttactttaaaaagttgatccatcgtttcatatcgctcagcaagtacttgactagcttttacacctaaatgtctaataccaagtccaaataataaatgctctaatgactgttctttagatttttctatcgctaataaaagattatcaactttcttctttcccattcgctctaatggtaataaatcttcttctttcaaatagaaaatatctgcgacatctttgattaactgattttcgtatagctgatgaataattttagtacctaaaccatctatattcatcgcttgtcttgaaacgaaatgtataagtccttcaataagctgtgcctgacattttggattaatacaacgtaaagcaacttctccttcaatacgaactaattcatgtccacaactaggacaatgtgttggcatatgataaatttccgattcgttaggtcgtctatctaaaatactttttacaacttcagggatgatgtccccggcttttttaataacaacactatctccgatacgtatatctctttcatgtattaaatcttcattatgaagtgaggctcttgaaactgtagtaccagctacttttacaggttctagaattgcagttggtgtcacaacacccgtacgcccaatacttagctcaatatccaataattttgtaataacttcttcagctggaaatttataagcaatcgcccatcttggagatttttgcgtataacccatttcctcttgttgagataaatcgttaacttttataacaataccatcaatatcgtaagataaagatcctcttttgcttgtccatttctctatataattaagtacgccctcaatatctgatactcgttcacgttcttggttagttttaaaacctaattggtccaattcctctagcgcttcactttgtgttgttgcattaaactcggttaggtcattcacactatataagaagacgcttaactttcttttcgcagctagtttagagtcaagttgtcttaaagagcctgcagcagcgtttcgtggatttgcaaaaggttgttcaccattttgttctttttcattattcaaatgaatgaatgaacgacgtggcatataagcttccccacggactgaaggatatcaggttacgacaacaacatgtggtaaagaagcactaaaattattatcttcagatatagatattatgattttagacattatgatgccggaagttagcgg

SEQ ID NO: 3376 - DNA, 3480 bp, Artificial Sequence
  Description of Artificial Sequence: synthetic nucleic acid sequence
ggttgtaaaagatgtaaaaggaatagacgttagtggcccattcccacgtatgacatatgcagaggctatggaccgttttggttcagataaacctgacactcgtttcggtatggaacttatcaatgtgtcacagcttggtaaagaaatgaattttaaagtttttaaagatacggtagataacaacggcgaaattaaagcaattgtcgcaaaagacgctgcaaataaatatacacgtaaagacatggatgcattaacagagtttgtaaatatatatggtgcaaaaggattagcttgggttaaagttgttgatgatggtttaagtggcccaattgctagatttttcgaagatgttaatgttgaaacacttaaacagttaacagaagctaaacctggagatttagtaatgtttgtagctgataaacctaatgttgttgctcaaagtttaggggctttaagaattaaattagcaaaagaattaggtttaattgatgaatcaaaattaaatttcttatgggtaactgattggccgttattagagtatgatgaagatgcaaaacgttatgtagcagcacatcatccatttacttcacctaaaagagaagatatcgaaaagctagacactgaacctgaaaatgtacaagccaacgcttatgatattgttctaaatggttatgaacttggtggtggttctataagaatacacgatggtgaattgcaacaaaaaatgtttgaagtattaggatttactaatgaacaagctcaagaacaatttggtttcttattagatgcttttaaatacggtgctccacctcatggtggcatcgcgttaggtttagatagacttgtgatgttattaacaaatagaacaaacttgagagatacaattgcattccctaaaacagcatcagctacatgtcttttaactgacgctccaggagaagtatctgataaacaactccaagaactctcactaagaatcagacactagggccccaacaaagagaatttcacaaagaaattcaacaggcagagcaagttgggactagggccttaatttaatgtttcttaagaaattagcacagagagcttaattgtacgaattgaatataaaacatcggtgtgtaatataattaatcagacattatattataattttggtaactagtttagaatacacgagaaaataatacacatttgagttaaatgataagtctttaaaatttacttctctttttaaattgtggtatgatattttcataagatagtcatctgtggtgttcgtaagtttgctttttatttgggcctaacactctttgatcagggagcccaataggttttctcgcagcgcacacgcctctataggaggacttgcaaaacgagaaacagggcacccacctgtatatagcaggccgaatgatcaagctatttataactacggcatcaacggactctatcggtacgcaagacttttgtcttgcgtatttttatgtatataattataaagaagcatagatataatgaattggaatcaaaggagctaaagatgaaacatcaattttcaaggaatgaattagcaataggacaagaagggctgaacttactaaaaaataagactgttgcagttttaggtgttggtggcgtcgggtcatttgcagctgaggcattggctcggactaatatagggcacatcatacttatagataaagatgatgtcgatattacaaatgtgaacaggcaaattcatgcactgacttcaactattggtcaaagtaaagtcacgctaatggaagaaagaatcaaattaataaatcccgattgtaaagtaacttctttgcatatgttttataccgaggaaacatacaaagatatcttcaataattatgatattgattattttattgatgcaagcgatacaatcatttataaagttcatctcatgaaagagtgtttagaaagaggaattgagttaatttcaagtatgggtgcagcaaataagactgacccgacacgttttgaaattgcagatatttcaaaaacacatactgatcctatggctaaagtaattagaaatcgtttaaaacgccttggtattcgtaaaggtgttaaagtagtattttctgatgaaagtcctattgttattcgcgaggacgtaaaagaaacagtaggagataaaaatgcaatcaatagaaaagggcaaatgcctccatcttctaatgcatttgttccaagtgtagtaggccttatttgtgcaagctacgttgtcaacgatattttaaaagatatacctgtaaggcgaattaaagataaaggacaaaattaaagttatctatctcattgcaagaaaatcatcatcttctatttttgtgaaatttgattcatagtttaaaaaaaacaaaatgtattttaaataaatctacaacaactcatagtaaaaaaacctgaggcatcagtattgtcccaggttttttgcatctaagatattaatttcaactacatattttcaatgaataaaattatgttttatttcgtaagttatcgtaaattgttttaaattgttgttcactttttgatgtggtttttggttcataatacactctgttttttaatttttctggtaagtactgttgtacaacatgaccattttcatagttatgaggatatttgtaacctatagcccgtcctaactttttagcacctgaataatgaccgtctttcagataatccggtatttgacctatatgtccatttcttatatcgccaagagctttatctattgctgtgataccagaatttgatttaggtgataagcataattctattacagcttgactaaggggaattcgtgcttctggaaaacctagacgttcagctgattgtattgctgctaaagtcctctgaccagcattaggtgatgctaacccaacatcttcataactaattacaagtaatcgacgtacgattgtaggtaagtcaccagcttcaattagacgtgctaagtagtggagtgctgcattgacatcactacctctaattgatttttgaaaagcgctcatgacgtcataatgcatgtctccatctttatcacttacaaaagcacctttttgtaagcaatcttttgcgtcatctaatgtaatatgtctttcgttttcttcaccaatatgagcacttagtacagctaattccaaagcgtttaatgcactcctaacgtcgccttggctttgcgttgaaaaatattcgatagcatcttcatctacaataggatgataagtacttaaacctctttccttatcatttatagctctatctaatgccaatcttatatcatcttgatctaatgggtaaagctcaaatatttgtgctctagatcgtatcgctggatttatcgcatgataaggatttgaagttgttgcacctattaatacaattttgccattttcaagatgtggtaataaaaaatcttgtttagctttgtctaaacga

SEQ ID NO: 3377 - DNA, 3374 bp, Artificial Sequence
  Description of Artificial Sequence: synthetic nucleic acid sequence
acattattgcgtttaattgcaggtattgagaatgcagacgaaggacgtattcaatacttcaatcaatatttgtcaagacgtcgaatacgtcatattgtaggctatgtccctcaagacatcgcactattcgagcatatgactgtcatggagaacattgagtttttcaagtcactttgtgaaaatcctatttcagatgaaacacttcattcttatttatcacaattaaattttactgatacaaaagtgaaagtatctaacctttctgggggaaataaacgtaaagtcaatattatgataggtctacttagtcggcctaaaatacttattctagatgagccaacagaaggcattgatttagaatcaagatatgatattcacaacttattacaacaaatgaccgatcaatgtttaatcatcatgacgacacatcatttagacgaagttgaagcactagcagatgatattaaagttataggtcaaaatcctttttatcatgatattttagaaaataaaggttggtcttttaaaaaatatgcaaatgccttagctgataatacgaaatcttaagctgtactttcactccatcacttcatcaatatttaacatcaaaaaggcttgccctttcgtcgtatatttctcgattgaaaaggcaagccttaataaattttatacacatttatttatcgtgtctaacttatctgtacactaatccaccatcagttaaaatggattgacctgtaatataatcagaatcatttgaagctaagaatgatactaagttcgcaacatctgatggctcttgatatcttccaagtttgatttctgaagaaaatgcttcaaacgcgtctcctatttctagactatcatcaagtttcaccatttcttcatcaatacgatcccacatttcagttttggcaactcctgggcaataagcgtttacggtaatgcctttgtctgctaattctttagcagctgtttgagtgaaggaacgtacagagtgttttgtagctgagtaagtgccgagtacttcataagattcatgtcctgcaatactacatgcgttgataattttacctttacttttttgtttaataaattggttagcagctgcttgaattccaaacaatgtaccaaatacgttaatattaaataacttagataattcctcttcaccaatttctaaaattggcgtcactgcatcaacacctgcgttattcaccatgacatctaattgaccaaattctgtaactgcgaactgaactaattcttcctgttctttctttttagatacatcactcttgaatgcgacagcttgataacctttttctttgaattctttctcagtttctaatagaagtgcttcattaatatcttgtagtactatattaaacccatcgttagcaagacgttctgcaatacctttacctaatccacctgctgaacctgttataattgctgttttactcatatctatcttcctccttatttatcatctaccctttaaacatggtggtagtaataagattgggaaatgtcaaatgttgttaatatatttgtcgaaaagttgttgtttttatgcattattaaatacaacttcaaattactaacactgctttttactgcaacaatataccttttagatatctacattctttttaggaattaaacaatacgccgcaataaatgcgataaacactaaacctgcacccacgataaatgcgatagtagctgctaaatatgccgggtgatttacagataatgccgtatatattgttgtcacaacagcgattccaaatgctgcacctagtgtagaagtcattttgataattcctgatgcagtacctgctttttcagctggaacattagatacagctgtagatagcgcgggtgtagcaaaaaatcctaatcctagacctataaagataaagccaatacatgccacaatataataaatcatattaggcaaagaagtgaatgctaaaagtataataccaacagtaattgataccggacctaacatcaatggcaattgcggtcctcttttttgcataaaacgttcaccaacacgaatcattaacaaactacacagcatatatggaattgtaattaaaccggcttgtgcagctgatagatgtttatcgtcttgaacataaatattaaataatgctaatgaaccaatatccatgttcaccatcaagttggctaatgttgttccaatataaacattatttgaaaataaacttaaatctataaaaggttcatcttgacgtttttcaaatatataaaatgcaattaatgtcacaatgaatatagcaattaatatcaatataagaggatttaaccatccaattctatctccttgcgtaatcactacgttaatgcttaacatcatgacaacaaaaataatgattccaacgatatcaaattttttattatatgcagactcatctttagattctggtatacctctaagcaatatgagtgaattaagtttaaataatataataagagaatttaacaagcgttttgaagaaaaatatagtcaaagttatgaatataaaaaattagatttttctgctactacaaccatttatgattcagaaatatcagagtttaaagattgggtagatgcaaattatttaggtactaacgttgaaaataacattcaaactgaaaaaagatttttatatgaaagaccaccagttagatatgatagtgtaacacctgagttagagttgttaaaaagaaattacgataaaaatgtaactgtatttggtaatttgcctaaaaaagcgatacaagttcctaaatatactggtggcactactacgcctgattttgtctatatgatagaaactgatgaacaagatgcaaaataccttattgttgaaacaaaagcagaaaacatgagactaggagataaaagtattggtgaaatacaaaaaaaattctttaacacattagataatttgaatattaaatatcaattagctactagcgcgcaagatgtttataatgaaattaaaaaattagatgattcaaagtgagggaatatgatggggaaatcagaaaaaatttcattacttgaaaaagtccaagatggtttagtagataaaaccggagcaaaacctaagttaccaacaactattaccgatttaaatcaagaaactttagaggtatatagaataccactaaagtttctgtattataatgatagaaatggaagaattgcttctgtaatatccagagtaagcgacgatataaaagttgcttatgaatttgaagataataattataataaaagtattgaaaatatgatatatgaggctaatacttctgctttaaaaaacactaaaaaatctattaaagataaa

SEQ ID NO: 3378 - DNA, 3713 bp, Artificial Sequence
  Description of Artificial Sequence: synthetic nucleic acid sequence
agatatctcaccattaggtgctgcagctttaagtggaactacacaccctatagatagacatctgactcaagaacttctaggatttgcaaatctgtatgaaaatagtttagatgctgtcagtgatcgtgactatatcgttgaaacattgcatcatatttcactcactatggtacatctatcacgttttgcagaagaaatcattttttggtcgactgatgaggcaaaatttatcactttatcagatgcgttttctactggctcatctattatgccacaaaagaaaaaccctgatatggctgaactaataagaggaaaagtcggacgtactacaggacacttgatgagtatgttagtaacacttaaaggcttacccttagcttataataaagacatgcaagaagataaagaaggtttatttgatgctgtacacacacttaaaggctctcttcgaatcttcgaaggtatggttgcatctatgaaagttaattcaaaccgtttaagtcaaacagtaaaaaatgatttttcaaatgcaacagaattagcagactatttagtcagtaaaagtgtaccttttagaaccgctcatgaaatcgttggtaaaatcgtattaaattgtattcataaaggtatatacctattagacgtacctttaagcgaatatcaagaacatcatgagaatattgaggaagatatatatgattatttaacacctgaaaattgtctcaagcgtcgccaaagctatggttcaactggtcaagaatcagtaaaacatcaactaaaagtcgcaaaagcattattaaaagacaacgaatcaaaatagttattaaaaataatagccatctaaaattacaaaaatttaattttgtattaagttatcaaagttagtgctaagtgttagggggtttccgccccttagtgctgcagctaacgcattaagcactccgcctggggagtacgaccgcaaggttgaaactcaaaggaattgacggggacccgcacaagcggtggagcatgtggtttaattcgaagcaacgcgaagaaccttaccaaatcttgacatcctctgacccctctagagatagagttttccccttcgggggacagagtgacaggtggtgcatggttgtcgtcagctcgtgtcgtgagatgttgggttaagtcccgcaacgagcgcaacccttaagcttagttgccatcattaagttgggcactctaagttgactgccggtgacaaaccggaggaaggtggggatgacgtcaaatcatcatgccccttatgatttgggctacacacgtgctacaatggacaatacaaagggcagcgaaactgcgaggtcaagcaaatcccataaagttgttctcagttcggattgtagtctgcaactcgactatatgaagctggaatcgctagtaatcgtagatcagcatgctacggtgaatacgttcccgggtcttgtacacaccgcccgtcacaccacgagagtttgtaacacccgaagccggtggagtaaccatttggagctagccgtcgaaggtgggacaaatgattggggtgaagtcgtaacaaggtagccgtatcggaaggtgcggctggatcacctcctttctaaggatatattcggaacatcttctacgaagatgagggaataacgtgacatattgtattcagttttgaatgtttattaacattcatttgtacattgaaaactagataagcaagtaagattttaccaagcaaaaccgagtgaatagagttttaaataagcttgaattcataaataatcgctagtgttcgaaagaacactcacaagattaataactagttttagctatttattttgaataacaattcaaaatatggtggaaacatagattaagttattaagggcgcacggtggatgccttggcactagaagccgatgaaggacgttactaacgacgatatgctttgggtagctgtaagtaagcgttgatccagagatttccgaatgggggaacccagcatgagttatgtcatgttatcgacatgtgaatttatagcatgtcagaaggcagacccggagaactgaaacatcttagtacccggaggaagagaaagaaaaatcgattccctgagtagcggcgagcgaaacgggaagagcccaaaccaacaagcttgcttgttggggttgtaggacactctatacggagttacaaaagaacatgttagacgaatcatctggaaagatgaatcaaagaaggtaataatcctgtagtcgaaaacatattctctcttgagtggatcctgagtacgacggagcacgtgaaattccgtcggaatctgggaggaccatctcctaaggctaaatactctctagtgaccgatagtgaaccagtaccgtgagggaaaggtgaaaagtaccccggaaggggagtgaaagagaacttgaaaccgtgtgcttacaagtagtcagagcccgttaatgggtgatggcgtgccttttgtagaatgaaccggcgagttacgatctgatgcaaggttaagcagcaaatgtggagccgcagcgaaagcgagtctgaatagggcgttgagtatttggtcgtagacccgaaaccaggtgatctacccttggtcaggttgaagttcaggtaacactgaatggaggaccgaaccgacttacgttgaaaagtgagcggatgaactgagggtagcggagaaattccaatcgaacttggagatagctggttctctccgaaatagctttagggctagcctcaagtgatgattattggaggtagagcactgtttggacgaggggcccctctcgggttaccgaattcagacaaactccgaatgccaattaatttaacttgggagtcagaacatgggtgataaggtccgtgttcgaaagggaaacagcccagaccaccagctaaggtcccaaaatatatgttaagtggaaaaggatgtggcgttgcccagacaactaggatgttggcttagaagcagccatcatttaaagagtgcgtaatagctcactagtcgagtgacactgcgccgaaaatgtaccggggctaaacatattaccgaagctgtggattgtcctttggacaatggtaggagagcgttctaagggtgtcgaagcatgatcgcaaggacatgtggagcgcttagaagtgagaatgccggtgtgagtagcgaaagacgggtgagaatcccgtccaccgattgactaaggtttccagaggaaggctcgtccgctctgggttagtcgggtcctaagctgaggccgacaggcgtaggcgatggataacaggttgatattcctgtaccacctagtatcgttttaatcgatggggggacgcagtaggataggcgaagcgtgctgttggagtgcacgtccaagcagtaaggctgagtgttaggcaaatccggcactcataaggctgagctgtgatggggagaggaaattgtttcctcgagtcgttgatttcacactgccgagaaaagcctctagatagataacaggtgcccgtaccgcaaaccgacacaggtagtcaagatgagaattctaaggtgagcgagcgaactctcgttaaggaactcggcaaaatgaccccgtaacttcgggagaaggggtgctctttagggttcacgcccagaagagccgcagtgaataggcccaagcgactgtttatcaaaaacacaggtctctgctaaaccgtaaggtgat

SEQ ID NO: 3379 - DNA, 1534 bp, Artificial Sequence
  Description of Artificial Sequence: synthetic nucleic acid sequence
tatctaaaacctcttcataaagtggacaagaaggtaaagttaagttatccatttgaactttaattagatgtaatattctgtctgcatctttattcaattggtcatatgccgcactatttaacttcgattggttagacatgacatattccccctatcgtttcaattaatatcttcacaatagaagtttatcctactgaatgttaaaaagcaagcgaatttaaattaagtgaaagcgattctatgttaaaataatgaaagataaaaatttagggagtgggcatttatgattcaaataaaaggagcagtcaatttccctatttcattggatagtacgacttggatatttgacgatagaaaagttactattgatgatttagaacgtggggtatttgatggtactagacccatcaactttgatgataacaaggaatggaaccgtgctattttagaaggacaaacaaatccaccaacgcttgattctgaaattaaatataaaaaacgatcggttttagatgaaacatttgtgaatatttatttttctttttatcttcataacgttctttagctaaatcaatcaatttagcaattaaatcagggtaagataagcccatatttttccataagtttggatacatactatatgcagtaaatcctggcatggcatttgtttcattaatataaatttgattatcatcagtaacaaagaaatctgcacgaactaatcccgaacaatcagtagctttaaaggcctctaatgccatgtttcttaatgtcatttgaacatcttgatctaaatctgctggaatatctaatctaatcttaccgtctttatactttgatttataatcataaaacgctacatccttaacaacctcaccaggccatgtcgtttcaggataatcgttacctaagacagctacttcgatctctctagcattaatcccttgttcaatgacaagtttacgatcaaattggaatgcttcagctatcccagattttaattcttcttcattgttacatttacttataccaacacttgaaccgagattagcaggttttacaaataccggatatgttaacttatcattaactaatttaatgatattattttcatatttttcatactcacttcttaaaaagctaatataaggtaattgaggtaaacctctatgctcaaataattgtttcatcacgagtttatccattgagcttgaagcagctaacacaccattacctacatatggtatatcaagtacttcaaaaagaccttggatagttccatcttctccatttggaccatgcaataatgggaatactgcatcatatgattttcctaaactacctttactgagtaactgtgagatttctccagtctctacatcgttaatgacgagttcatcagtattttttatttcttgtgtaatattatcttttttcttccattcaccatcgtttgttatataaatgatatcaacttgatatcgttctttatcaattgcgtttaaaacattttgtgcagttaaaattgaaacat

SEQ ID NO: 3380 - DNA, 3841 bp, Artificial Sequence
  Description of Artificial Sequence: synthetic nucleic acid sequence
tatatcgcttttgttgcttaaggtttaaatcgtaaccatcaacattaatggataacgtgtaatatttttctggtttaaaatagttaatctcatcttgtcttgatttaactatttgtattgttggagtttgtacacgacctaatgataattgtgcatcatattttgtcgttagtgcacgtgttgcattaatccctactatccaatctgcttcacttcgtgcaagtgctgcttcatataaattttgatacgcgtttccattttttaactgtttaaatccttcttgtatggctttttttgtaaccgaactaatccacaaacgcttgattggttttttattacctactttatctaaaataagacgagctactagttcaccttctcgtccagcatctgttgctataataatttctttaacatttttatctaaaattaaagattttacaattttaaattgtctatttgttttactaatcactactgttttcattttcttaggaatgataggtaagtcttctaaattccattctttatatgaagggttatattgttcaggcgttgcatttgtcacaagatgccccaatgcccaagttactatatactgtttcccttctatataaccattacttttttgttgaagattcaaagcattagcgatatctcttccgacagatggtttttcagctaagattaaagatttcattttaattttcctttcacatttataaaatacgtcatgttatagaattacatacattgtaacatgtatctttttgtaaattactatatataaaattaattaagatagttatatatacatatcttgttcaatcatatagttcaaaaacacattatcacttaatacgaatatttacttactaaaaatttcaacacttttaaggtgttgttttttacttctttttttaattactatagaatgatttcgagtgtaattgggacacttaattttgttcttaggagagtgagtaataagtgcaaattgtagattttttgatagcacttttaccagccctattttggggtagtgtagtcattataaatgtttttgtaggtggtggaccatataatcagattcgaggtacaactttaggtacactttttatcggattttctctacttgctactggacacgcagcgtttgataaccttacagtaattattgtcggtttagtatcaggagctctatgggcttttggtcaaggtaatcaattaaaatcagtgcatttaataggtgtatctaaaacgatgcctatttcaacgggtatgcaacttgtcggtaccactctatttagcgctattttcttaggtgaatggagcacgattgttcaagtagtgatgggacttatagcaatgatcttattggttgtaggtatttctttaacatcacttaaagccaaaagcgaaggcaaatccgataacccagaatttaaaaaagcaatgggaatattacttctatcaacaatcggttacgtaggttatgtcgttcttggagatatttttggagtaagtggtacagatgctctcttcttccaatcaattggtatggcaattggaggattaatcctttcaatgaatcataatacttcaattaaatctactgctctaaatcttataccaggtgttatctggggtatcggtaacttatttatgttctattcacaacctaaagttggtgtagcaactagtttctcattatcacaactgcttgttattgtttcaactttagggggtatctttattctaggggagaaaaaagatcgtcgccaaatgattggtatttggtcaggtattatcgttatagttatagcttcaatcattttaggcaacttaaaatagaattttaaactttagggaggtaacatagtgtttgaagaattagaaaataaagtggttcttattactggagctgccactggaattggcaaatctattgcggaaaattttggtaaagctaaggccaaggttgttataaattaccgttctgatcgacatcatgatgaaattgaggaaattaaacaaactgttgctaaatttggtggtcaaacattggtggttcaaggtgatgtttcaattgaagaagatattaaacgaatgattgaaacaacaattaatcactttggaactttagacattataattaataatgctggattcgaaaattcaatcccaactcatgaaatgtcgattgacgactggcaaaaagttattgacataaacttaactggcgcctttgtgggttcaagagaagccatcaatcaatttttaaaggaaaacaagaaaggtactattattaacatttcgagtgttcatgacactattccatggcctaattatgtacactatgccgcaagtaaaggtggcttaaaattaatgatggaaacaatgtcaatggaatatgcccaatacggtattcgtattaataatatatctcctggggcaattgttactgaacacactgaagaaaaattttctgacccaacgacgcgtgaagaaacaataaaaatgatacctgcacgtgaaattggaaatgctcaagatgtagctaatgcagtactattcctatcttcagatcttgcaagttatatacacggtacaacattgtacgttgatggtggcatgatgaactatccagcatttatgggtggtaaaggttaagtagcatttttcaattttaactagaaataaaatgtcataaattagtaatgaatagtagtcttaaaaagtatcagtcatcgactgaatataagtgacaaactataataaaaaagctatgaagatatctacaatgatacatttcttcatagcttttttagttatataaataagtatattgattatgcaatcaatttttatacaaatacagcttgataaatatacaaaatgataatgctaatatgaatatttagcaaacaattccgtttctaatgatgatcaattatcatctgaagaacagcagaaatacaatgaaaatactaacgaaaacaaacagaatagtcatgttgacttaaattcattacctgctacagattttcgaacagattggatgtctgaatctggtcaaaaacaagtgaatgatttagcaaaccaaaaagatagcggtcaaatttcacaatacgaatttaatgatcgcgtatctgatgtgatgaataatgaaatagataatcaacagccataattgaaatatagggtagcacgtctaccctttttatttagggagggtaaacacgtggcataagaaattcacctataaacatggtgaaactaaaaatcgctattatgagaagtacaaagaccctctcacaaacaaatgacgacgtgttagcgtggtacttaataaagaatggtaaacagtcacaaaaagaggctcagaagcgcttaaatgagcttatagaggcaaaattaaacgataagacacctactacacttaagtcactaacattccatgatcatttgatgagtggtttgaaagatacaaattaacttccggatttaaacaatctaccgttacaacgaaaagttataaaatagcgcacatcaaaagaaatattgataaaaatatactcgctcaaaatacgaatgctgatgttttacaagacttaattaattcttcattaacagagggattaagtcataaagtggttaaagatgatttgagtattataaaaaatatactacgctatactcaaaagaaatataacattactgataaatcttacatagatgatgtaatagtacctaaaaaagcgactacaatagaagaagttaaagcaaaacgtgagaactatttagaaatgaatgaagttcatcttatcgctgaagagtt

SEQ ID NO: 3381 - DNA, 4071 bp, Artificial Sequence
  Description of Artificial Sequence: synthetic nucleic acid sequence
gcttttctcaaattatctttaacacgttcctcattgactttagtttgatgttgttctcttttagcttgattttccttctctattttctcacgtcttatgcgctcttctcgctctacgttatgaaagtattcacgtcttttacgtcgatattgactgcgtggtatgacttgttttttattgttatccactagaagaccactcctatagtttctttaactcattctttatctgtaaaattcaagttattttaatactatatatcatcatcattttaaattcgtttataatctaaagtttaatattttaactataaaactgcaatgttctaataaaaattaaaataaaaagaacctccacttaaattattattaagcaaaggttctagcatatcaatcaaattatttttgattaccttttttcttgttgccaattgctgaagttaaccatcctattaaaactaagccaactaatactacccagaagattgtttgccataaagcactatgtggaaatgcttctggtaaaacgccaatatcaggatgtgcaagtaccattataacaagtttaatacctacccaacctacaattgcaaacgcagcaccttcaagtcctggatatttattcaacaattctacaaaccaagttgctgcaaatctcatcaagatgacacctatcattccaccaaggaacataacaataaattggcctaagtccataccaccaaaatgtatgccaacttttggtaatgtaacggctatggctaatgcggcaagcatcgaatcaattgcaaacgcgatatcagcgaattcaactttaaatactgttccccaaaaagatttagggcctacttctttttcgttgcctgtttcatcgaaatgatgttcgtctcctgtttctttatggtgtttttcatttgactgatggaaaaattgccataaatttttaatagacatatagattaagtaaacagcacctgctgcttgaatccaccagaagtttgcaataatacttattaaaaataaagcaataaatctaaaaatgaatgcacctaataggccataaaaaagtgcttttttacgttgtttaggtggtagatgtttaaccattaccgccattacaattgcattatcagctgctaataatccttctaaaaatacaagtactaaaagtacccataaataaggtaaaatcaaactcggatccattgtggacaactccttttagtttaaatacaaataaagagacctatgctaatttaatagcaaaggtctcacttagcaatatttttgcccactttaccggaagacttatcttcgtaatgacgacaaagtgttgaatagttattatcggtttaaatgcattcaataactattctcaagttactcccctctgacagttttgtcataggtatttatttgttattttcagtatacatactatgacactgcatagcaatataaacatttttcatatactatggtgtgcccgaatagtgatatgtttaaacattcaattataataaactatacagtttaatatcagagaatttttcttcaaaccaacgcgttgcaaattcattttcaaataggaatacataattgtcgtatctatcttttactaaaattgatctagaagtattcatattatctttaatatcttcttcattttcaatccaacgcgcaattttacgtccaactggttccataaccacatctacattatattcattattcatgcggtgttcaaacacctcaaattgtaattgacccacagcacctaagataatttgatttgtgtgcaacgttttataatattgaattgcaccttcttgaacaagctgttcaatccctttatgaaaatgcttttgtttcattacatttttggcagaaaccttcataaatatttctggagtaaattgtggtaactcttggaaactatatttctgcttaccaccaactaaagtatcgcctatttgatagttacctgtatcatacaaaccaataatatcgcctgctacagcatgattaacagtttctttatcatcggccataaatgatgtggaacgagttattttttgttttttattagttctttgtaaggttacatccattcctctttcaaacgcaccacttaccacgcgcataaatgcaattctgtcacgatgctttggatccatattggcttgaattttaaagataaacccagaaaaatctgtgtcgaatggactaacatcaacctcttctttagtttgtctcgcattaggcattggcgcatgatcaacgtatgcatttaagaaattttgtacgccgaagtttgctaatgccgatccaaagaaaacaggtgttaattcaccgttcagtaacgcttcattatcaaatgcttcacccgcttcatcgacaagcatcatttcttcaattgcttgttcaaatgcactatcattttttatcgcgtgttcttctttaagttcgtaatcttcgtttaaatgtaataaattttcttcatctctaaatggttcaatcgttttagagtgtctatcaataataccaaagaaattttgtcccataccaacaggccaattcattggataagtgtcaatattaagtgtttcttctatttcatcaagtaattcaaatggctctttacctactctatccaatttattgatgaatgtaaaaatagggatacctcgcattttacaaactttaaataattttaatgtttgtggttctataccttttgcacagtcaataaccataactgcactatctactgccattaatgtacgatacgtatcctctgaaaaatcttcatgcccgggcgtatctaaaatatttatcttataatcatcataatcaaattgcattacagagcttgtaactgagataccacgttcttgttctaccttcatccaatcacttgttgcaaatttacccgtctttttccctttaactgtcccagcttcacgaatcgctccactgaaatacaacaatttttcagttaaagttgttttaccagcatcagggtgtgaaatgatggcaaatgtctttcttgactctatttcttcttttaaattcatttatcattctcctttggattcatttctaatcaaatcagttatattacgtgccaatgcatctgcttcaacttcagtcaacaaattgaataattgcatcactaattcctcatatagctgatttgcatctaactctttggataactcaatggaccaaaaaagttctggaatagctaacatgattaaatcattagaatgataatgatatacgttcatcatcattccatgaaactgaagtgatttaatcctcaagaggtccaccaccaaatttttgatatgctgcttttaagccaattaagtcatcgcgatgtgggactttaacatgaccaggcataatttgataaggctctcgaccttttgaggccaaaacaactgtatcacctggttcagcaatatcaatcgcgtgtctaataccttctgcacggtcatcaaactctatataattgttatgcgttgcacctttagctaattcagctgtcaacattttaggatcatcgttagcaggattatctggagtaaaaataacataatctgctcgacatgctactctccccatctcaggtgttttcgttaaatctctttccccagccatacctactaaaaagattagcttttgtttaacaaatggttgtacagcatcaatcagtttattcataccatcagctgtatgtgcataatctataatcaaatctataggaagtgatggatcaagtacttctaagcgcccctctacaggttcaagctcagtaacagcattaataatttcatttaaatttgttcccttactccaaaccgcaatcatagcagccataatatttgaaatgttaaacctacctacataaggagatttaactggaaaacttccaaatggagtacaaaattcaaattctacaccttgcaatgattctttaatgtttttagccataaattgtgcttcgtgagtaataccatatgtaaatacttcatagggtgtcacacttgctaaataatcggagaag

SEQ ID NO: 3382 - DNA, 4805 bp, Artificial Sequence
  Description of Artificial Sequence: synthetic nucleic acid sequence
ctgtcgtaaagctggtattattactggtttgccagatgcttacggacgtggacgtattatcggagactatcgtcgtgttgctttatacggtgtagatttcttaatggaacaaaaacttaaagactttaacacaatgtctactgaaatgtctgaagatgtaattcgtttacgtgaagaattatcagagcaatatcgttcacttcaagatttaaaagaattaggtcaaaaatatggatttgatattagccgtcctgctactaacttcaaagaagctgtgcactgagagatcccctcataatttccccaaagcgtaaccatgtgtgaataaattttgagctagtagggttgcagccacgagtaagtcttcccttgttattgtgtagccagaatgccgcaaaacttccatgcctaagcgaactgttgagagtacgtttcgatttctgactgtgttagcctggaagtgcttgtcccaaccttgtttctgagcatgaacgcccgcaagccaacatgttagttgaagcatcagggcgattagcagcatgatatcaaaacgctctgagctgctcgttcggctatggcgtaggcctagtccgtaggcaggacttttcaagtctcggaaggtttcttcaatctgcattcgcttcgaatagatattaacaagttgtttgggtgttcgaatttcaacaggtaagttagttgctagaatccatggctcctttgccgacgctgagtagattttaggtgacgggtggtgacaatgagtccgtgtcgagcgctgattttttcggcctttagagcgagatttatacaatagaatttggcatgagattggattgcttttagtcagcctcttatagcctaaagtctttgagtgactagatgacatatcatgtaagttgctgataggtttccagttttccgctcctaggtctgcatattgtacttttcctcttactcgacttaaccagtaccaacccagcttctcaacggatttataccatggcactttaaagccagcatcactgacaatgagcggtgtggtgttactcggtagaatgctcgcaaggtcggctagaaattggtcatgagctttctttgaacattgctctgaaagcgggaacgctttctcataaagagtaacagaacgaccgtgtagtgcgactgaagctcgcaataccataagccgtttttgctcacggatatcagaccagtcaacaagtacaatgggcatcgtattgcccgaacagataaagctagcatgccaacggtatacagcgagtcgctctttgtggaggtgacgattacctaacaatcggtcgattcgtttgatgttatgttttgttctcgctttggttggcaggttacggccaagttcggtaagagtgagagttttacagtcaagtaaggcgtggcaagccaacgttaagctgttgagtcgttttaagtgtaattcggggcagaattggtaaagagagtcgtgtaaaatatcgagttcgcacattttgttgtctgattattgatttttggcgaaaccatttgatcatatgacaagatgtgtatctaccttaacttaatgattttgataaaaatcattaggggattcatcagagctgtgcaatggttatacttagcatatttagctgctatcaaagaacaaaatggtgcagcaatgagtttaggacgtacttcaacattcttagatatttatgctgaacgtgatttacaaaatggtgacatcactgaacaagaagttcaagaaatcattgaccacttcattatgaaattgcgtatcgttaaattcgcgcgtacgcctgaatataatgaattattctctggagatccaacttgggtaactgaatctatcggtggtgtaggtattgacggacgtccaatggtaactaaaaactcattccgtttcttacactcattagataatttaggtccagcaccagaaccaaacttaacagtgttatggtctactcgcttacctgaaaacttcaaaatctattgtgctaaaatgagtattaaaacgagctcaatccaatatgaaaatgatgacttaatgcgtgaaagctatggcgatgattatggtatcgcttgctgtgtatctgccatgaagattggtaaacaaatgcaattcttcggtgcacgtgctaacttagctaaagcattactttacgctatcaatggtggtaaagatgaaaaatctggtaaacaagttgggccaagttatgaaggtattaaatcagacgtactagattatgatgaagtcttcgaaagatatgaaaaaatgatggactggttagctggcgtatatatcaactcattaaatatcattcactatatgcatgataaatatagctatgaacgtcttgaaatggctttacatgatacagaaattattcgcacaatggcaactggtattgccggattgtctgtagcagctgactctttatcagcgattaaatatgcacaagttaaacctatccgtaacgaagaaggtcttgtaactgactttaaaatcgaaggcgacttccctaaatatggtaataatgacagtcgtgttgatgaaattgcagtagatttagttgaacgtttcatgactaaattacgtagccataaaacataccgtaattctgaacacacaatgagtgtattaacaattacttcaaacgttgtttatggtaagaaaactggtaacacaccagatggacgtaaagctggcgaaccatttgcacctggcgcaaacccaatgcatggtcgtgaccaaaaaggtgcattatcttcactaagttcagtagctaaaataccttacgattgctgtaaagatggtatctcaaatacatttagtatcgtaccgaaatcactaggtaaagaagaagcagatcaaaataaaaacttaactagtatgttagatggttatgcaatgcaacatggtcatcacctcaacattaacgtatttaatagagaaacattaattgatgcaatggaacatccagaagagtatccacaattaacgattcgtgtatctggatacgctgtaaacttcattaaattaacacgtgaacaacaattagatgttatttcacgtacattccacgaatctatgtaataaatttaaggtgggagcaaaatgcttaaaggacacttacactccgttgaaagtatgggcactgtcgacgggccaggacttagatatatattatttactcaaggttgtttgttaagatgtttatattgtcataatccagacacttggaagattaacgaaccatcaagagaagtgacggttgatgaaatggtaaatgaaatcttaccgtacaaaccttactttgaagcttcaggtggtggggtaacagtcagtggtggcgaaccattactacaaatgcctttcttggagcaattattcaaagaattaaaagcgaatggtgttcacacatgcattgatacttctgcgggatgtgtgaatgatacaccagcatttaatcgtcattttgatgaattgcaaaagcatacagatttaaacatattgataatgataagcacatcaaattaacaggcaaacctaacacacatattttaaagtttgcacgtaaattatctgatatgaaacaacctgtttggattagacatgttttagtacctggtatttcggatgataaagaagatttgataaaactaggagaatttattaattctttagataacgttgaaaagtttgaaatcttaccatatcatcaactcggtgtgcataagtggaaaaatttaggcatcccttatcaactcgaaaatgttgaaccatctgacgatgaagcggttaaagaagcttatcgctatgttaactttaatggcaaaatacccgtaacattatagaaagataaatatagtaatagcctgagacatcaatcgttgtctcaggcttctttacgtttaatcagtcgataaactgagtataaaatatatctcaattaactttatttaataaaaatatgattcataagtttaaatagtttatttttctagatatgctttaaatacatctttataaacatcgatgtaacttaaatacatatcttttctaataaattcatcaacttgatgcgccataatagattcaccaggtccaaagacagcaaaatccacgttattttcatttgttcctaggaaactagatgcatcagttgtaccaatcaatgcactcacaacaatgtcttcatgtacataattcggtgcaatacgtgtaatattttgaataagaggattatcacgatcacttgccactggatcgtgactgctaggtatatctacagttaaataatcttcgcccacatgacgaatgactttttcaaataaatccttcacgaaagtactgtcatattctggaacagttcttacattatatttagctgtcgctttatgaggaacagaattaacttgtttaccaccattgaatacagagtttaacattacaaatccagagtagatatgtgattcttcttcaccaatttttctgtggagatgtttctcaatcattggaacagcgtctaactcgtgtactttatcatgttctttaatatttttatattcttgtttcatttcatttacaaaatcaactaaaatatcaacagcatttgtacctaggtgtggcatggaactatgtgcagccttacctttcgctgtgactacacagctcatagaacctttatgagcatagtaagcgatattactagttggttcgccaataattaaaccactcacatcatctaagtaaccttcatcagctagtaattgtgcaccatattgtt

SEQ ID NO: 3383 - DNA, 3038 bp, Artificial Sequence
  Description of Artificial Sequence: synthetic nucleic acid sequence
gagataatcataaaaattagatactacagtcatagtcagattaattgtcttaggactaatgcttttttcttttcggtgataagagaggacattctcatattcaaaaggtgttttcatccatcttataaaatcaacaaagttatcaaaactaacttctttatagcatatctttttactttctaagtaaacaaaaaaattttttagtgcataggcataggttttcttggtatttaaacttttcttaacactatccagatacttcaaatatcttactgcatctactataggttcattattaccatctaaaatcataaaattggtaccattcttagattttacttctactattttcataataatctcatttctaattttaatagtataagtatacactattcaaattctttttacatcatacatattaaacttattacacgtaataaaaaaagactatttaatatttttactttgttcattttttcttaaaatatgattcattttaaacaaaatagtctatattcttcaacatatatataaccattcgcaactttaccagaacagtttgaaacaatttatcaatatatgatagatcaaaataaagtgagcagaccagtgctttcagacgaccaactttcgcaactaaatatacatttacatgaagcactacaacaatcacgcccagtcaatatcaaatattacgaagaaggatatattaattttatagagctcattgtacatcggattgattcaataaattatgagattgaaggtactgctcctcattcaagagaacgtcataaagtttcatttttagatattatagatatttcttttatataaagagtacaagagaatttattatgaatttctcattttacacttatataaccaccaacatacttagtgttatctaaagcctttctgaatgaaatcatttaattattaattttagaattcaataattaattttgactgataattggtaaaatcaactaataaaaataagcctacacatctcaatgatgtacaggcttattcctaaattattataaattaattgttgttttcgatatcagaaacgatttctttcgtttttctttcgatatcttcaaagtcttttttaaaaatataagcaaaggcaactacaccgatgcctactactactgtagtaatagctaataaactaaagacaaatttgaataaccctttaataaagttccacattagttttcacctctataattaatatgcatagctacatttcataatgataacatacttaactttatcattaaatatataccctttttacaggtaattattctaaatatgaatataaattatgataatatatcaactaaagatgcttaaaatgaaacaattaaatgatttctttaatcatggtacacacacagattaacttagcaaccaagattttaatttatcagtgattactttgtaattatcaatattcagaatgatcactcctattgagataatgtcattatcttaatttagattgtatgatttacgcaaatcaagttcaattaataataagttacttttatattacattgaagtaaaaatataaggagagattataaaatgcaaaaagtacgttctgatataatgactcatcgtggttctcactatgatttaggagtaaagactgctctttggttacaaaccactcctttattaaaaaatcgaaataaagaatggcgaaagagaattccacgttttgatattgatgtcaaggaaacctatgatatatttcaaatctattcgccacagatttgggaagaaataattggtatgcaagatgtattgaatctacctacaaaacaaatgattttaaattttggccattatcgatttactgatttaaaggacagtggttgcacagtatataaaggtcgtgattttttagtccgaaattatgattatcatcctgcaacatatgatggtagatacttattatttcaacctaatgacgggggattatctcaaataggaccgacttcaagagtgactggtagaatggatggtatgaacgagtatggtttagttatggcatataattttatgcatcgtaaaaagcctgcaaatggatttgtatgttacatggttggtcggctaatacttgaaaattgcaaaaatgtaactgaagcaatcaaatttttaaaggaagtaccgcatcgtagttcattcagttatatactaatggatagacattcgaattatgccattgtcgaagttacacctcgatcaatagatgtaaggtatgaacatatatgcacaaatcattttgaattgcttacccatgaaaatagaaactatacaagagaatctaaagaacgcttaaatcgtgtaataaataaaacaactccttctacaaacaaagatatcgcattcaaattatttaacgacccgcaatacgaaatctatagcaacctatttaaaagttggtctggtacaattcatacttcactatatgaacctaattcattaatatcatggatggcattaggtcaaaacagtcatccaacctcaatcaatttttctaattggttaaaaggaaagaaattgaatataaattactttgaaggcgaaatagatacaccattaacttttgccacatactaattaaaaattcgaccctatcttgataaatcaaagggtcgaataatttatattatttattcaattttaatatcgccatctacagtgtaaaattccaatatattatcgctatttcccacttttcctttatcgaaatatcgatttttaatttctttatttccatgaccaggatgaagtttaagcaaagtgtttttaggtttttcgccaaaatgataattaatattacctctttgtgtagaagcttttatatcattgttagatttcatgtccgtcatagaaatatctcctctattaaccaagaaaacagtattagcactctcgtcaataatattaacagcatgtggacaagaaaatgtaaaaaaaaacagaaagcaatccaaaagaagaacaaaata

SEQ ID NO: 3384 - DNA, 3734 bp, Artificial Sequence
  Description of Artificial Sequence: synthetic nucleic acid sequence
tctgcaccatattttactgcttggctcacttcgtaatctgctgcatccataattttcaagtcagctaatactttagcattattaatattttcatttaaatgttgaactgcaggtaacccttcattaattacaattggcgtaccaatttcaacaatatctacatattcttcaactttttgagctaattttgctgcttcttctttatttaataaatcaatggctaattgtagttccaatgaaattcatcctttcgttttgggaaattctcttttgcttatagttgtatacccttcgctaaacttattaaacatataaaatattttgtatataaaacaactatataattataaacaatctggcgctgcttcatcgtctacataaacttcaacattagggtgtgtgtgtaaaatggtcgcaggtacatcttcggtaacctgttcatttaacagtttacttatagcctcttttttctttggaccaaatgcgagtaggataatcctttttgcttttaaaatactttttacccccattgaaactgcttgtctaggaacatccttttcattgtcaaaaaatcgactatttgcttttatggtgctttctgttaagttcaccacatgtgtttcactattgaagtcagtccctggttcattaaaaccaatgtgaccattttctccaattcctaaaatttgaatatcgattggccctctttcatctaataaattgttatatcgttccgcttctgcttctagattttctgataagccatcaggaatatgaatgtgatttttaacaaaatgaggatattgctcaaatagcactttattcatgtaggtatggtaactttgttgatgacttgcttttaaacctacatattcatttaaattaaatgtttcaacctgcgacacatcaactttatttttgattaataaatttactaagtaatgatatacgtcagtcatagttccaccagttgctaaaccgagtttggcatgagggtgctgctgtatttgtttaaacaactcgcatgctacataaaatgacgcaagattttttgaatctaaattaataattttcaatatcaaacacctctaatttcaatatcacaatgattgatgactaacgccttactcttttatatctcttaaattatactgtaacaaatgattaagattttaaacatattaacgctctatatgtaatattcaacgttatttcttgaatttttcctaattaaatcgagcattcgtgtacaaatatacatagctttctagtaaaatagatagataaacgagtttgctggtaaataatatgtttatcggtagtccgtcactgacatattgtttagtttaagggagtgaacgtgttggaaccaattaaagaacaagaagtgctagatttattaacttcttactcaaatcagcctgtttacctacacgttgaaacaacaaatggtgcttatgcaaatcatttcgatcaacgcgtatttaacgctggaacatttttaagaaatattgtcgtgacttttgaacatgcacaacttaaaggcggcgacaaagatccatatcgtgtaggtcttaaattaaaagatggtggctgggtttacgtgcaaggacttacgcactatgaagttaatgagaataacgaatttttaattgcaggttttaattatgaaggacaattggctgctacaatagaaataagtaaacagccatttactatataaaggaggttgccaatcatgactgatgaaagacacgtacttgtgattttcccccatcctgatgatgaaactttttcgtctgctggaactatcgcaagttatattgaaaaaggtattcccgtcacatatgcatgtcttaccctaggacaaatgggacgtaatctaggtaaccctccttttgcaacaagagaatctttaccatttatacgtgaacgtgagttagaagaagcatgcaaagcaattgggattacagatttaaggaaaatggggttaagagataaaactgttgaatttgaaccttacgatcaaatggatcaaatgattcaatcacttattgacgaaacaaatccatcattaattatttcgttctatcctaaatttgcagttcaccctgatcacgaggcaactgcagaagctgtagtacgtacagttggacgcatgcatgaatcagatcgaccccgtcttacacttgtagcgtttagcaatgatgcatcagaaattcttggagaacctgatattcaaaatgacatatctcaatatagtgatataaaacttaaagcttttgaagcacatgcttcacaaacaggaccatttttaaaacaacttgctagtcccgaaatagatggtcaagcacaaagtttcttaaaaatagagccattttggacatatcactttgaatcttaaatggaggtaaaacatgacagaatttgacttatccactagagagggtcgttggaaacatttcggttctgttgaccctgtcaaaggtacgaaaccaactactaaaaatgaaatgaccgatttacaaagtactcataaaaatttcttatttgaaatagaggaagtaggcattaaaaatttaacttatccagttttaattgatcagtaccaaacagctggtttatttagtttttcaacgagtttaaataaaaatgaaaaaggcattaatatgagtcgcatattagaaagcgttgaaaaacattatgataatggcattgaacttgaatttaacacactacatcaattgttgcgtactctacaagataaaatgaatcaaaatgctgcaggtgttgatgtgtcaggtaaatggttctttgatcgttatagtcctgtgactaatattaaagctgtaggccacgcagatgttacttatggtttggctattgaaaatcataccgttacacgcaaagaattaactattcaagccaaagtaacaacactatgtccttgctcaaaagaaattagtgaatattccgcacataatcaacgtggtatcgttacagttaaagcatatttagataaaaataatgatgtcatcgatgattataaagataaaattttagacgctatggaagccaacgctagttctatcttatatccaatcttaaaacgtcctgatgaaaaacgagtaacagaacgcgcttatgaaaatccacgatttgttgaagatttaattcgactaattgcagctgacttagttgaatttgactggattgaagggttcgatattgaatgtcgtaatgaagagtctatccaccagcatgatgctttcgcacgtctgaaatatcgcaaataaaacattgaatttcaactacaatgccagttgtatttttagtttataagatgcaactggcaattttttagcatcatcaatatcgatgatacataatgtaacacaaaagaaactcaccccatgctaaacattcaatgttgaatttattaaaggtcgttacgaatctaaataaatcagaaattctagatttaatttattgtagtgtatttatgcacttgtaatttacatacatattataacgtttacaaccaactttaagtcatcagattaaagtatttattaatcacacatacgtgtttactaacaaatgaacttcaaacaaatgcatcaattcaattataggttacctgagctattgacaaactatttacatttaatacattcgactagtgaaccaagaatgtgtcatgctatgaagaaaggtgaaattcatgattactg

SEQ ID NO: 3385 - DNA, 2982 bp, Artificial Sequence
  Description of Artificial Sequence: synthetic nucleic acid sequence
atattgatactttcaatctactgttcaacatctttttaggtaattgactctgtatatatgctttatgctttgtataagacgttggcatgtatgtttggataaacttacctgcattcctaaaacgtggacgaggagagccgataggttccttatacgtatcgttaaaattaatctctatttccataactcacctcaaaataataattcgttaattgtcatctgttgttgcagttcttcttttctgaacaacttatgtttacgtttaagtttttctagttcatctttcgttactgttcctgagaatgtgtttctaaagtgtatgcctgcatagttacctagtttgaatgtatcttctcctaacggcgttacactacacatctcccaaccgtcaatttgatacaacatgtattgctttttaagtccgtcgataagccccatctggttgcctccatttcgtttcattcatgattaattcctgaactttttcatattcgtcaaatggtgatatcgttttgttttctaacaaacgtttaactgcccagcctgactcaataagcgtcttagctattaatgggtcgttttgataatcttctcgatacataacgcctaacaacttttgatattcaactactttcatgtgaagaacctctgcgttttcttgtagtactcaaactcaactacacctgtttctccgtctttattctttgcgatgttacattcaacaattgacttgcctgagtcatcaacatcatcacggttgtagtaatcatctcgatataacaacatagctaaacttgcatctgcttcaattccacctgcttctttcatgtcagatagcataggtcttttgtcatttcttgtttctacacctctgctcaattgagatagcaacacaataattgcacctgtttcatttgcaataatcttcaaatctcgcgatatcttttcgataccattacgacgatctaacttactgtctgtctgcataagttgtaagtagtcaatgaagataacctgttgcacatctttgttcttcatcgcttgtttacgtacatcatgtgtagtaatattgcttttatcgtgtatatctatatcaagtttgagtattctgtctgctgcagttgttaaacgtgttaattcatccggttctaaatctttaatttctttgatacgagttagttctatcccagtttctgctgataacatccttttcaatacagacacgccagttgtctctagactgaagaatgaagttttatagccttgagacgctatattaagcatcatattaagcgcaaaccccgttttacctactgacggtctcgcagcgattacaatcaactgtgtaggttctaaaccacctattttgtaatccaccagtttataacctgtattgattttttgttttggttcttcgctatataattcttcgacaaagtgatctacaatttttttagtcccactttcttcacttgcactaattaaactgaccttttgtagtttgttaagcatttcatcaaaattttgtatattcggatcagaattgaattcttgtaatacgttttgcgtacgctctatttgataaagattgagcaaatcttgttgatatctttcaaagaatccgtaacctataaattttgagttatacaaatttgaaatggtgtccatatctaggaatgacttatcttttgtggtttttaaatagatttcgttatgatctaccttaccgacttcgaatacatattccataaatgacttcataccatcatgtgagaacatttccggtctcacacgtaacttctcaattatgtccggtttttgaagtaaactagcaacgattgtactttcgatttcatgacgttcattcatcgtcactcactccaaactcacttaacttctttctgaagtcgtctaatatctttttacgttgtgctacgtattctggatcatttttcattctccaacgatgtctagcagttttttcgtcgacaggctcttcttttacgactttgacttcttttctcattatgtttggaatactaggtggataaggattagcatcattgatatattgcattactgtttttttagtcggttcataatccccattttggctcaaaatgttaacccatgtttctaatttaggtctgtcaaagtcaatgttgtatacatgtctaattgtcttaattacttctagggcttgttgtttagtcataggcattaactttcatctcctagctctttctccatttgagcaattacatcatctgttacagtttttttatttttaggtttaattttattttcagcctcttttttattcttaacgttctctttagcccagttgtttaacactttgattaggtaacctgcatgacaacctttgtcttttgtataatcagtagctacttcaacaacttcatctgcatgttgtccaatatcatcaatggcatatcctatctgttccatttggttaggagttaaattatgagtaaggttactcatgatgtaattaattgagtttttgaagatatctttatctacttctttttctctttcttcttctacttctttatcttcttctatatctgttgcgtgactgtcacgtgacttcacgtgactatctaaaagtttttgtttttttctttgcttttgtttacgcaaacggttttgttctcttatcttttctaaaccttcgatgttctgatgtttttcccaattagatactttaaagacaccattcacttcttcaatcatgcttagcttttcgaatgtttgtaacgctaatcttattgaattgataggtctattaaattcgttagctaacatttcttcgttatagggtagactttcggataacataatgtatccttgttcgttatactttccagctaatgtcagcaacttaacccataaagtgatgattgtatctcgttctggcagtgcttctatatacttgattttgctatcatcgaacattcc

SEQ ID NO: 3386 - DNA, 3202 bp, Artificial Sequence
  Description of Artificial Sequence: synthetic nucleic acid sequence
aaacatcacctttaaataactgattaatttgatgaataatattaattgaactaaaatcatccgttaatctcatggaatatgcataagaataattccaattttttaaatgtgccaaaaaataatctaaagattctacagtttgcgatatgtcatcaataatatatccattatgcatatgtttaacataatctgttctctttttattaatttgtggtatacccgcgccaatacaacagatttgtaaaaaaagtttcggctctaaagataaatctactacaactcttaattttgaaataacgcttacaagatcttcttcaaacggtactgtttcaatatcaatgattgtttcttttttattctgtatcacgtcttcaattacatcacttatttcctttttctcttggtgatataaatcattgagatgagcaacttcatctataagattttccgtaagattatctctactcttagttaaaattttcaacttatagccatctttatgttgaatatattgaaataagctgtttacaatctctcgtatttcaatctcgtccaaaccatctatccataatccaatataagtgtcatacaattgactactttggttaggtaatgacttcgcatcaaaaggcgttacccttaaaagattaatatcattcatgttcaatcctgcgtagtgttcaatcatattttgattagcttgtgtatcaacgagacaataatatgctctagaaatagagtcatataaatcttgtgtcaccactttatttctctcagtaaaaatagaaaaacataaagacgatgcatcaatagtgcgtgccatcattgaattatgacgttcatcagatgccactataacagaatcatcttcattcaattctctttctacatatgattggaatttctcttctatcaactcagccatagatgaatacgtaacccttttaaattttgattggaaatttttattaatcgttactgtattaacatttaagtcttcaacaaatatttcttccccatcttttgaaaaatagtgttttttattgttatcaccatcaggtgtataagtacgcactgccgatataaatcctctgtcatcgaatacaaatcgtctttgaattgtactatacttgtaatcctctacccacatcaggtacccctcttggctgaagtgaattttagaaaacgtgttatcacctgtaatcgcttgaatttgaaagggagtaaaaataaattcagtgccttctggccatgaaagatcgcgataatcaatagcttgaggcgtttgatgtccaacgccctgtatctcatcaaatacagaccaataatgactttcatacaaatcatatcgatggaggaatgttctaagatatggactaaaatttaaaactatcaattgataatccacattattcgaactatgcattgtcattaaactaatcatatcgtcaaaatctgtatactgtttttttagatagaatggtcttgaggtactttcccaccatctgttacggctataccaagctggtataaatcgtttcatattccaaaacctcctccctaccaatatttatttaaaatttgcttatagctgtcaaagtataagtacgctttaattactatgggaggtttaaagcacggaactgttccaatatttgaaaaaggaacatcaagctatgttgaccctatcccccaagcattgattttaacagctatcgttatcgcctttgctacaacagctttctttttagttcttgcatttagaacatataaagaactaggcactgataacgttgagctaatgaaaggagcgccagaagatgatagagagtaacttgcttgttttaactttagtcatacctatcctaactgcaattttactcatatttattggaaagcgcccaataataaaaagatatgttgcacttgtcggtacattgctaacattggtcattgcattgattaacttaaagaatgtgctacgagatggaccaatcaaggttgaactgggctcttggaaagccccatacagcattgtatttgtagtcgatatttttagcgctctactcatcatcacaagtattattattaccatattagtcattttatactcatatcgttctatcggtttagatagagaacgtcattattattatttctctatcatgtttatgttgattggtattattggctcatttacaacaggagatattttcaacttgtttgtgttctttgaagtctttttaatgtcttcatattgtttactcgttattggtactactaaaatacaattacaagaaacaattaagtatattttagtcaatgttgtttcatcgtctttctttgtcatgggtgttgcagttttatattcagttgtaggaactttaaatctcgctcatattagtgaaagattgtcacaactttctgtacatgacagtggcttagtcaatattgtttttattttatttatctttgtctttgccactaaagcaggcgtttttcctatgtacgtatggctacctggtgcttattatgcccctccagtagcgatcatcacgttctttggtgcactattgactaaagtgggtgtatacgcaattgcgagaactctaagtttattctttaataatacagtaagcttttctcattatgtcatccttttcttagcattacttacaattatttttggatgtataggtgcgatagcttactatgatacgaagaaaatcatcctttacaatattatgattgcagtaggtgtcatattagttggtattgctatgatgaacgaatcaggcatgactggtgcaatatattacacactacatgatatgttagttaaagcttcattgttcttactcattggcgtcatgtacaaaatcactaaaacgactgacttacgtcattttggtggcttgataaaagggtatcctattctaggttggacattctttattgcagcgctaagcttagcgggtataccaccttttagtggtttctacggtaaattctatattgttcgagcgacctttgaaaaaggattttatctaagtggtatcattgtacttttatcaagtttaatcgtgttatattcagtcatacgtattttcttaaaaggatttttcggtgaagttgaaggatatactttatctaaaaaggtaaatgttaaatatctaacaactatcgctgttgcatctacagt

SEQ ID NO: 3387 - DNA, 3618 bp, Artificial Sequence
  Description of Artificial Sequence: synthetic nucleic acid sequence
caaaatactttaatatttcagctgcaacatgataatctctcaaatcctcatcaaaaccaagagcaagatttgcagtaactgtatcataacctttttctatcaactcatatgcgcgcaacttattaattaaccctattcctctaccttcttgaggtaaataaataatcattccaccatgttcgtcaatatatttcattgacgcttcaagttgtgccccgcaatcacatctttgactatgaaaaatatccccagtcagacaagcagaatgcatacgtacattaggattgctttttaaatctcctttaacaatagctacgatttcttcatcgctataatccgttgtaaatccatacatatcaaaatgaccaaaatcagttggcatcttgacctttgccttaagattaacattaagttcaacagccttacgaaaagcaaccaaactttttatagtaatcatttttaaatggtggcgttctttaaatgactggagatcttcacccttagccattgtcccatcatcattcataatttcgcagattactccagctggttgtgctcctgttaaccgtgccaaatctacggcagcttcagtatgaccattacgtgttaacacaccattctcttttgctataagtggaaataagtgccccggacgatgaaaatcttcaggattagtattttcatctatgagtgctctagccgtttgtgtacgttcatgtgcactgattcctgtagtagttttataatgatcaatgcttacagtaaaatgtgtgccataaatatcagtgttattttgctccatagattgtagttttaatctttcagctatagatttatcaattggtgcacaaatcagaccacgaccctctttagccataaaattaatggtattatcatccatccattccgtaacagctacaagatctccttcattttctctatcttcatcgtcaactacaataatgctctctccatttcttaaagcctctatagccaactcaattgtatcgaattgcatgtgatattcctcctaaaaaccaaatgctctaagcttttcttctgttaactgcgattgattttgattcatgatgttttcaacatatttgaatagtacgtcagactccaagtgcactttgtcgcccacttttttagatgaaagaatagtagatcgacgtgtttctggtataagatgtatatcaaaagtataatcatgtaaatcaaatacagtaagactaactccgtctacagttatagaaccttgctttaccatttgattcaaaatatttttagttgttttaatagaaataatttttgagttagcagtttcattgattttagaaattgttccaagctcatcaacatgacctaacacgaaatgtccaccaaatctcccacttccactcatggctctttcgagattaacttctgtattacgttgaacacttccaagatatgttttgttttcagtccctttgatgacttgaactgaaaaacttgagtcagtgaaatctatcacagttaaacatgcaccgttaacacttattgaatcaccaatatgcatatcaactaaaatgttttgtgctttaatttcaagcgttcttactgattgttcagagcgaacttgttgtacagtacctatttcttcaatgatacctgtaaacatagacattcacttctttcgtaatttcaattttaaattttgattaattaacttggaatcaacaatttcaaattgagttgcttcaggcaaatcaatgacctcgtcagtcttataaaattgatgtttgccagaaccaccaattaatttcggggctatatataaaatgagttcatttagatgtttggattggagaaattgagatgtaatatttgggcctgcctcgactagcagtttcccaatacctctttgatataagtcttgtaatattgtcgttgtatcacaattactaatatttattattttaataaaacttttatttgtttttaatttttcattttcagtgtaaatccatatctccgatgcagtatctttaaatatttgttgattaaaatcgagttgacctttcttagaaagaataactcgaatcggatgctttccatcaggaaccctggttgtatacaatggattgtctgcttcaatggttctacgcccagtaataactgcatcatgctcatgtcttaattgataaacatcttctttaacttctttgtttgttatccacttactttcattaaagtctgttgcttgtttaccatctagactagatgagacctttacagttacttctggaacttcgtttcttttagcagtaaaaaagtcacggtataatgcagctgcattttcattatattgaaattcaacctctataccagcttctctcagaatctcgtcacccttacttactaaagtagtatctttaacagcatagatgaccttagatatgcccgcttcaatgattttatgcacacaaggtggtgttgaaccatggtgtgtgcaaggttctaatgaaacgtatatggtagcaccttgggtatttaaacctgccatttcaatagcttgtacttcggcatgtttatctcccttttttaaatgtgcacctaaacctacaatcctaccgtttttaacaacaacggatcctactggtggattaacacctgtttgtccatttaccatttttgctagttgaatagcatcatccataaatctactcaattgatcacctcaaaaaaaaccttatacctatattgtaggcataaggagatatctatatctttaaataagcctattagcatacttaaaattgcacataagtatacaatacgcttatcataactacacgaatttgtgtaagtcgataattcaacttctttctcccatccagactctaactgtcggctctagattcacactagatcagccactaacatcaaaaacaatattagtgggtcgcaggctcaatttactgccggttgggaatttcaccctgccccgaaagaaatatatgaaattgttatgattaattgagtccagtagttcttcactacattgtaaatcttactatatttaaatttaaaatacaattttatagcttactttattaaaagattttatgagaatatattaaactcacaaacacgcttaatgcatattacttatttctattttcctgtgttatatataattgagatactgtatcaacaacttgattaacaatcatctttacgccatttctaagtttattgacaccgttggtcatttgtccaattgcaatcacattttttaaggttccatatctggggcttatgacttgatttgtttctgggataatttgaatgccacccataggatgacgttgaacaatttgtctattttctaagtttaaaattaattgatcatcctcatctaattgagaaagatgtgttttagagcccgttgcattaataacgatgtcaaacaactcataattttgcgtagtgtcgttatacttcaacattaagaggaatcctgcacaaaaatgtctccattcggtagccatttttgttaaaaacattgatttgacagtgtcaaatagaattcctttttatgcgctgaaatttgttatatggagactgaatgta

SEQ ID NO: 3388 - DNA, 3382 bp, Artificial Sequence
  Description of Artificial Sequence: synthetic nucleic acid sequence
gatttagaacagaatgttacagttacacaagttaatgatgcatttaaaaatgccgatttatcaggtgttcttgatgttgaagaagctcctttagtttctgtagactttaacacaaatcctcattcagcaattattgattctcaatctacgatggttatgggacaaaataaggtgaaagttatcgcttggtatgataatgaatggggttattcgaatagagttgttgaagtagctgacaaaattggacaattaattgatgataaagcaatggtaaaagccatttaattaaatatttatacttacactaaacctgagatagccatattatctcaggtttatttatatacaaatagccctaaacaaagttgaagcaccattgatgttattatagataaccaattagctttagacatatttctagatactttctttataaaaaaatgatccatagtcattatttattaatcaagttgagatgattttgaaatgaggtgattttaacgaatcatctttcaaattataatttaataatggtacttttggtcgtatttataaaattgtgtagtacatttaaatggttgaaattcatttaatatggttaatcacgttaaaatgtattatttttaataaataacatagcattctaaaacctttatttataagacaatttttccttttttacacatagtggtattaacaatgtatcattacattctttcgtttatagttgcaattgacctttcttttttacacagtacttttatagtataatgtacggtgattaaacttgggagggtgacatatatgaaatgcccaaaatgtaattctacacattccagagtggttgattcaagacatgcagatgaggccaatgcgattagacgtagaagagaatgtgaaaattgcggaacgcgttttacaacatttgaacatattgaagttagtccattaatagtagtgaagaaagatgggactagagaacaatttttaagagaaaaaatattaaatggtttagtaagatcttgcgagaaacgaccagtacgttatcaacaacttgaagacataactaataaagtggagtggcaacttagagatgagggacaaactgaaatttcttctagagaaattggagagcatgttatgaatttgttaatgcatgttgaccaagtttcctatgtaagatttgcatctgtatataaagaattcaaagatgttgatcaactcttagagtcaatgcaaggtatcttgagtgataataaacggagtgataaatagatggggttacaaacctatgaatatggtctaaaaccacaagatggatttgaggtgattacacatttcgaattcacctcacaacatttagatattttaaatcgactattcacccctttaatcggagttgaatcaattggactctatcattttatgagtcaattcatagataaaagtcaacaactcgggttaacgcattatatattcatgaatgaactaaaaattaacttattagatttcagggagcaaatggacaatttagaggctattggattgattaaaacatttgtaaggcatgaagaaaagtactctcactttgtttatgagttaattcagcctccaacagcctatcaattttttaatgatcctatgttatcagtatttttatttagtgaggttgataaaaaacgttatcaagcacttaaatcttatttcgaaaaagatgagaaagatttaagcaaatatcaacagacaactagaaaatttacagaagtattcaacgtacctaaaaaggtcaatgtttctgatcaaattaatttaaagcaaatcaaacactatgatggtatagatttatctaatgaaacttttgattttgaaatgttgagacagatgttgaaccatcattttattagtaatgaaattatcgataaagaagctaagaatttgattatacaacttgcgacactttatggaattactgaagatggtatgaaaaatgttatattaagttccattaccagtgcacaacaattatcttttgaagaaatgcgtaagaaagctagaacttattacctgattgaacatgataatcaattaccaaaattagagcatcaaacaaataaaattaacgatgaaaaaaaagatcgacaagcggaagatacaacaaatgattggttacaactgctagatgaaacaagtccgattgatatgttagcaagttggtctgattcggaacctacacagtcgcaaaaaagtatgatagaagaattgattaaccgtgaaaaaatgaattttggtgtaatcaatatacttttacagtttgttatgttaaaagaagatatgaagttgccaaaatcttatatttttgaaattgcttccaactggaagaaaattggtatttcaaatgccaaacaagcatatgaatatgcattacaagttaatcaacctaaaaattacgaaacacattctaatgataaacgacagaacaatcgtggaagacaaaatcaatttttatccaaagaaaagacacctaaatggcttcaaaatagggacgatcaagaagaaaataaagaaataaatgatgacactctcgaagaagatcgacaagcatttcttgaaaagttaaatcaaaagtggaaggaggaagataactaatgaaaagtttcagaaatatcatgggcgattctcaaaatctagataaacgtatacaaaaaataaaacaaaatgtaatcaatgatactgacgttaaacattttcttgagaaaaatcgtagtaatataactaatgagatgatagacgaagatttaaatgttcttcaagagtataaagatcaacaaaaagtttatgatggacatcgctatgatgattgtccgaattttgtaaaaggacatgttcctgaactatatattgaaaatgaaagaatcaaaattagatatctaccttgcccgtgtaaaattaaacatgatgaggaacgatttgattcacaacttattacatctcaccatatgcaaagagatacacttcatgcaaagctcaaagatatttatatgaataatcgagagagacttgatgtagcaatggcagctgatcaaatctgtacagcaattactaacgatgaaaaagtaaaggggttatatttatatggtccttttggtacaggaaaatcattcatattgggtgctattgcaaatcaacttaaatcgcaaaagatttcatcaacaattgtatatttaccagaatttattcgcactttaaaaggtggctttaaagacggtagttttgagaaaaaattacaacgtgtgcgagaagctaatattttgatgttagatgatattggcgcagaagaagtcacaccgtgggtaagagatgaagtgattggtcctttattaca

SEQ ID NO: 3389 - DNA, 3053 bp, Artificial Sequence
  Description of Artificial Sequence: synthetic nucleic acid sequence
caatggctttgggaaacttcactttatcaaaaatggttgatttcttttattttaatttgcaatatatttggtacgatatacggttatcattggtatagtagtcaattagctaacacaccaaattattttaaattatttgttccagatagtcccactgctacattatttttatgtttatcattattattcatactatttaataagcgttatgccctgattgacgctttagcttttataactctatttaaatatggtagttgggctgtaattatgaatattttgatgtttataaaaatgaatgatattgccataaacggacttatgttgctcatttctcacgcaattatgatattagaagctatctatttttatcctcgttttaaaatatctaaattggctggattgatgagtttcatatgggtgacgatcaatgacgtaatagattacatatacggacaatatccctactatgattttatcgccaaacatttaattgaagtaggggtattggcttatagtctcactatcatttcgtatattttatttttaaaattacaaaagtggttgaaagttaaaacatttgattaaagacaaatttgacagtaaaatgaaaataaaggagagtgagtttaatgtctttaatatcaatgattatatatttcgtaatattaatggtcattccaatgtgggctcaacacaaagttaaatctaattatgaaaaatactcacaagtgagatccacaagcggtaaaactggtcgtgaagttgctgaagaaattttacatgctaatggcatttacgatgttgacgtcgttaaaggcgaaggtttcttaactgatcactatgacccaaataaaaaagttgtttgtttatctcctgcaaactacgatagaccatcagttgctggtactgcaattgcagcccatgaagtaggacatgcaattcaacatcagcaaggatacgcaccattaagatttagaacagcattagtaccattagctaatattggtagttctttaagctacattattattatggtaggtattgttttaacagctctcggtagtgtctttggctctacagttctatgggttggtgctggtttaatgtcacttgcagttttattctctatcgtgacattacctgttgagtttaacgctagttcaagagcgatgaaacaaataacagctttaaatatcgttaatgagaaagaatacaaacacgcgaaaaaagttttatctgcagcagcaatgacatatgtggcatctactgcagttgcgttagctgaacttgctcgtattatattaattgcaagatcaagtgattaatcatatataacaacgcagttcctggtaatcattacaatggatttgtaatggttacctttttttatttgaatacgtgacaaaatcctatcttttaatccatattaaacattgcacttgaaatgcaagtcactttattttgtaatatactatataagaatagcgataaaggagtacttctatatgaaatctatggagcaaatgcaacaagaagttgatgactatatcagtcagtttaaagctggttatttttctccacttgctaatctagcaagaatgacagaagaagttggagaattagcacgcgaaattaaccatcattttggagagaaaaaaaagaaagatacagaagaagataatacaattaaagctgaattgggagacaatttatttgttttactgtgtattgcaaactctctaaacatagatatgacagaaagctttaatgacacgatgaataagtttaatacaagagataaaaatcgctttgaaagaaaataatttaagaaaggatgggcacaaatgaaaatcggtataacgtgttacccgtccatgggtggttctggcattattgctacagaactcggtattaaaatggcagaacgtggccatgaagttcactttattacctcaaacataccctttagaatacgcaaacctttacctaacatgacgttccaccaagttgaagtcaatcaatatgccgtattccaatatccaccatacgatattacattaagtacaaaaatttctgacgttatacaagaatatgatttagacatattgcatatgcattatgctgtacctcacgctgtatgtggtatattagcgaaacaaatgtcaggtaaaaacgtcaaaattatgacaacactacatggcactgatataactgtgttaggttatgaccatactttacaaaacgcgataaaatttggcatagaacaaagtgatattgtaacaagtgttagccattctctagcacagcaaacttatgaaattatcaatactaaaaaggaaatcatccctatatataattttataagggaaaatgaattcccaactcggcataatgaagaattaaaagattgttatggtatttcacctgaagaaaaggtattgatacatgtttctaatttcagaaaagtaaaacgtattgatacagtgattgagacatttgcaaaagttcatgagagtataccatccaagttgatacttttaggagatggtccagaattaatcgatatgcgacataaagcacgagaacttgatgttgaaacacacgtactctttttaggcaaacaaaatgacgtaagcgcattctaccaactatctgatttagtactactcttaagtgagaaagaaagttttggattaactctcttagaagcaatgaaaacaggcgtcttacctatagggagtcatgcaggtggtattaaagaggtcatcagacatgaagaaactggatttatagtagatataggggatagtacacaagctgcaaaatatgctattaaacttttatcaaatccagagttatatcaaaaaatgcaatcacaaatgctgaaagatattgaagcaagatttagttcagatttaattactgaccaatatgaaaactattatcgaaagatgctagaacaaggtgagaacaacaatgagtcatgagatatttgaacaagcaaaacctattttaaaaaagattcaaaataaaggttttaaggcttattt

SEQ ID NO: 3390 - DNA, 3502 bp, Artificial Sequence
  Description of Artificial Sequence: synthetic nucleic acid sequence
ttaaagatttgaaagaactttctgacgcagatatcaaaagttttgaagaacgtttagataaagtcgataatcaatcaagtattgaccgtattataaatgatgcaaaagataaaaataatcatttaaaatcgacagactctagtgccacatcatcaaaaactgaagatgacgatacatctgaaaaagataatgatgatatgactaaagacttagataaaatactgtcggatttagattcaattgctaaaaatgttgataaccgtcaacaaggtgaaaatagtgcttctaaacctagtgactcaacaaccgatgaaaaagatgattcaaataataaagtacacgatacaaatgctagtacacgcaatgcaactactgatgattctgaagagtcggttattgataaattagataaaatccaacaagattttaagtctgactctaataataagctttctgaacaaagcgatcagcaagcatcaccatctaataaaaacgaaaataacaaagaagaatctagtacgacaacaaatcaatccgatagtgatagtaaagacgataaaagtaatgatggtcgtcgctcaacattagaacgtatagcatcagatactgatcaaattagggattcaaaagatcaacatgtcacagatgaaaaacaagatatacaagcaattacacgttcactacaaggtagtgataagattgaaaaagcacttgctaaggtacaatctgacaatcaatcactagattctaattatataaataataaattaatgaatttaagatcactagatacaaaagtagaggataataacactttatctgatgataagaaacaagcgcttaaacaagaaattgataagactaagcaaagtattgaccgacaaagaaatattattatagatcaactcaatggtgctagtaataaaaaacaagcaaccgaagatatcttaaatagtgttttcagcaaaaatgaagtagaagacataatgaaacgtattaaaacaaatggccgaagtaatgaagatattgctaatcaaattgccaagcaaattgatggtcttgcattaacttctagtgatgatattttaaaatcaatgttagatcaatctaaagataaagaaagtttaattaaacaattgttgacgacacgacttggtaatgatgaagcagatcgtattgctaaaaaattgttaagccaaaacttgtcgaattctcaaatcgtagaacaattaaaacgtcatttcaatagtcaaggaacagctacagctgatgatatattgaatggtgtgattaatgatgctaaagacaaaagacaagcgattgaaacaatattacaaacccgtatcaataaagacaaagctaaaattatcgctgatgttattgcgcgtgtacaaaaggacaaatcagatatcatggatctcattcactctgcgattgaaggcaaggcaaatgatttattagatatagaaaaacgagcaaaacaagctaagaaagatttagaatatattttagatcctataaagaatagaccatccttgttagatcgtattaacaaaggtgtcggtgattctaattcaatatttgatagaccaagtttacttgataaacttcactcaagaggatctattcttgataaattagatcattcggcaccggagaatggattatctttagataataaaggtggccttttaagtgatctatttgacgacgatggtaatatctcattaccagcgacaggtgaagtcatcaaacaacattggataccagtggctgttgtactcatgtcattaggtggagcgctcatctttatggcgcgtagaaaaaaacaccaaaattaatttaaaaattatatatagtaataggcatcatcaatcttatgtgtagttaaactatttcacagttagtgattgaggtggtgcaacgcttactcaaagtttataacaagagtcagtataaaagagtaggactaagaatttaaaatcaattctgtcctactcttttttgacatgcaataatgattgttatatataatgaataatatacttttagaaatcacttgagtaaattataaaaatggacttttcaatgtaaagttactctaatatagttattgaatataaataagcacaaagatgtattataaatttgaatacatctttgtgctattattttgtggatggtacctcaaataattttaaatttttactatttacctttaatgtaatctaaatcttgagcatcttctgcatcaatagttctgaatgaaatgacacctaatcctttaacatttgattcagaaataacaattgaaccgtcgtcattaactttttcaacgaaagcaacatgaccatactgtgtatcagcacctaattgtccagcttcaaacacaactgcagtatgatttttaggtgtgtgcgttaccgtatagccttcactttcagcacgattattccaattatgagcatcacctaagtcaccagaaatggatgcatcaaattgattcatacggtggtacacataccaagtacattggccatgtgggtaaggtgatgtaccggaagtttcagtaaatggtttgaagtcattaccagagacatccgtacctattgatttgttgtatttcttcatgttaggcattttttctttgtcaaaagatgttaaatgataatgtttaataatactatttaattttttagaataattaggatctgtggcgtatgagcgtgacagatgtgaagtagcatctttatatgatagagcttcactcttccaagttggtttataaattgacggattaccatcgataccatgtttgattaaatctgcataatcttcaagagattgtttagtacttgggtatttacggaaacctgcttggatactgaacatatgattactgctatcagcttctaaagtattaaaagttacagattgtcctttgtagtcacctttgattccaaacaagttatgatttggtgattgtgcaagtgaactttttccagagtcagattctaaaatagcttgagcaatcataactgatgcatatatatcttggtcttttccaatctgatgcgcatctttagcaattgattgaatgaaatcacgtgtgtcttgactgtcaacaacattaaatgaatcagaagataagtcaccattgtctaattcaggtagttgttggaaaagacttgttgaacgtgtatttgagcgtttaatgtcatcctcaaatgattgtgcaggttttgattgatgttttaattcatcatctgttggtaattgtggattcttgtcggcattatcactttgagatgttttagtgtgacttgtattcttgctcttattgtaatctttttctgttttcttagcgtcctgactatattcatctaatatagagtctaatgctgaatctgtaatactagaatatttcttgttacgttctgagctatcatcattcgcttgagtttgttgttgctcagaagaagattgatttttgtttgtatct

SEQ ID NO: 3391 - DNA, 3167 bp, Artificial Sequence
  Description of Artificial Sequence: synthetic nucleic acid sequence
tcatagggcttagataatgctttatccaaacccacctttccatcattctctatatcaacagtataattttcatgagttaactcaagctctataaatctagcaagattttgctcatcttctacaattaaaatatttgtcatatttgcacctcacgctacatcttaaacaattaactcgtatttctaaagatgtaattcaaaattgtaaatgatttgttatgaaactagtatcattttaccatgaaccacgataatagatagtcgaataagtagtctgtatttagaaaaagtcactctagtattatcattgtatttaagttaaatggaaaaaaatatatatttctaattgacaatcattatcaatcatgtataatgataattgaaaatgattatcaataccaattgaaaaacattccccccacatacaagttgttcttttggattggtcattttcaactatccccttttatatgcccgtaaaagactaacgttaagaaatgacgtttcaataaaagcagtagacctttgacacttgaggtctgctgttttttcaatgataatataatgagagaaagtaaaataataagtgactaataatcttatcaaaatttttagaacgctcatcacttttgattaatgaaataatatatacaaaagagtctgtaacacatgaagtgcacagactctttcctacgattagtcaagtacttataattaaaataagcattacttaactaaaccgttcattttaatttttttgaataaggtgttaaactatatttgattgtacgtttggctaatgtggtgacatttgataatcgtacaatttatgattcattacaagataatgaattgtttttaataatcgatttatacaagcaatgatggcagtcttatgaggtttctcattaggctgctttcttagtttgtagtaataatcgacgacatgattgtcataatgatgctgccctcttattatattcataatcacccaaaataaaagttttctcgcttttttattaccacgcttgttgatggtatctctacagtgtgtatgacctgattgatatcgtttgatatcaatgccaacaaaagcattgagttgtttatttgatttaaatcgcttaatatcaccaatctccccaataatcatagctgtgcttagcttaccaataccaggtatcgaatgaatattttcaaaataatcgagttgttgtgctaattgaatcatggcatcatctaattgtttgagatgatgaatagattgttttaattgttgaataagtaagcgtaatttttcgactagaaaggaatgtctatcgacattaggatagctttcttgagcaatcacccttaattgaagtgcatattttgtagctttatccattgacattcccttatctgtagaattgaatatatgtgtaatcagtacctccttgtcgatatcaagaaccatgtctggatgagtaaagatttctgcgatgttgagtgcaatgattgaatatcgactactaaataatctttctaaaccagggaatgtttgatggagtaattcaaggatctgaaatttaagtcgattttgttcattctcgatttctagatgaaaacggacgcgttctcttaattcaaagaatattaactcatgtataggtaagttgtctgtttgtttaagcgtcggtcctaaacaagcaagcttatgagcatctgcctgatcagttttccatgatcttagagcgctcgttttaaatttggcttctaacggattcatttgaatatagttaatttgatttacacaacaaaatcgttccatacttcttgaatagatacctgtagattcaaaaatgagttgtgggtggtctaagtcattcaaatacttgagtaaatagttgtaaccatttttattattttggatgaaaaactctttttggaatttttcatttttataatgtgcaactacactacttcttttactaatatcaacacctaagtaatcgataaaaaaacctcctttgaataattgagaagctaaaaactttacttaacctttctcatttcattttcctatacacggtttcaagaacccaacatactacaaacgaatttcaaaaggcgagagtaaagctgacttgttttttatacggatttaaaatccaagagtctggacagtctacttctctctataactataaaaaatagctatgaaaaaatctatcgtcatagatttcttcatagctaatcttagtatgtttttattttcataattaattgttatgttgctaattttggatggttttcaatctaatcagcttcgttagtcacataatattgaatgaactaggttcaaactaaaagtagttgagtgttatcaaaagaaaaaagaaagaccctacttataatgtaaatatcaaagggactgaaaaagctaaagatgagaaatttaagtttattacgataaaagactatttaaacttgctagattatttcaagaaaagagatgaagaaagttatgttttgctatatctattaggcattactggcgcaagatatagcgatgtcatttatatgacttacaaagatctaaacaaagcgaatggcataattcatttgcctggaacgaaaacaaagaattcaaaacgtgatgtagaagttaattcaaaagatatcatgcacataaattcaaaattagctaaaatgccgcgtagaattgatggcaagttattctcggttagtcatacatcagtaagtaaagcgtttagaaaagcaaaagaagtgataggattaaacgataataatataactccctattcactcagacatacgcacacatcttacttactatctaaaggcataccaatcgagtatataagtaaacgtttaggtcacgctactatatcacaaacgttagacacgtattcacatttattagaagaacataaaaaagagcaaggccaacgtgtcagagaaatattctcttgacacttatttgacacttactctctcgaaagcccgtcatatcaacggtatagtacggagagtttcattacttcttaatggtggattcattttgtagtttgaatcatcgccaggaacatcattttcagttaataataaatgatgtggtgtaacttctgctgttacatggataccagcttttttagcgtctctgat

SEQ ID NO: 3392 - DNA, 3701 bp, Artificial Sequence
  Description of Artificial Sequence: synthetic nucleic acid sequence
tcaagattggaagttacgtcatgttctaattgaaatgcatggtaataatggtagtatcgataacgatcctccagctgctatgcgttacacagaagctaaacttagtcaattatcagaagaactattaagggatattaataaggaaacagtatcatttattccaaactatgatgacacaactttggaaccaatggtattaccagcgagatttcctaatttattaattaatggatctacggggatttcttcaggatatgctactgatatcccgccgcataacctcgccgaagtaatacaaggcacattgaagtatatcgatcaacctgatattacaattaatcaactgatgaaatatatcaaagggcctgactttcctacaggtggtatcattcaaggaatagaaggtataaaaaaagcgtatgagaccggtaaaggaaaggttgtcgtgcgttcacgagtagatgaagagcctttaagaagtggacgtaaacaattaattgtgactgaaattccgtatgaagtgaataaaagtagtttagttaaaagaattgacgaattacgtgccgataaaaaggttgatggtattgtagaagttcgagatgagactgatagaactggattacgaattgcaatcgaattaaaaaaagatgctaatagcgaatcaatcaaaaactatttatataagaattcggatttacaaatttcatataattttaatatggttgctattagtgaaggtcgccctaagttgatgggattacgtgaaattatagaaagttatttaaatcatcaaattgaagtggttacaaatagaacgcgttatgacttagagcaagctgaaaaacgtatgcatattgtggaaggattaatgaaagctttatctatacttgatgaagttattgcattgatacgtaattctaaaaataaaaaagatgctaaagataatttagttgcagagtatgactttactgaagctcaagcagaagctattgtcatgttacagctgtatagattaacaaatactgacattgaagctttgaaaaaagaacatgaagagttagaagctttaataaaagaattaagaaatatcttagataatcatgaggcacttttagcagtaattaaagatgaactaaatgaaattaaaaagaaatttaaagtggatcgactatctacaatcgaagctgaaatttccgaaatcaaaattgataaagaagttatggtgcctagtgaagaagtgattttaagtttgacgcaacatggctatataaaacgtacatctacacgtagttttaacgcaagtggtgtgactgaaatcggtttgaaggacggcgaccgtttattaaaacatgaaagcgtgaatactcaagatactgttcttgtatttacaaataaaggtagatatttgtttatacctgttcataaattagccgatatccgttggaaagagcttggtcaacacatatcacaaattgtgccaatagatgaagatgaagaagtggtaaatgtatacaacgaaaaagattttaaaaatgaagccttttatattatggctacaaaaaacggcatgattaagaaaagtagtgcttcacaatttaaaactactcggtttaataaaccactcataaatatgaaggttaaagacaaagatgaacttattaatgtcgttcgattagagtctgatcagttaattactgttctaacccataaaggcatgtcattaacttattcaactaatgaattatcggatacaggcttaagagcagctggtgttaaatcaattaatcttaaagatgaagactatgttgttatgacagaagatgtgaacgactcagattccataataatggttacacaacgtggtgctatgaagcgtattgattttaatgttcttcaagaagctaaacgcgcacaacgtggaattactttactaaaagaattaaagaaaaaaccgcatcgaattgtggcaggtgcagtagttaaagaaaatcacacgaaatatattgtattctctcaacatcatgaagaatatggtaatatcgatgatgtacacttatctgaacaatatactaatggatcatttattattgatactgatgattttggagaagtagaaagtatgattctagagtaaaagtatatgcaatcacaaaataaaatgataaaataaaaattaataatagcaactaaaatgagcacaagggatttatgtctaatttgaactatcaaagtgataatatacatttattgttaatatgaatgtttaatctttgttaatgaaattaaagcataaatctcttggtgtatttaaaacgataaatttaagtggatgagagggattcgttttgcaagattttgataacttaattcctggctggtttaaaacatttgttcaagtcgggaatgacttaatttggtctcaatatcttattggattattattaacagcaggttttttctttacaattagttctaaatttattcaactcagaatgttaccagagatgtttagagcattaactgaaaagccagaaactttaagtagtggtgagaagggtatttcaccatttcaagcttttgcgattagtgctgggtcaagagtaggaactggaaatattgccggtgttgcaactgctattgttcttggtggccccggtgcagtcttctggatgtggattattgcttttattggtgcagctagtgcatttatggaagcaacgcttgctcaagtttataaggtacatgacaaagaaggtggattccgtggcggaccagcctattacataacaaaagggctaaaccaaaaatggcttggaattgtatttgctgttttaattacagttacatttgcttttgtatttaatactgttcaagcgaatacaattgctgaatcattaaatacacaatacaatattagcccggtaattactggaatagtacttgcagttattacaggtattatcatctttggtggtgttcgtagcatagctacactatcttcacttattgtgcctattatggctattgtttatataggtatggttttaatcattttattactcaatatagatcaaattgtacctatgattggcactattattaaaagtgcattcggagttcagcaggttactggtggtgctgtaggagctgctattcttcaaggtattaaacgtggtttattctcaaacgaagctggtatgggatctgcacctaatgctgctgctacatctgctgtgccccatcccgttaaacaaggtttaattcaatcattaggtgtattctttgacactatgcttgtttgtacagctacagcaattatgattttattatattctggtttgcaatttggtgatagcgcgcctcaaggtgtagcagttacgcaatcagcgttgaacgaacatttaggttcagcaggaggtattttcttaactgtagcagttaccttatttgcattttcatctgttgtaggtaactattactatggacaatccaatattgaatttttatctaacaataagatgatattatttatttttagatgttttgtagtacttttagtatttgtaggtgctgttgctaaaacagaaacagtttggagtactgccgatttatttatgggtcttatggcaatagtaaatatcatatcaattataggtttgtcgaatattgcgtttgcagtgatgaaagattatcaaagacag

SEQ ID NO: 3393 - DNA, 3639 bp, Artificial Sequence
  Description of Artificial Sequence: synthetic nucleic acid sequence
tggagctggtaatttatatatgacgccacatgatatgggcaaattaatttatacgttacaacaaaataaaatctttaatgcacgtcaaactcgacctattttacatgaatttggaactcaagaatatccagaagaatatagatatggtttttacataactccgtatttaaatagagtcaacggggtattctttggtcaaatttttactgtttactttaatgatcggtatattgtcattttagggacgaatgtaagtaatacacctggattagtgagtaatgaagacaaaatgagacacattttctataatattcttgaccagaaaaagccttataatacagcaggtgttaaagttgagtaattgtaattttgttaataatggattagactcgttattccatatttacaaggttagtcttcaataaattatatataacgaatgcccggaacttcaatctgaagtgtaaccgggcatttgttatatgattaataaaataacattcaaattgcaatttaattatttacaataagaaagggcgtttaagaataaatcctcatactgtctttcaacaggacttaaaacaactgtacaattgggatgctccatattaaagtctaccactgtggctccccttgtaaagttgccatttaattctatttgagtatacgcctccttgacattaaaggcttctggatccaacaaatataatatagtgaatacatcgtataatttaaatcctatttcaaaatcttcactcttatagtgctgaaataaattatataacatgtttgaagttgcatttgtatctttgaagtcttttacaaaatggtgagtaaacaatgcttcacgagccaaatcaagaccaatcatagtcaaaggtaatccagagttaaatacaatttgagcagcttctggatcacaatatatattaaattcagctaaaggcgttacattacctctaccggtactaccacccattaaaacaatttccttaataaatggttgaacttcgggataactagttaaaagaatagcgatatttgttagtggacctatggcaatcaaggttaaaggttcttgagtatttactaatagatttctcattgcttcaactgcatgaattgatgttaaatcatcttgatttatttgtggaaactcgtaaccatccataccagactcaccatgaattgatgtagcttcaaagatgtcattaatcaatggttgggatgcccctctatgtacaggaacagaactattaaaaaacctttttagctttaatgcatttgctgtcgttttctcaatacctacattaccattcacagttgatatcattttaacgtcaaattgagggtgtgaaagtgcgatactaattgctgtagcatcatctataccaggatcagtatcaattataatgggaatagacatatcatcatctccgtatttcataataattaaagcataacatggtatgggattgttacgataacgaaataaaaagagcctgagacttttaagtctcaggctctttacatataaggtggaaatgaatcaataaagaacaaatatattcaaattcattctttattgaaatcaaccctggaaaactcatctttataagtgagaagagtgtccaccttgcattacccagtatgttccgataacagttactaaagtaatgataattgcaaagataactttgaacgattgtaaacgtccatctttaccttcagttaaatgcatgaacattaataattgaagggcagcttgaatgaaagcaaaaccaaagatgatagttaccttagcatggaatgtcatattagtgtatagagttacaaaaactgctaaaagcgttagtacgatagaagcaataaaacctactgtatgttttacgattgtattcatccgctatacaccatccctatcatatatacggcagtaaagatgaagacccaaacaacatctaagaagtgccagtataaacttactataaataatttaggagcattgtatgaatccaaaccacgagtgccgatttgaattaacaaacaaataacccaaacaatacctaatgatacgtgtgcaccgtgcgtacctagtagtataaagaaactagaccagaaggagccaatagttgggttaacaccttcagaagcatagtgtgcgaattcgtaaatttcgaaacctacgaatacaagacctaggataactgtgataatcatccaaaacatcattaagttttgtttttcttgtcgcatgtaataaattgcaataccacaagtataagaactaattaataatgcaaaagtcattattaaaatcaaatgtaattcgaataagtcggtagttaatttaccgccatatccgccaccatgttgtaacgttaataacgttgcaaatagggtaccgaataacgcaaattcagctgtaaggaaaatccaaaagccaagtttatttaattcgccttcgtgtgtacgagaatcaatagtatttgcatcatgactcatgacttacagcctccctttctttaattcgagcttctcttaaacgagcttcagtttctgcaacttctgaagcagggatgtggtaaccatgatcaatttggaaacttctccaaatcatagtaatgaagatacctgctaaacagataagtgctggaacaatagattcgaagattaagaagaaaccaccaatagtcataaatatacccatccagaatcctactggagtattgtttggcatatgaatatctttgtagttatggttgtctaaataatgacgaccatgttctttcatatcaacgaatgtatcgtagtcattccaatcaggagtgatagcaaagttgtatttaggtggaatagctgatgctgtagaccattctaaagtacgaccaagtccatcccagttatctccagtagcttcacgtggagctttgatatgactataaacgatacttgcaactaggaataagaatccaattgccatcaatactgcaccgatagttgagatgaagtttagtaaccaccaaccatcagaaggcatgtaagtgtatagacgacgtggcataccatctaaacctagaatgaattgtggtaagaaacaaacgttaaatccgatcatgaagaaccagaagcaccatttgtttaatgtttcatttaacttgtagcccatcatttttggataccagaagattaaaccagctaagcaggcaaatactacaccagtaaccaatgtatagtggaagtgagctactaagaaataagtgttgtgatattgatagtcagctgatgccattgcaagcattacaccagtaacccctcctaataagaagttagggatgaatgctaatgagaatagcataggtgactcaaatgtaattctacctttgtataatgtgagcaaccagttaaatagtttaactccggttggaacaccgattaacattgttgagatagagaagaatgagttaattaacgcaccattacccatagtgaagaaatggtgaacccaaactaagaaacttaagaatgcgatacctgcagttgcccaaatcatactttgatgaccgaataaacgtttacgggcaaaagtagggatgatttctgagtacataccgaatgctggcaaaataacgatataaa

SEQ ID NO: 3394 - DNA, 3268 bp, Artificial Sequence
  Description of Artificial Sequence: synthetic nucleic acid sequence
gcattagcacttaaaatggataacaagccaaatattgctaccgcaacagttggagaaggcagttcaaatcaaggtgactttcacgaaggtatgaactttgctgcagttcacaaattacctttcgtctgtgtaataattaacaataaatatgcgatatctgtaccagattcactacaatatgctgctgaaaagttatcagatcgtgcattaggttacggtatgcatggaatacaggtagatggaaatgacccaattgcagtatacaaagcgatgaaagaagcaagagaacgagcgctagcaggtgaaggtccaacattgatagaagctgtcacttcacgtatgacaccacattcatctgatgatgatgatacatatcgtacaaaagaagaaagagacctattgaaacaagaggattgtaatataaaatttaaaacggccttactcgatcaaggcatcataaacgaaaattggttgagtcaattggaaaaagagcataaagaactcattaatgaagctactaaatctgctgaagcagcaccatatccttcagaagaagaagctttgacatatgtttatgaagagggaggtcaacgaaatgactaaattatcatacttagaagctatacaaaatgcacaagacttagcactaaatcattttagtaatgcatttatacttggcgaagatgtaggaaaaaagggtggcgttttcggcacaaccaaaggattacaaagtaagtatggtgatgaacgtgtaattgatacacctcttgcggaatcgaatattattggtactgctattggtgcagcaatgctaggtaagagacctattgccgaaatacaatttgcagatttcattttgcctgctacaaatcaaattataagtgaagcagctaaaatgagataccgttcaaataatgactggaattgcccactgactatcagagcaccttttggtggtggagttcatggtggattatatcattcacaaagtgttgaaagcatttttgcttcaactcctggattaactattgttattccttcatcaccttatgatgctaaaggtcttctattgtcctctatagagtctaacgatccagtcttatactttgaacataaaaaagcatatcgttttctaaaagaggaagttcccgaaacatattatactgtacctctaggtaaagcagatgttaaaaggccaggcgaggacatcactgtattttgttacggattgatggtgaattactgtttacaagctgcagatattttggcaaatgacggcatcgatgttgaagtagtcgacttaagaacagtttatccactagataaagcaactatcattgaacgctctcaacgtactggtaaagttcttcttgttactgaagataatctagagggaagcattatgtctgaagtatctgcaattatagctgaaaactgtctgttcgatttagatgcgccaatcatgcgattagctgcaccggatgtcccatctatgccattttcaccaacattagaaaatgaaattatgatgaacccagaaaagatacaggacaaaatgcgtgaactcgcacaattttaaggagggtgtcaattggatataaaaatgcctaagcttggtgaaagtgtgcatgaaggtacgattgaacaatggttagtatcagtaggagatcatgtagatgagtatgaaccattatgtgaagttattacagataaagtaacagctgaagtgccttcaacaatttctggaacaataacagaattagtggttgaagaaggacaaactgtcaatattaacacggtgatttgtaaaatcgattcggaaaatggtcaaaatcaaacagaatcggcaaatgagtttaaggaagaacaaaatcagcattctcaatcaaatataaacgtgtcacaattcgaaaataatcctaaaactcatgaaagtgaggtgcatacagcctctagtcgcgcaaataacaatggacgattttcaccagttgtctttaaattagcttctgaacatgatattgatttaacacaagtcaaaggaactggttttgaaggtcgtgttactaagaaagatattcaaaatattattaacaatccaaacgatcaagaaaaagagaaagaatttaaacaaacagataaaaaagatcattcaacgaaccattgtgactttttacatcaatcctcaactaaaaacgaacactcaccattatcaaatgaacgtgtcgtaccagttaaaggtattagaaaagctatcgcacaaaatatggttactagtgtcagcgaaataccacacggttggatgatggttgaagctgatgcaacgaatttggttcagactagaaactatcataaagctcaatttaaacagaatgagggttacaatttaactttctttgcgttttttgtaaaagctgttgcagaggctttaaaagtaaatccattactcaatagtacatggcaaggagatgaaattgttatccacaaagatattaatatctctattgctgttgcagacgatgataagttgtatgtgccagtcattaaaaatgcagatgaaaaatcaattaaaggtatcgcgcgtgaaatcaatgatttagctactaaagcaagattaggaaaattagcacaaagtgatatgcaaaacggtacatttacggttaataatactggttcttttggttctgtttcttcaatgggaatcattaatcatccacaagctgccattttacaagtagaatcagtcgttaagaaacctgtagttatagatgatatgattgcaattagaaatatggttaatttgtgtatttcaatcgatcatcgtattctcgatggtgttcaaacgggaaaatttatgaatcttgttaagaaaaaaatagaacaatattctattgaaaacacttctatttattaattacaaacaatgattaccaattaaacttcatattaaagttgaacgctttaaggaggataatttcttcttaaagcgttcttcagtattcgttttaaatttcaactagaatttttcaatcatcataaattaatcctgttgaacaatgtgttgttaattagtagaataaaataagtaaaattaacttattatggaaggtgacaaatcatggatttaaactttgatttatatatgaatgatgttgttgaacaagcacgaaacgaaattgagcatgctggttatcatcaattaacttctgctgaggatgttgatcaagttttacaacaaaaggggacatctttagtcatggtaaattccgta

SEQ ID NO: 3395 - DNA, 2632 bp, Artificial Sequence
  Description of Artificial Sequence: synthetic nucleic acid sequence
agaccgtctacaatatacagtttttactgttgaaacacacactacttttttacatgaattaacacttggtcaagaattcaatatagagctatacctttataattacgatgacaaacgaactcatttctttctgagaatgttaattgataatcaagaagttgttgcaaccaatgaggtcatgatgttaggaatagataggacacaacgtcgtgctgcaccatttccaaaacattatctgaatgctatacaagattatgctcataagcaagaaaaaattgaatggccaccacaattaggccactcaattggaataccatataaaggagaataataatgtctataaaagaaaaattagtaatagagctcatgaatttaaaagacactgtaaaatacgaattgtcagaattaaatgaacaacaatatttgtttatgaacggcccagcacctcagttgatgaagcgtgccatgaaaatgagctatattctaggccaaaaagaagcgattgatcactttctattactcatcgacacttgccatgagaatgtcttactagataactgccaagactatcaaaaacaaattcaacataaacaattctctttacaagaagatattattcaccaaataaatcagtcaaaggaattcgaatcatttttatcaacttattatgtaaataaaggtaaatatgatatcaccagcaaaataaaaacattacttgaataaatactattgtttaaataaaatgattatctcatacatcactagctgataagcatagcattggtaattgacttcatccttccttttagaacaacattcacatcacttttaaaatacagttaaaaatctattcaattcttactctaagattgatttagtgatgtgttttaacaccttgtgagattggcgtatgggatagataggaaaatcatgcaccattttaggatactctttaaactcaacatcgttcccacattcctctagagcatgagtaaatgcatgcatgtctgggcttaatatttctctgccacctccatacatatatataggtggcaacccttttagagtaccgtataatggtgatatacgcgcgtctgataaaggtaaatcattcgtccaagatttcatgagttgatgaacaccaaatcgactaactaagatatcattttcttccaacgttttcgtaatattaggattagtcaaagtggcatctaaaagcggtgaaagtaaaaataactttctaggcacttcttgattatcattgataagtgattgaacaaaacttaatgctagtcctccaccagaaccatcccccatcataacaatgttgttcgcaccaacttcttcaactaattgattataaacgtcacgaatcgctttgaacgtttctaagtagtgataatctggtgactttggatagataggtaaaacgacctcatgcaatgtatttaaagttagtttatctaaaagtctccaatgaaatggagaaggttgcaaagtattatatccaccatgcagatagagtatcttttgatttttctcatgtctaaaattaaatctaaacacttgcatatcattaagagtaagtttatctaaatttgactttacattaagtgtcgcaggttgctgatgttttttactattttcgatacttctcttttctaaaaaatgtttaacttcatcatcattactaaaaaatatcgatctattgtgaagtatatatttattaaccacgcgattcatcattctatttttcattaatcaatcaacctacctctatttaaaattttaaatttaagaaataatttgtttaaatatctatatacctttgctaaaaaaagatataatgataagtatgtcattttaaagaaatattttttaatcaatacttaggatactagattaaacccaattataacagacataaaattaaaaagataaacttagtaaatttgcatctaaaggaggcatttaaatgtctgaaacattacaaaaccaaagacaattcaactctcaatttgaacatcaagagatccatcgtggaaaaagatatggtaaaaagaaacgctcatgggtaagtctcattattcaagttttcgttttagtattaactgctattactggctatagtatgcttaaacaacctatatttaaaatttcatttgtaaatgaaactataaatttccatcaattaagaaattttcaagatacagttacgcaaatcggtaatttgaatttaggtaatattgatcaattacaacagtctgtcgataatctcatcattatatttaatattttctttgtcctatgtctgattagtttgtttataaccgtaattacaattatttttaatcgcacagcactcaaagtagtcaatatattactttttagctattatgctagtcattacattgtatttcagttatatcatacatacaattgctcagaaaatttccgaatctctaaaacaatattatttaacagtatcaccagaacaagtattaactgaagcagatgcgattcacaatgcactgatactcattggatgtagtattgcgttattgattgtaagtttgtttttccgtaatcgtttaccacgtattaaataaagatgattttaatgttcttttaa

SEQ ID NO: 3396 - DNA, 3792 bp, Artificial Sequence
  Description of Artificial Sequence: synthetic nucleic acid sequence
ccatagcaacattttcagttatgaattgattactttgtatgggatgtgtaacttctatcactttcataatattatttctcctttaattaaaaacttttttaggttttatttcataaggtttatctggatgaactatatatattgctaaaactttttgagtgctactatcgacaaatataaaaggttctttaacattttgacttaacacttttttatgaaatttttgaccgttacagattttctttttaaaatttgaatctttcacttggaatgatttcagaccttttaagccatattctataggaaacaattcattatgtaatgaatcatgctcatgtaattctttaatttgatcaatcgttaaactactttctaattgaaaaccgccagaagcaattctagttagacgtgacatatgagctggaaaaccaagtttaagtccaatatctgtagctaaagttctaatataagttcctttaccacatgttacttcaacttcaaaatgacatgtctgctcctgaaaagtaacttcagatattctatgtatatctttaataaaaacttgtcgtttagggcgttcgacagtttcattatttctcgcatattcatataattttcttccatttactttaacagaagaatacataggcggaatttgttgaatatgcccctcaaattgctgcaacacttggtcaatcgtatcttcattaatatcattcttatcaacagccctagtttctaaaatatctccagtttggtcttcagtagtcgtactctttcctagcgttatcatagcgtgataagtttttcccatttccatgatataatcactgacttttgtcgcatcgcctaaacaaattggtaacacaccattaacttcaggatctaatgttcctgtatgaccaatttttttcatttttaaaattttacgtaatttaaaaacgacgtcgtgacttgttaaacctcgtttcttaaataccggtagtatgccattatacatgttgtcacacctttaacttttaataacgtgtattattataacacgatattttaattctttaattagcgttttacataaaaatagtaggcaatatcaaaaatatgctttatgaatgattgtgcctactataaaatatattatttatcatttttgtgtaactcttgaatcatgcgttctatcttattaccgtattcgatagattcatcatattcgaatgttaactcaggtataattcttaggcgcattcgagaaccaagttcagattttataaacccagttgctttatgcaaagctttaaacgtattatcaacttctttatcattccctaacactgttaaatatacctttgcttgtgaaaggtcattggttagttcaacatcagtaattgttaaaaaaccaactctagggtctttaactttattattaacaatgtccatgatttcctgtttcatttgttctcctacacgttctgctcttatattattcatcatctcacctctctttatttttactttactcacaaataaatgtgaaatatcagatttaatgattaactattgatgttcattttattaaattatcaacaacgaatcaataaaataatactaaatgagagaccataactaaagtattgatagcataacattaagcttttccaaatcaaaaatttatatcttcaatttgattgttggttaagcaaagtatgtcatactctcctttaagatattaggtttatgaaatatcttaaagtacttaacttagcatatagcctctcaataagtttcaaaaattatctttgaatttctaccatttcaaacgcttcaataatgtctccttctttgagatcattatatttttcaattgtaataccacattcatagccttgagctacttctttagcatcatctttgaaacgttttaatgtgtcaagttcaccttcaaataacacgataccatctctaattacgcgtacaccagcgttacgagtgattttaccttcagtcacataactaccagcaattgtaccaactttagaaactttaaatgtttgacgcacttcagcttgtccaatgacttgctcttcaaattctgggtcaagtaaacctttcatagctgattctatctcttcaataacattatagataactctgtgtaatcgcatatctacattttcagcttcagccgcacgtttcgcacctgcatctgggcgtacattaaaaccaataataataccatttgatgcatttgctaatgtaacatctgattcattgatagcaccaacagctgtatgaataattcgtacattcacaccttcaacatctattttcattagagatgcggccaatgcttcaactgaaccttgtacatcacctttaatgatgacatttaaatctttcatttcaccttgtttcatttgctcaaataaattgtctaatgaaacatttttactttcttgacgttgctgtatgacacttgcctcatgacgtgcttcaccaattcgacgtgcttgtttttcatcaccaaatacaacaaaacgatcacctgcaagtggaacatcgttaataccagtaatttctacaggtgttgaaggaccggcagatttaattctttttcctaaatcattaaccattgcacgtatacgtccataagtattacctacaacaattgcatctccaacgtttaaagtaccattttgaacaagtaaagatgcagctggacctcgtgatttatctaattcagcctcaatcacagtacctacagcttgtttattaggattagctttaagttcttgtacctccgctactaaaccgatcatttctaataaatcatcaataccgtctccactcaatgcagatagtggtacaaagattgtgtcaccgccccagtcttctggaattaatccatactcagtgagttcttgcataacacgatcagggttagcagttggtttatcaattttgtttactgcaacaatcgtaggtacttctgcttctttagcgtgatttatagcttcaattgtttgaggcatcacaccatcatcagcggccacgactaaaattgtaatatcagtaacttgagcaccacgtgcacgcatagtcgtaaatgcagcatgtccaggagtatctaagaacgtaatttttttacctgaattttcaatttgataagcaccaatatgttgagtgattccgccagcttctccttctgtaactttagtgttacgaatagaatctaataaagtcgttttaccatggtctacgtggcccatgattgtaacaactgctggacgttcaattgcatcagaatcatcagtctcatcatcaaaataaattgataaatcttcttcatcaacgactacttctttctctatttcaacgccatagtcatctgcaattaattctaatgtttcttcatccaatgattgattgatattagccataatacctagtaagaacaattttttaataataccagctgattctacatttagcttttcagctaactcaccgacagttatgccttcttgataagtgattttagagggcatttcttttgtttctgctacctcattttgaggtttattatttttattattctttttatttttattgtttttttgattcttattagttttattgtttttattttgctgttttcctttgttgttttgttcttttttcttcgttggtttactattattcttactttgttgtttttctttatcgttagaattttgtttattattagatttttggtgattattttgagtattttgtttattagtgtctttcgct

SEQ ID NO: 3397 - DNA, 3466 bp, Artificial Sequence
  Description of Artificial Sequence: synthetic nucleic acid sequence
aaaattcaatatacgtttcttttataattttagtaatttctctttaaaaatatcacgtaaaaattcaggcataatataatctgtagataacccctttagcaatgggaaatatcttccaaatgtatacatatcaacagtacctaacgtatattgtttatcattttgaatctcttcatcgcctataaaataacggtcttctgactcaataaagcctagattatataaaatatatcctccaaatatatcccctctaaaaccaagaccttgtgcatgttcgtgcatatattcttgcttttggcttttttgaatcacttgctttaattgtttaccggttaatcgaactcttacaatattgattggatggggtaacatgcgatgtatatcatattccgtcactttatcagcttcaatgccattaactataagtccagcatttacgattgcacaatcagcccttgaaaactcatatacactttcagccagtaaatacgatgttcttgtaacaacatctgttcttttgactaagttcacatgatgattaactactggtttacttagaagtgctcttccttcttcttcaaaatgtgtctcgactaagggaagtgtttcaataggatgaattttggcgattttatcaacgatttttccattttcaatcgtaatattaacttcacctaaataatagccatattttccggcagctgccatcaaaacaccattgtttatttctccatgttcaaaatgatgatgcgtatgactaccaaagataacatctatttccggaatctcttggcataacttttcatcaaaaaagataccgacatggctcataaccattaaaagatcatattcaccttgatgtgcattgatttcatctttgattgccgctaatgggtcagtaacaatccaatccagtgctcgataaaaaggtgtgaacggtgccgttgctgcaacaaataaaatacgtgttccttttatttctttgatatacgaagaggtaatatgatgtggaagatgtccctcttcatctatgacattcgtgcaaatcactttaaaatccgcgtcgttatatagattttgtaaagcatcatgagaaattgtcattccttcattatttccaatggttgcaatatcacaatgtgcttcatttaaaagttctatatttttatgtcctaccgtagcttctgtcacaggtgctgataaatcaacatggtcacctatatctatatagagtgagggatgttcaagttgcggtctatgttttgccatataagcttgaatacgagcatattcatttaaatgactatgaatatcattcgtgtgatatattgttaattccataacatgatccccctctttaaaatttatatacttaattgtactttagcattaaagaacaaagtctcaaagcataactacttcgcatttaaataaaagatttaatgattaaatatacacccatgataagcattactgttctcaataacattacaactgtgtcggatttcatagatcgattgaccctcacacctatttgtgcacctataacacttgaaataatgagaatgatagaatagccccaagccacatgtccttgaaagatgtgccctattgaactcatcacacttgaaaagaaaatcatcatcatacttgtgcctactgcaacatgtggtggaaatctaaagacgatgagcataagaggggtcatcaatgcacctccacctatgccaaacagtcctgttaatagcccaataaataacgttgttataaaagcaaacaggggtggtacactataacggtatgttttcccttcagcatcaacatatgtacgcgcatatttaggtttgtcaaaaattttaaaaggtttgattttgtgacgaatcatcagtaatatcgacacaaatatcataaacacgccaaagtataagttaaacgaatcaagtgtaaggtatctacttaaaaaagaaccaaccaaagatccaggtagtagtccaaatagaaatatcgaaccattttttatatctacttgtttggtttttaaatatcctaatgaggaagataatccagtaacaatcagaataactgaagaagtacctattgcaatttgcgtcgtaataccatgtagaagatgatggttaacgcctaaataaacaagtgtggggacgatgatgattccaccaccaataccaacgatagatcctaaaatcgctgataatccccctattaatattaatagaataattgttaataacatgacattcgcctcttaaaatagttttaattgttgcggtgctaaaccttcataatcaatgtctaaaatattttgatactttttagcattattagctgcatgaccgccagagttattattaaaaattacatatactttcttagccttttgattaagtatttcgactttacgagccaagtcagctaactcatcatcgctataatcatataaatatcttacatctcgccattcttgatcagtcatatcttttttagtccaaccataatgattacgtccatgataacgtacaaaagcaatttcactagtaatcctatttactaaaggaacgctcccctctttaacttgaggttcatctaccactgcatgaatgatttgatgttgtgttaagaaggataaagtttgttctttatactgattgtcaaaccatgattgatgtctaaattcaatgctcatcggaatatcagttaattgttttctcacatataagatgtaatttatattttggacgttacaatcaaaccaaggtggaaattgtacgagcaccatcgccaatttattatgctcttttaacggattgatcatttctttaaactgtttaaataatatatctctcgactctgcataatctctatagtcagcatgcaatgttaatgcttgatgaattttaacaacgaattgaaatctattcggcgtttcatttatccatttaattatatttcgctctggctgtatcgcataatacgaagcatccaactctactattgggaagtgactagcatacgtttttaacttatctgttttacgctctaaatcctcatataatgtatcatggtcaccccagccttctaaaaactctggataaaaatcacaattacctttcacacgctgatacaaactaagttctgtgtcattataactaaattcagaatcccctaaatgtaaaaatttatctgcatctttatgtagttcataaatatgatataagatacctgtttctttgtgattatcactaagaataatccacttagacatgttgttcaccctctaaatattcttttaacagtcgaatagcatttccacgatgactgattttacccttttcatcatttgtaatttccgccatcgttttatttaattctgggacaaaaaatattggatcataaccaaaaccattctttccatgtcgttcagttgttatcactccagaaactgttc

SEQ ID NO: 3398 - DNA, 2987 bp, Artificial Sequence
  Description of Artificial Sequence: synthetic nucleic acid sequence
tttggaagttctgttgataaaatcaaattattcgctgaattgacttctaaatataaagattaccatcctgagtatctgggtaagtttaacagatatgaaatagataaatatattcaagaaattagcaaaagttataaaaaaagaggtaatgaaaatggctgaaaatcaagctaaaaaagaacaagttcatacagtattccaaaatatttctcaaaaatacgatcgactcaacaacatcataagtttcgaacagcataaagtatggagaaaacatgttatgagtactatgaatgtacaaaaaggcagtaaagctttagatgtgtgttgtggtactgcagattggactattgcattaagcgaagcagtaggctcaaaaggccaagtaactggtcttgattttagtgaaaatatgcttgaggtaggtaaacagaaaactgcttcattggaaaatatccagcttgttcatggtgatgctatgaatttaccttttgatgataactcatttgattatgttactattggttttggcttacgcaatgttccggattatttgtcagcactcaaagaaatgcatcgagttttaaaaccaggaggcatggtggtatgtcttgaaacaagccaaccgacattgccattattcaaacaaatctatagtttatactttaaatttgtgatgccaatttttggtaaaatgtttgctaagtccaaagaagaatatgaatggttgcaacaatcaacatttaattttcctgacaaacaaacattgaaaggcttattcttcgaagcaggatttaacgatatcattgtacgtagctttacaggtggcgttgctgcaatgcaccttggctataaagaaaacagttctagcaaaggtgattaacgtggcaaagttaaacattaacaacgaaataaagaaagtagaaaagcgacttgaagaagcaattataagttctgatcaaacattacaagaagcctcattccatttactatcttcagggggaaaaagagttagacccgcttttgttattttaagtggtcaatttggctctaacaacaaaccttcagaagacacgtatcgtgtagcagtagctttagaactaattcacatggctaccttagtccacgatgatgtgatagataaaagtgataaacgtagaggccgactcactatttcaaaaaaatgggaccaaagtacagctattttaacaggaaatttcttacttgctatggggctcaagcatttatctgaaatcagtgatactcgtgtccattcgaccatttctaaatcaattgttgatgtgtgtagaggagaactattccaatttcaagatcaatttaatagcaatcaaacaattactaattacttacgtcgtatcaaccgtaaaacagcacttcttattcaactgtctacacaagttggtgcgattacttccaatgcgtcaaatgacgttattcgtaaattaaaaatgatcggacattatataggtatgagtttccaaataatagatgatgtgctagattttactagttctgaaaagaaacttggtaagccggttggtagtgaccttatgaatggtcatattacattacctgtactattagaaatgcgaaaaaataagacttttaaagataaaatttcacaacttaatcctgacagtcctcaacatgcctttgaaacttgtataacaataattagacagtccgaaagcatagaacaatcaaaacaaataagtgaaaagtatttaaataaagcaatcaatttaatcgatgaattagaggatggtcctaataaagaactatttagaaagcttattaaaaaaatgggaagtcgaaataagtaagttttgtgacaaaagttgaaagcgcttcattatcctgttaccatactaagtagcaggatatttttatagcttgcaatgttttaagttttttacatacttataaaaatgaatgaaacacatgcacagggggacacacgaagtggaacgcacatttttgatgattaaaccggacgctgtccaaagaaatttaattggtgagattatatctcgcattgaaaagaaaggtcttaagcttgttggcggtaagtttatgcaagtgcctatggaactagctgaaaaacattatagtgaacatgaaggaaaaccgttctacgacaagttaatttcattcattacttctgcacccgtttttgctatggtagtagaaggtgaaaatgctgtagctgtatctcgtaaaattattggaagcacaaatccaagcgaagcagctcctggtacaatccgaggcgactatggtttaaatctaggtcgtaatattatacatggttcagattcaacagaatcagcacaacgtgaagttaaattatggtttacaagtagcgaaattgctgattataaagaaccaagagaagattggctatacgaataataaaaatatcaaataatgaaattcattttatccattaatgtctgtgacgcatatttgtgtctcaggcattttttatgattaaccaaattttatttgcttaaaataatacttattgaattagtctatttatttttttatctagggatttaacgatgcaataccgtatattgttcgattatatagcaattttatcttttgacaattgagcattcattattaagtaatgacctacttttaatatatcaatcatgtatctaatgatttcggtcttttgagttttttaatagactgatctttaattggtataatgtcactatgacataacaatcatcttggtgctattcttttttaaatatttataactgctaaaataaaaatctccttgtttgtctaactgacttatgttgtgtgattgaatatgataatatattaaacatattacaatttaatgtattgaagaatagaaaggggcgtgcgatcatgagataccttacatccggtgaatcacatggaccacaacttacagtcatcatagaagctttagagcacagtggcga

SEQ ID NO: 3399 - DNA, 3259 bp, Artificial Sequence
  Description of Artificial Sequence: synthetic nucleic acid sequence
tttaaattgtcagatgatcaagaaaatgaaattgagcaattattagatcaaaccaatcctgatttaccacgaccagtaggagaggatattgtacattattcagattattttgaaggtgcacaaaagtatctaagttatcttaaatcaactgttgatgttaattttgagggtcttaaaattgtattagatggtgcaaacgggtcaacttcttctttagccccattcttgtttggcgatttagaagcggatactgagacaattggatgtaatccagatggttataacattaatgaacaatgtggctctactcatccagaaaaattagctgaagctgtgttagaaactgaaagtgactttggtttagcttttgatggagatggcgatcgaattattgcggtagatgaaaatggacaaattgtagatggagatcaaattatgttcattattggtcaagagatgtataaaaaccaagaactcaatggaaatatgatagtttcgacagtaatgagtaaccttggtttctacaaagctctagaaaaagaaggtattcagtcaaacaaaactaaagttggagatcgctatgttgtcgaggaaatgagaagaggaaattataatcttggtggtgaacaatccggtcatatcgtattaatggattacaatactactggtgatggattattaacgggtgttcagttggcttccgttattaaaatgagtggtaaaactctaagcgagttagcttctcaaatgaaaaagtacccacaatctttaattaatgtgagagtgactgacaaatatcgtgttgaagagaatattcatgttcaagagataatgacgaaagttgaaacagagatgaatggtgaaggaagaattcttgttcgtccttctggaactgaacctttagtacgtgtaatggttgaggctgcaactgacgcggatgctgaaagatatgctcaaagtatcgctgacgttgttgaagacaaaatgggcttagataaataatactttcatgtttaaattcatatataaaacagatttatgatgttacagacataaatctgttttttttaacagaattttatcttttaaaaagatttgaaaaatatatttttttattttgagaataattcatcgatgtatctattcagaactattactatttgtgaaaaatactgttaaatcgtttgcaaattaattcgttgacagtgtacaatgaatattaatggaaaggaggagagtctaggttattaataattaaagcgcctgtgcaaaatacctaaatagttatcaagtattaaaagttaaaatagtagaacttttatagataacgatttggattttgtagacgaggaggatagtgatcgaatcagatcggcggatgctatcccggatgtggcacattcgttagcttattaagtaaatcattaaggtgacttagtggacaaagttaataagatcgccaaactaaataaattattttgggaaactacggatagcgtgtataaaattcatataatagcacgcttatttcatgatgtattcgttgataatgattatgataggggattatcaaatttaagcagtgataattaatcataatagccgtgttatcccatttgttggaggatattatatgtgtggaattgttggttatattggctacgataatgccaaagaattactattaaaagggttagaaaaattagaatatcgtggttatgactcagcaggtattgctgtagttaatgatgatggtacaaaactttttaaagaaaaaggaagaattgctgaattacgtaaagttgcagataatagtgatgaggatggtacgttaggaattggtcatacacgttgggcgacacatggtgttccaaattatgaaaattcacatccacaccagtcaacatctggacgttttacattagttcataatggtgtaattgaaaattatgaagaattaaaagctgaatatttatctgatgtcactttttcatcagaaactgatacggaagttattgtacaattagtagattatttttctagacaaggattagctacagaagatgcatttacaaaagtagttaaattattacatggttcatatgctttaggattattagatgataatgataaagatactatttatgtggctaaaaacaagtctccgcttttagtaggtgtaggtgaaggtttcaatgttattgcttctgatgctctagcaatgttacaaactacaaaccaatacaaagagatacatgaccatgaaatagttattgttaagcgagacacagtagaaattaaagatcttgaggggcacattcaacaacgtgatacgtatacggcagaaatagatgctgctgatgcagaaaaaggcgtatatgatcattacatgttaaaagaaattcatgaacagcctgcagtgatgcgtcgcattattcaagaatatcaagatgaaaaaggtaatttaaaaatcgattcagagattattaatgatgtagcagatgctgatcgtatttacatcgttgcagctggtactagttatcatgctggattggttggtaaagaatttattgaaaaatgggcaggtgtacctactgaggttcatgtagcttctgaatttgtatataatatgccacttctttctgaaaaaccactatttatttatatttcacaatctggtgaaacagctgatagtcgtgctgtattagttgaaacaaataagttaggtcacaaatcattaacaattactaatgttgctggttcaacattatcacgtgaagcggatcatacattacttttacatgctggacctgagattgcagtcgcatctacaaaagcatatacagcgcaaattgctgttttatctatcttatctcaaattgttgctaaaaatcatggtcgtgaaaccgatgttgatttattaagagaactagctaaggttactacagctattgaaacaattgttgacgatgcacctaagatggagcaaattgcaacggatttcttaaaaactactcgtaatgcattcttcattggacgaacaattgattataatgttagtttagaaggtgcattaaaattaaaagaaatttcttatattcaagctgaaggatttgcaggtggggaattaaagcacggaacaatcgctttgattgaagatggcacacctgttataggtttagctacacaagaaaacgttaatctatcaattcgtggaaatatgaaagaagtactttagagcacagtggcgatgatatca

SEQ ID NO: 3400 - DNA, 4012 bp, Artificial Sequence
  Description of Artificial Sequence: synthetic nucleic acid sequence
ttcctcataacgacccttttcaacttctcttggatcatattttggtttcatttccatatgtctacctcctaaaaaataaaaagaacatccatcctataaaaaataggacggatgttctgttccgtggtaccacctatattcaagaagaaataattcattcttttcttcaagcacttaagtctctgattaacgctcatacacgcttctacctacttgtcgtctatgtttcaatagaagttataaaatagggctaccttcagacttaatcatttacatattcacagccaccatatgctctctttaaaatgatataaacttactcttcccaaataatatattcttttactcatttatattataatggatattaaaataagtcaatgtattggagatgaaattatgaatgaatgtgcttttaacacaactgatcctatctatatagagtatcatgattattattggggacaaccaatctatgatagcaaagaattatttaagctaatggctcttgaatcacaacatgcaggattatcatggttgacaatattaaagaaaaaagaatcgtatgaacaggcattttacaactttgaacctcaatttatcgcacatatgactgaacaggatattgattatttaatgaaattcccaaacattattcataatcgtaaaaagttagaagcaattgtgagccaagcgaagggatatttaaaaattgaaaaagactatggtagttttagtaaatttttatggtcttatgtaaatcatcaacccataaatatgggttataaaaaacctagagatcgtaaaaaagttgatcaaagagctactcaattatcaaaagatttaaaagcatatggttttaaatttttaggtccagtaaccgtgttctcattcttagaagctgctggattgtatgactcacatcttgaaggatgtcctttcaaaccaaatcatgagtgaagcatagacataagttgcgctgcggatattcaaacaatatgagtttttcacgcatactaaaagtttacaacgtttaatttatctagattttacttttaagtaattacaattactcgcaaatattttcgaagttttatttaaaaatgtataacttaagtcattaaaatcatttattatttaatttaacattaataaaataaccaattagtggcgcaatgacaaataatataaaaaatattctaaaaatgtgatagcttgaaatcatcgctacatcagctccagtagccatagccactaaaactatttgactcatacctcctggtgctgctcctaaaaacaattcattgatggattcattagtaatcaaatgtattcctattatcattataaacgttgtgactatgagcattatattttgaaaggctattgctattgcaattcttccctttaaatcactcattaagttggcaatctgtaatccaatacgtatcatataaataagttgcgctgtggctaacaaccaatgatctagtgaaaatgttaaatgtgttgtcatattccatataattaaaactattataggtgctaataattgtttagtggggaagttaatttttgacattcctatatagatgattcccaccattgagaataagatgattatttgccatatatttaaagtctgagaaagtgtgggtacttccattgtagtatgattcatttcatgatggttatcctgaaaaaaatacgaaataagtggtactaaaataacaacaaatattacacgtgatgtctgtgttaaactcacaactaatatatttgctttcttattttcttctgccatcactaacatttggcttagcgcacctggtataacacttaaaattgcagtttctaaatttacttgtgcaattttcttaaaaaagaatgcaattatcaaagctaataaaattagtaggatagtgacaaaaacgatagttagccaatttttacttatgtctttaatcacttgttgtgtgaaggtagagccaatttgaactccaagtagtattaaaccaatttgactcaaccaaaatggccatcgtatttttaattttaatacttttacacataataacgccgctaatattggtccaaacataaatggcaaaatcacatgtaacatttttaataacagacttaacataatagcaattaataatatgattaaattattaataaaattccgcttcaaaataccactctactttcgttaaaagtaagtcacaaaatttctaactttatttaaattcaaagagtagaacaaaatgcatcttaaattcctagtccaccatcgaaccccaacttgccctgtctgttgaatttctcagtgaaattctttttgttagggccccaaaccccaactcgccttgtctgttgaatttctaagtggaatttactgtattgatgacataacatagctttaaaagttgatataagtgcatttttaattcagttataaactacttataagttaagaaagtctaggacattgacttttgccctagactcaattaatttaaataattatattttaaaattatcacacaatacgacttaatgcattatcaaatgcttggatagttttctcaatatcatctttagtatgtgcagttgataaaaatgttccttcaaattgtgaaggtggtaggaaaacaccttccttagccatttctctatacatattactaaataattttaaatcacttttatttgcttcctcaaaatttgttacaggcccctcatttaagaagtaaccaatcattgaaccagcgcgatttactgtgattggaacattatgcttagcaaatacctcttttaatcctttttcaagtatatctcctagagaattaaaatactcataagattcaggagtaagttgactcaatgtttcataaccactagtcattgctaaaggattacctgaaagtgtgccagcttgataaatagtcccaacaggagcaatgtaatccataatttcttttttaccaccaaaagctccaacgggtaaacctccacctatcacttttcctaagcaagttaaatcaggtgttacaccaaagtatccttgcgcacaattataacctacacggaaaccagtcatcacttcatcaaatataagtaatgctccatattcattagtaatatctcttaaaccttgtagaaatccattcactggaggcactacacccatatttccagcaaccggttcaacaataacaccagcaatatcatcgccatatttttcgaacgctaatttaagtgaatctaaatcattatatggcaccgtgatagtgtttttagcaataccttcagggacgcctggtgaatcaggtaaacctagtgttgcaacacctgatcctgctttaatcaataaagaatcactgtgtccatgataacacccttcaaattttataattttattacgtcctgtataacccctagctaaacgaagtgtgtctaaagtagcttcagttcctgaggaaaccattcttactttttcaattgaaggtacacggtcaatcacaagttcagcaagtttattttcttgaagtgttgaagcgccgaagcttgtacctttatctactgcttcatgtaatttggatataacttgttgatttttatgtcccagaattaatgggccccaacttagcacataatcaatgtattcatttccatcaatatcatatattttagatccttcaccatgatccataaaaatagctggtgtgtctactgatttaaatgctcttacgggactgttaacaccgccaggcattaatttctcagcttgctccattgctttaatagatttttcaaaactcatcatatgacctcctcaattatcatctatttatctaaataacgacagatatcttttgcaaaataagtaattattaaatcagcacctgcacgtttcatagatatcatttgttccataacaattttctcttcatctatccaaccatttaacgctgctgcttttgtcatactatattctccactaacgttg

SEQ ID NO: 3401 - DNA, 3015 bp, Artificial Sequence
  Description of Artificial Sequence: synthetic nucleic acid sequence
ggtaggtgtattatttatatttactactttgaatatggcttcaatttctgatagaaaagtacatgccaaaattaaaaatataagaagataggtgagataaagtggaaacaataggagtatcatatatttaaaagaaggttcccaaaagttaatgattatcaatcgaggacctattgtagatatagataatcaaaaatatatatttgattattcagcatgtaattatcctgtcggtgtcgtagaagatcaaatatactattttaacgaagacaatatcgataaagtcgtttttgaaggttattctgatcaagatgagatgagatttcaagaattatttaaagaaatgaaaaataatttagatgatgatattcaacaaggtattgttcaaaagcaagataatttaggtttaatttaacataagtcatgattatctgaagttatctattatcgaatattcagagatgatataatatatgagtcgcctatctctcaggcgtcaattgacgaagagaggaggtgcattaattgctaatcattttcgttcacatcacgaccacagtcctcagttgttgtattattgcattatttactcattggatatgtaattgcaataataaataggcaaccatagacacacataaaaatccccacactattgcagtagtgtggggattggtgcattaattgctaatcattttcattatctagattataacactggttagtagagaaatgcaaagatagacaaataattaatgactgaggataaagatataaaacaaacatactttcctcattttgataccatagccaccaactttttacttgtgttctatttctaatatttaattctttcataatttcttttgttgaaaattctgctgctttcatttcaacggctttatactttgtttctactgaataagaagctctttattttggagcaacaggtgttttaagctatcgaaaatttttcccatttatttataatttgtttcaaaaaggatactttgaaaattcactaacaattattggcagtggtttaaatgagttaactactgatgaatttagagaaaaagtcaaaaatgctattcaaaataatattgaaaactcaaaggaaattggtgcgtttttaaaacgtttattttataaacaacaggacgctaatagtaaagatagctaccaaaaatttttggaaatgagtttagaactagatgataagtttgacctaaaagaaaatcgattgttctatcttgcaatgtcccctaaattttttggagttgcaacaaaccacttgaaagagtctggattaacgaacgtaaaaggggtgatgcgaataattatagaaaaaccatttggtgatgatttaaaatctgcaaaaaattaaataatcaaataagaaagtcttttaagaagaaaaaatatttggaattgatcactatttaggtaaagaaatgattcaaaatattgaacgtctacgattttgaaacactatatttgaaccactttggaataataagtatatttccaatatacaagcaacttcttcagaaacgattagtatagaatatcgtggtggttactacgaatcaagcggcgccctaaaattcatggttcaaaatcatttattacaaatggtttaattacttgcaatagaacctccaattagtagaaaaagtagtgatataagaaaagaaaacatttcaagtcttaaaatccttgaaatgttttaatccaaatgaaattaaagaaagtttcgttcgtggtcaatatgatgggggaatgatgaataatgagttcgttcctgcatatagaaatgaacctaatgtaaattcacaatctaatactgaaacttttgtagcaggtaaaatagaaattgaaaactctaaatgggctagtgttacattttatattcgtacagaaaaaagaatgaaaaaaatctatccaaatcgttatagagtttaaaaaatccaatgcaattttattatagtaattgtgaacagaatgcatcaaacttattagtcatcaacgtacaacctaatgaaggattttctttatgtgtgaatggtaagaaaagtaatcaaaataatgaaatgcaaaaagtgaagctttcttatactatgccgattaaagataaaatgaacacagttgatgcatatgaaaatcttatttacgatacattaattggagaacaaacaaaatttacgcattgggaagaattaaaaattcttggaaatttattgatgatattgaaaatgtatggaaacaagaatagccacagtttcctaattatgcctttggatgctatgggcctaaagaaagtgaaaaattacttagtgaagacggattgaattggtggaataatttgtaatataaaagacctaaagttgtcgtgttttgaatgagtagttaatccttaattaatatgcaataatcaatgttataaagtttataaagggaggacaattaatggattttattaatattacaggtgcttcacaaaataacttgaaaaacatagatgtaaatatcccaaaacacttagtaacggtatttacaggtcgttctggttcagggaaatcatctttagtgtttaatactgttgctgcggagtctgaacagctactaaatgaaagttattctagttatattcaatttcatttaaatcaacaacccagaccgaaagtaaagaaaattaaaaatcttcctgtagcaatgacgattaatcagaaaagattcaatgggaattctcgctccacggtaggaacagtttcagatatatatgcttctgttagattactgtggtctagaataggcgaaccgtttgttggttattcagatgcatattccttcaatagtcctaagggcatgtgtaaaacttgtgagggattaggatatattgaagacattaacttagatgaattgctagattgggataagtctttaaatgaaggtgcaatagactttccttcttttggaccagacaaagagcgtggtaaagcctatcgagatagt

SEQ ID NO: 3402 - DNA, 2898 bp, Artificial Sequence
  Description of Artificial Sequence: synthetic nucleic acid sequence
gtattcaacaagtttttttaatttatcttttcgtgttaaatgtctaaatcctttatctaaacttttcatttatgtactcctttaaaatatctttatattactgtagtaatgtaaccttttaactttcgctttaaatatcaactgctaacattgtcttgcactcaaataattcaaaacttttcacaatttttgtaaagcgcttacatatttattatatattcctggtcatgtctgttatatttcattgtataaaacgaattttctttggtatgatactagtgctacttcaaaaaatgaaaggatgtcacaccttatgaatataggtatagataaaataagtttctatgtacccaaatattatgtagacatggctaaacttgcagaagcgcgccaagtcgatcctaataaatttttaattggaattggtcaaactgaaatgactgtgagcccagtgaatcaagatatcgtatctatgggagccaatgctgctaaagatattataacagaagaagataaaaagaatattggtatggttatagtagcaactgagtctgcgattgataatgccaaagcagcagccgttcaaattcaccatcttttaggtattcaaccctttgcaagatgctttgaaatgaaagaggcttgttatgcagcaacacctgcaattcaacttgccaaagattatcttgctcaacgccctaacgaaaaggttcttgtcattgctagtgacacagctcgttatggtattcattctggtggtgagcctactcaaggtgccggtgcagttgcaatgatgatttcacataacccaagtattttaaaacttaatgatgatgccgtagcatatactgaagacgtttatgatttctggcgtccaacgggtcatcaatatcccttagttgctggtgcattgtcgaaagatgcctatatcaagtcattccaagaaagttggaatgaatatgcacgtcgccataataaaacactcgctgatttcgcttcactatgtttccatgtaccattcaccaaaatgggacaaaaagctttagattctattattaatcatgccgatgaaactacacaagaccgtcttaactctagttaccaagatgcagttgattataatcgttatgtcggtaatatttacacagggtccttatatttaagtctcatctctttattagaaacacgtgatttaaaaggcggacaaacgattggtctctttagttatggttctggttctgtaggcgagttctttagtggaacattagtagatggattcaaggagcaattagatgttgagcgccacaaatttttattaaataatagaatagaggtttctgttgatgaatatgaacatttcttcaaacgctttgaccaattagaattgaatcatgaacttgaaaaatcaaatgcagatcgtgacattttctatttaaaatctattgataacaatattcgtgaatatcatatagcagaataatctaaactcaattcttttgcttttttaattttttaaaatgaaagaaacgaatttactattcatacttgccccctaaaaacaacgtcatatagctgtttttagggggtttttaatcccaagatagtgcatttcatctattatagacctctactatttatatactgtttacctactattcatagataaaaacgaatcctatccatagatcaacattgacaaataactaaagcaattctatacaataacgtatctcaaggtttcgttgtttttttaggtctgtataaatgtgtcatatctatttcttccaattttaataattttattttgttgtctaaagtacctccgtatcctgttaaatttccatctttaccaaccactcgatgacatggtataagtatagaaataggattactcccaacagcacctcctacagcctgagcagacattgctggcttattcattgctcgtcctactgttttagcaatctctccatatgttttaagttctctataacgaattgtctgaagttcattccataccttctgttgaaaatcagtgccttttggtgctaacggtacttttatctcaggataattccctttaaaatactctcttaaccacgctttagtatctttaaaaacatctaacgtatcctttgttttaattcctttcaaatgttgattagggtataagacatgtgacaacgagatgccatcgtttgtaattaattgcaataagccaacgggcgagtcatacattgattgatacatatttctccaactccttaaatgtgtatatcattctagtcatatccttataaactaacgcattctattctgaacataattttataatatagataattgctatatttatgaaattggataaacattcgaatagaatgtgatacaccaaagaattgatacgttttattatctttagcaacctcttttaatttcttagtatcttcatgcttaacataattatttaattgcttttcacttgaatgacacgcccatgaatcaaaatagaaaaagtttacaaaaatataacaaattgctaaaaaaattattataccaataacatagaatacttttttcattaaagttcacctagttttcaaaaaaatttttataatttatgataacttaaaagtgtatattttttctacataatatatttaattttcaaggagatgtaaaaaagttgaaaaatttcgcaaaactaattttggtgggcattttagtatcggggtcagggatagcgagtgtacaaacaaatataactcacgcaaaagaaagtcacgattcaactcctcaaaatattaaattagtgggaacgtatgatacttctcaagttgattccaaaacgatgaaacaatttaaagaaatagaaaaagaagataataatttccacat

SEQ ID NO: 3403 - DNA, 2995 bp, Artificial Sequence
  Description of Artificial Sequence: synthetic nucleic acid sequence
cagaaggatcaatcacaccatagcgatgtgtatcagattctggcacttcttgaacacctattactgaatggcctgtttcttcataaacatccattaattgtttaatagctggtgtatcagactctacaatgtcatctcctaataacactgcaaatggttcgttacctataaactgttttgcagtatgaattgcatgtcctagccctttttgttctttttgtcgcacgtaaaaaatattagctaaatctgttgaatattgtactttttcaagtaaatctgcttttcctttactttcaagtactatctctagttctttttgattgtcaaagtgatcctcaattgcacgtttatgcttgccagtcactataataatatcttctattcctgcattaaaagcttcttctacaatatattgaattgttggtttatctaatattggtaacatttcttttggcatcgccttagttgctggtaaaaaacgagtacctaaaccagcagctggtatgattgctttttttatgtttttcaacgtataaactcctttaacaacctaagtttttgactacttaataaagtgtatcactatttaaaatgctttcatagtaatgttttttcaccacaatctttttcaatattaacattaacttaatcaagaattgagttagaaattaaaaatactcgaatagaaattaactttgttttaaatatatcggtgacagacatctactgaaaaacactcgctatatttttaaaatgagagcttcaggaattttttctctatacaaataaactgataaataaaataaataaaataccagatactgaaataattgtctctaataacgaccatgttaaaaatgtttctttaactgtcagcccgaaatattctttaaacatccagaatccagcatcattgacgtgagagagaattacgctacctgcacctattgcaagaacgaccaaagctacattaacatctgaatgttctaaaagtggtaacacaatgcctgttgttgatacggcagcaactgtagctgatcctaatgaaatccttaagactgcagctacaatccatgctaataaaatgggcgacatgcttgttccttcaaacatcttagcgattgtatcacctacgccaccatcgatgagcacttgtttaaatgtaccaccaccaccgatgatgagtaacatcatgccgattggataaatagcatgcgtaactgatttcataatgtcttccattttccgttgttgcttcattcccattgtaaagattgcaaatatcactgcgataagcattgcagtaccagcagttcctatgaagtaaacaatttgttcgaatacatttgttgcttcttcgtgtcctgtactatggatggtgacggtgcagctgcaatgcgttataccgaagcacgtatgactaaaataacattagaacttttacgtgatattaacaaagacacaattgattttattgacaactatgatggtaatgaaagagagccgtcagtcttacctgcacgtttccctaacttactagtaaatggtgcggcaggaattgccgtaggtatggctacaaatattcctccccacaatttaactgaagttattgatggtgtgctcagtttaagtaagaatccagacatcacaattaatgagctgatggaagacatacaaggtcctgattttcctacagctggtttagtactagggaaaagtggtattcgtcgagcttatgaaacaggtcgtgggtcaattcaaatgcgttctcgtgctgaaatagaagaacgtggtggtggccgtcaacgtattgtcgtaacggaaatacctttccaagtcaataaagcgcgtatgattgaaaaaatcgcagagttagttagagataagaaaatcgacggtattacagatttacgtgatgaaacaagtttgcgtacaggtgtaagagtagttattgatgtacgtaaagatgcaaatgcgagtgttattttaaataatttatataaacaaacgccattacaaacatcatttggtgtgaatatgattgctttagtgaatggtagacctaaactaatcaatttaaaagaagcacttatccattacttagaacaccaaaaaacagtggttagacgacgtactgaatataatcttaaaaaagcaagagaccgtgcccatattctagaaggtttacgaatagcactagatcatattgatgaaattatcacaacaattcgtgaatcggacactgataaaattgcgatggcaagtttacaagagcgttttaaactaactgaacgtcaagctcaagcaattttagatatgcgtttaagacgtttaactggattagaaagagataaaatagaatctgagtataatgaacttctagaatatattaaagagttagaagagattttagctgatgaagaagtactattacaattagttcgtgatgaattgactgaaattaaagaacgtttcggcgatgaacgtcgcactgaaattcaattaggtggtctagaagatcttgaagatgaagacttaatccctgaagaacaaattgttattacattaagtcataataactatattaaacgtttaccagtatctacatatcgttctcaaaatcgtggtggtcgtggcatacaaggtatgaacacgttggatgaggacttcgttagtcaattggtaacaatgagtacacatgattatgttctgttctttacgaataaaggtcgtgtatataaactcaaaggttatgaagttcctgagttgtcacgtcaatccaaaggcatacctattattaatgcgattgaactcgaaaatgacgaaacaataagtacgatgattgcagttaaagaccttgaaagtgaagaagattatctcgtatttgcgacaaaacaaggtatcgttaaacgttcatcattaagtaacttctcccgtattaacaaaaacggtaaaattgcaattaactttaaagaagatgatgaattaattgcag

SEQ ID NO: 3404 - DNA, 3710 bp, Artificial Sequence
  Description of Artificial Sequence: synthetic nucleic acid sequence
ggacagtattcctattatcacacccataataatgggacgaatactggtttgaacttgtaataatgagatattcatcattattaacgaaacacatatcactgtaaacatataaacactcaaagttagagttaaatgattacttttaaagaatacaacattcataagtggaagcagattaattaatcctatactagctgctgtacttattactaccgtgattttaattgatgcatttgcataacgattcatatgaatttgattatgttcacgaattgcttgagtaagtaatgggataagaacgaaactaaaagtcgtagttacaatcaaacccatttgtataaatgaagcaccacgatcataaatgcctttttgaataattgcttctttaaaagcaataccgctatgttgtaataaacgtattattgtaaaactatccacaacttgccataaaataacgataagttgactcaatgcaaatatggatatggaaataaacaactgcttccattgaatggaagtattattaaagcgatagcataacttaagtttaagtggttttttaagtaataaatataacattgaacctaaaaaaccaatcgaagatgccaatatagctaatgctcctgcttgataaatagaccagtgtttcattgaaaacataataattgcaacaatgattaaactaactctaattacctgttctataacctgggaaattgctggtatggtcattacttgttttgattgataaaatcctcttaacactcctaagacacctattaaaataaaactaaaactggccatctttaacatgggtgctaaattagaatcgcccatccatcgggtaatcatattcgcaaacataaaaagcaaaataaagacgataaaacctatgcattgtaatcgaaacataacccttgtatagacttcatcggatcgattaacacctatcacttgagtcacagcacttggaatagcattcatagataaaataacccctagtgctacgacaggatatatttgttgataagcatataaaccgtcatcacctaaaacattttgatacggaatgcgataaatggcacttagtatcttcacaataattaatgctaaggtaagtataacgacgccgttaaacgccgtctcactcttagtcttcatctttaatcgccatactttcttcaatacatctaactaagaatttcaaactatctaaccattgttttgattttgttagcgttacattcattgcattattttgcacgccaactttcattgctctaccaagaggttgcgtctgtttaaacaattcttctccattaatatcttcagtcgctttaggtgataaaatgatttgtatagatttgcctttgtcttttatcaattcgacacccgcatgtagagcgtggactttgatttcaacaatatctaataatcgttcgacttcaattggataatcattaaaacgatctattaattcatctttgacatcgaaaagttgttcttcagtttctacttttcgaagttttttataaatctcaattttagcctgttcactttgtatatattcagctggtaaataagcatctaagtgcaattctacttcaatatctggtgcatccggcgattcttctttaatgccacgtttttcgtttactgcttcttctaacatttgagagtataaatcgaaaccaaccgaatcaataaagccatgttgttgcttaccgagtaaattgcctgcaccacgaatatttaaatctcgcatagcgattttaaaacctgaacctagttcggtaaactccttaatagcttgcaatcgctcttcagcagtctcatttaacactttgttagctggatgtaagaaataagcgtaaccaattctacttgaacgtcctacacgtcctcttaattggtatagctggcttaaaccaaaacgatcagcctcttctatgattaaagtattagcatttggtacatctacacctgtttcaataattgtagtcgttactaaaatatcgtactcgtgattaataaagcttaacattgtttcctctaaatcacgttcagtcatttggccatgtgctacagcaatgttagcgtcaggcattaacctttgaagttgttctcttttttcataaatggactgcactttgttatacaaataaaatacttgtccatcgcgagataattcacgctctaatgcctctttaataaagttcgtattctgttctaagacataagtttgtacaggaaaacgattttcaggtggtgtttcaatcactgataagtcacgtacacctaacatactcatatgcaatgttcttggtattggtgttgcagtaagcgtcagtacatcaacgttttttttcaaagttttaatgcgttctttatgtcgcactccaaaacgttgttcttcatcaacaataagcaatcccaaatctttatattgaatatctttacctaataatttatgtgtacctacgacaatgtcaacatatcctgatttgagcccttctttagtttcccttatttctttagctgtgcggaatcgacttaccaattgaatttcgaccggaaaatcttgcatacgttcaagtagtgtttcgtagtgttgttgtgcaagaatcgttgttggtactaaaaacgcaacttgcttaccatccatgacagctttaaacgctgcacggacagccacttcagttttaccatatcccacatcaccacaaagaagacggtccataggtcttgctctttccatgtcacctttaatttcatcgaatgacttactttgatcgggtgttaattcatatggaaaatcatgctcaaatgctgattgctctgcagtatcttggccgtattgataacctacagacatttcacgttctttatacaaatcaattaattcatcagctatatcttcaacactttgttgaactttcgcctttgtttttttccattctgtcccgcctaatttatttaatctaggcgacttatcttcagaagccacatacttttgaacttgatccatttgatcaactggaacgaataattgatcagttccttccacctcgaacctattaacctcgtcatcttcgagggatcttataaccgaagttgggaaatctcatcttgaggggggcttcatgcttagatgctttcagcacttatcccgtccatacatagctacccagctatgccgttggcacgacaactggtacaccagaggtatgtccatcccggtcctctcgtactaaggacagctcctctcaaatttcctacgcccacgacggatagggaccgaactgtctcacgacgttctgaacccagctcgcgtaccgctttaatgggcgaacagcccaacccttgggaccgactacagccccaggatgcgatgagccgacatcgaggtgccaaacctccccgtcgatgtgaactcttgggggagataagcctgttatccccggggtagcttttatccgttgagcgatggcccttccatgcggaaccaccggatcactaagtccgtctttcgaccctgctcgacttgtaggtctcgcagtcaagctcccttatgcctttacactctatgaatgatttccaaccattctgagggaacctttgagcgcctccgttaccttttaggaggcgaccgccccagtcaaactgcccgcctgacactgtctcccaccacgataagtggtgcgggttag

SEQ ID NO: 3405 - DNA, 3219 bp, Artificial Sequence
  Description of Artificial Sequence: synthetic nucleic acid sequence
gtggtattaaaccagatactatcaaagatattgttgctgaagatccagatttagttattgttggtggcggtattgcgaatgctgacgatcctgtagaagcagcaaaacaatgtagagcagctattgaaggtaaataagatgagtgaatttaataattatcgtcttattcttgaagagttagattctactttatctcaagtagataatacagagtatgaacgttttgctaatgatgttataggtgcagatcgcatatttacagctggtaaaggtcgttcaggttttgttgctaatagttttgcaatgcgcttaaatcaattaggtaaaaatgcctacgttgtaggtgagtcaacaacaccttcaattaaagaacatgatttgtttattattatttcaggttcaggttctacagaacatttaagattattagctgaaaaagcacaatctgagggtgcaaaaattgtcttattaactacaaatgcggaatcgccaatcggtaatcttgcagagacggttgttgaattgcctgcaggtactaaacatgatgttgagggttcgaaacaaccacttggtagtttatttgaacaggcttcacttatattcttagatagtgttgtattacctttaatggatgcatttcacattagtgaaaaaacaatgcaagagaatcatgctaatttagaataactagaatgagagatgagcacttttgtctatgattagacaaaggtgcttttttaataaatggtgcaacattactcctttaagtgtatatttataatataactttaactatgaggtgaacatcatgaattttgatagttatatttttgattttgatggaacgctaattgatacaacaacatgtcacgtcaaagctacgcaaagcgcttttaaaagattaaatttagatgaacctacagaacaagctattttacatacatatcatttaaatttatataacaattttaaagcgctagcttcacatgaactgtctttttatcaaatagaaaaattaatagatgaatacaatcattgttttagcaacgatgaaatacatcaatcaaaagaatataccggaataagtgaagcattaaaatttttacataaccaaaagaaaaaaatatttgtagtgtctaataaagaaatactaacaactcaaaagtatttagattatctcggattaagccgttttataactgattcattaggtgtctgtattaaaaatgaagacaaacttctttgtgaaacgattcaaaatttgatacagaaacatcatttaatgataggtaaaaccgtgtatataggggacacagcacagaatatcaagagtgcgaatcaagctcatgtgcaaacatgcgctgtcacatggggagcacaatctgcacacgaattgttgcatgaaaatcctcattatattgttaatgatccagaagaatttttaacaattttataatattttcaatggtaggatgataattcatgaggaattttatcctactctttttttaaaactatgaagcaagtataatgtaaacataattatataaagtgtttacaaatggtgatgaagatgaaaaaaataatggaatatttacagcattatattaatcaatacccgcatcgattagctttagtgtttgaagatcgacatctaacgtatggagaattaagtaaagaaatttatcaggctagtatgcgctataaagaagtaaaattaaacaaaaaagtaggtctaatggatgaacatcctgtaaataatattattaactattttgcggtacatcaaagaggtggaattccttgcatttttaatcatcaatggagtaatgaaaggatacatcaacttgtaaaaagttatgacatacaatggttaattaaagataatcatcttacctcaaatcatgataactcaatttataatgatgaggttatcccacgtaatgttatacatataggtttcacgtcaggaactacaggtttacccaaagcgttttatagaaatgaacattcttggatagtttcttttaaggaaaatgagaaattactccagcattgtgaagaaaccattgtagcaccgggtcctttatcacattcactttcattgtacgcatgtatttatgcattaagtactggaaaaacatttataggtcaaaaaaattttaatccactatctcttatgcgtcttattaatcaattgaacaaaacgacagcaatatttgtagtgccaacgatggtacaacaacttatttcaactcaacgacattgttcatcgattaaaagtattttgagtagtggtgctaaacttacattgcaacagtttcaacaaatcagaaatttatatccacaagcaaatttaatagaattttttgggacatctgaagcaagttttataagctacaattttaaccaatcatctcctgctaattctgttggtaaacttttccctcatgtcgagacacgattattaaatcaagatgatgatgcagtaggattattagccgttagaagtgaaatggtgtttagtggttatgttggacaaagcaatcaagagggggcatggattaaaacaggcgacttcgcttatattaaaaatcaacatttgtttttagtaggtagagagagtgatcgtattatagttggggggattaatgtatatccaacagctattgaaagcttaattatggatattgaaggcattgatgaggcccttgtcattggtataccacatgctaaatttggagaaatagcgatattgctttattcaggtaaagtacaattgaattaccgacaaattaaatcttttttaatgaaacatctttcaagacaagaagttccatcaaaattaaagaaaattgaccatatgatttatacagaatcaggaaagattgctagaaaagagatgaaaaataaatttattaatggagagttataaaaatgaaacaacctgttattattgcagcaaaacgtatagctttcggtaagtatggtggccgattgaggcatttagaacctgaatcattactagaacctttatttaatcattttacagatcagtatccaaaagtaatgtctcttttggatgacgtcattttaggtaatacggtaggtaatggggggaatttagctagaaaatcattacttgaagcgggattagattttaaaatacctggtataacaattgatcgtcaatgtggctcaggtcttgaagccgttata

SEQ ID NO: 3406 - DNA, 3100 bp, Artificial Sequence
  Description of Artificial Sequence: synthetic nucleic acid sequence
tgaagtttaagtcttttaataaatctacaacaaaaactttacgttctcctttgaaaaatttaccgattgctgggataaatttttcatgatcttttagcatatatatcaggaagaaaggcaccattattaataaaaatacagttgagatgaaagacgtaatatatgacactgaattagataaaatagacgttgcgccatctcccatggatttaaccgctttattaatacgatgtgtgacatcatctggtaatttatccatttgtcttaacgagaaattaattaattgttcggcttctttttgtaatgatggtgtttgtttaattaagttattaatattggaaataatgataggtgctataaatgataccacaatagcgatgatagctattaatcctatgaatattgttgttatactagcccaacgtggaaagccccacttttctaatatgttttgaaaaggtaaacatatgtaaaagagaaatccactaattaaaaatggaaggaagactgaaccaatgatagtagctattggagcaaatacttcatgcacttccataaatagtttgatgagtatgaacagcataataaaaaatattcctgttctaaaccaaaccttattgaacatagattgtgatcctcctattttattctttttcatactcaataagtatatatcaaaactcagtcattaaaaagagtaaatacttttacaatataactgcatgcactttatttttaataaaatgaaaaaactagtatgaaattaatttgtatacgagcttgctataaatttaaaagtattataagtattgatacaatagtattaacattacaagggagcatcggtttatgtcggagtttaaagtaggtaagattaataaaaaaataatacatagtgatattttaaatagagatgtaacattatcggtttatttacctgaggattatacaaacttatttaaatatcagttgattttttgctttgatggtttagatttttttagatttggtagaatacaacgcatatatgaacagttacgtgaagaacaatcaatacaacgtgcaattatagtaggattccattacgaagatgttgaaaaacgtagggaagaatttcatccttcaggaagtcgttctaatttaaccattaaagcaatgggaaaagaaattcttccttatatcgatgcgacatttccaacttataaagtaggtaatacaaggttacttattggagatagtttagcaggaagtatcgctttaatgactgcaatgacttacccaactatttttagtcgagttgcgttattgagcccaatgtataatgaaaatattaagaaaaaaattgatacatgtatgaataaaggtcaattgacgatatggcatgccattggtttagaagaagcagattttattttaccaactaatggtaaaagagctaactttttaacacctaaccgtgaattaaatcaactgattaaagaagataatattgaatatttctataaagaatttaacggtggacatcattggaaatcatggaaaccattgctaggagatattctcttacaatttttaggtgatccaataaatggaaaatatgtttaataaagtaagataaataaaatagtatgttagcgaatggttgttgaatgcgaaacactattaatttcagaaatgtaattgttttcatgataaaagtaacggttttcaaaaagttttgatataataggaataagttaaacaaaggaggaatttaaatgattttaggattagcattggttccgtcaaagtcatttcaagatgaggtgaatgcttatcgcaagcgatatgacaatcattatgctcaaataatgcctcatatcacgattaaacctcaatttgaaatcgatgatcatgattttaatttaattaaaaatgaagtgaaaaatcgaatttctagtattaaaccagtagaagtacatgctacaaaggcatctaatttcgctccaatcagtaatgttatatacttcaaagttgctaaaacagagtcattagatcaattatttaatcaatttaatacagaagatttttacggtacagctgaacatccttttgtaccacattttacaattgcccaaggtctaacaagtcaagaatttgaagatatatatggtcaagtaaaattagcaggggtagaccatagagaaataattgaagaactatcgttacttcaatatagtgaagaagaggacaaatggactattattgaaacttttacattaggataaaaagttcaaaattgtaaagtgaaattgaatttacagaatcattattgttaaatacgtgaagagcgcttaatcaactaaaaacgccaaatcctattgtgtttcagtgggatttggcgtttttatatgaaacataattatattgtatagttaatcattcaaaaagattaatgtacgttttatattgaatattcatatttcaaatgcatatgaatgacgtttcattaatatatacaactaatctttatataaacgatttatagattttaaggtttaacccttctgtttgttttaataaagtaatatccgtaaaatactgcaagtgcaagaaaaatcatcgctgaaaagtaaaaggtattatttaaattattagtaaattgagtaattagacctccgactagtgggcctatcattgaaccgaagccttgaacactgttgaacacgccccatgtttcttcctgttcgttaggattaatatgcccagccataaaggtattccaagccggtaagaggataccgtacattagcccaataaaaagtcctatggcccaaactatatatatatttgtaattgtagatagcccgaatataagaattgtatatagtataaagccactaaaaataactccatacataaaccctttgctattattgtcgatgatttttgataaaaataacatagagaaagcacagcctatgccaccaataatgattgctactgtatattcaacggttgatactttcacaacttgcgttgcatattttggaagaataggtacaagtgctgctatagctgctccttgtaacaagatacccggaaatagaataagatgacg

SEQ ID NO: 3407 - DNA, 3692 bp, Artificial Sequence
  Description of Artificial Sequence: synthetic nucleic acid sequence
taacgtgtgtctcgctatcagtaattactgcaaaaggtgtcacttcagaaccagttcctgatgtcgttggtatacatataaattttgcgtttttaggtttggtaattttataagtacgtttacgaatatctaagaacttttgttttgccccaaaaaatgaagtttctggatgctcaaagaacatccatattgctttggctgcatccattgccgaaccgccaccgagtgcaataatagtattaggttggaaatttataaacatttctaaccccttatagactgtatgagttgatggattaggttcaacttcgttaaacactttgatttgtggttggttttctcggcgtctcagcacttgttcaactatatcagtataaccaatattaaccattcctggatcacaaactatcattacacgttcaacattatccatctctgtcaaatacataactgaattttcttcaaaataaactttaggtgggagtttaaaccattgcatattattacgacgttttgctattgttttaatatttaataagtctactgcgcttacattatgagaaatagaatttctaccatatgaaccacaacctaacgtgagtgaaggaatgagttcattatacatatttccaattcctccgacagcagaaggtgtatttaccaatacacggcaagctttcatttttagaccgaatttttgttgtaattgactatcctcggtgtgaattacagcagtgtgacctaaaccaccaaattttaatatgtcttcacaaatttgtagtgcatgtcctgttgattttgcagttaccattgcgagtacaggtgataatttttcacgtgataaaggataatcttttccaattccatcaatttctgcgactaataattttgttttttctggaacactaattcctgacaatttcgctatatctacagcagatttaccaactatatcaggtttaactgcagttttatcttcattcatgatggcatcttctaattgttgtagttcatttttattaacaaaatatgtttggtgtaatttgaattctttaacgacgtcagtgtatacttctttatcaacaaccatgacttgttcagaagcacaaatcataccattatcaaaagttttagaaccaatgatatcattaacagcacgtttgatatgagcagttttttcaatataagtaggaacattacctggaccgactcctaatgcaggtttacctgtcgaatatgcggactttaccattccagagcctccagtcgctagaactaaagcaatatctttatgattcattaattgtttagttgcctcaattgatggcacttctatccattgaatacaatctttaggagcacctgcttttgttgcagcttctaaaatgactttagcagcatattttgatgattgttgtgcacttggatgaaatgcgaaaataattggattacctgttttaatagcaatcattgctttgaaaatagttgtagatgtagggttggtcgttggtgtcactccacaaatcacgcctataggttcagctacatacgttaatcctttttgtttatcttcacctatgatacctactgttttattgtctttgattgaattccatatgtactctgaggcatataaatttttgatagctttgtcttcataaatacctctacctgtttcgtcgtaagctagtttagctaaatgcatatgctgatcaacagcagccatgctcatctgatgtacaatgtcattaatctcatgttgtgattttttagatagttcttttagagcttcttgtcctttttctgctaatgaatcaatcatttgtgtgacttcatctttgtttgattcatatgtattttttttagttacagataacatatacaaccactccttagatattgtgaaataattcacaaacattatagtacagctctttccaaattaaaagaaaatacagactattaaagagtcaattgtgatgtttatatgaacacatttttaacctatatatttagtcggggttgaggtgtaagacttgatgcaatgggaacaagacgtatttggtagttaaaaaaatctatttttaaaagaagtaaattttaaaaaaattattgtaagtattcttactaaaaataatgaggggtgttgtaatgaaattatcgtctcacccgactaacgatgttatcagtttataaaataaaaaactgagacaatcatttatgtctcagtagctcatgctttaaaaataaattgataaagaataagtgaaatttatattaattattttgttcagttgcagtaagaagttgtatcgctttgggtaatacttgaatctcaattggtgtttctaaattaatttcgccatcaatatccactttcatactagggtttgttgagagtgtgatgtgcttacctgatatgtgatcaataccttgtgtgatttcgttccaattcatactatcacgtttttttaatatatcattcaatatatttagtgtttgatcattaaatacaaatgtgtttgctcttccatcttgtggcgataaatcggttagcggaatttgtccaccacctatattgggaccgtttgctattaacatcatcgaagtattgccttcttttgtttcaccatcaacagtcaatgagaaatcaaatttaacaggatttaataacgttttaacggttgatccaatatagctgaatttaccgaatatatctttagaaccatcttgaacattctctgcattttgtactattaagccaagtccaacgaaattaagtacatataagtcgttcacttttaacacatcatatgattcagcatgtgatgttaataattgctcactagctgttttaaaattagggtgcagttgaagtgtttttgtaaaatcgttaaaggtaccacctggtattacaccgattggtaaatttaactgatactgcataacgccatttactagttcattaagtgtaccatctccacctaaaataaataaaacgtctacatcagagctataattttcatttttaatagatttacaatatttaataatatcgcctttattttcactgagttgaagagagaggtgtttacacattgaactaagagattttgcaacttctcctatgccattatgtatatctttcaaaccgctatgttcattcaaacttggcacggtacaccattaaaacgtttagcgaatgatatgaaagtggtacgtatgccgggtactacgacaccaaagtataagcgtaattttaatcgtgaaacatcacgttgggattatttaatttcgccaaatagatattcaactgaaatatttagaagtgctttttggatggatgaagaaagaatattagagataggttatccaagaaatgatgtattagttaatagagccaatgatcaagagtatttagatgaaattagaactcacttaaatttacctagtgataaaaaggttattatgtatgctccgacatggagagacgatgaatttgtgagtaaaggaaaatatttgtttgaattaaaaattgatttagacaacctttataaagaactcggagatgattatgtgattttattacgcatgcattatctcatttctaacgcacttgatttatctggttatgaaaattttgcaattgatgtttcaaactataatgacgtctctgaattatttttaataag

SEQ ID NO: 3408 - DNA, 3931 bp, Artificial Sequence
  Description of Artificial Sequence: synthetic nucleic acid sequence
cgccactgtgctctaaagatatacgtgtcgcgcaacttgtttctgtcgtgcttattatgattagtgtgatattcgtaatttatagaagagttaaataccaaccaataaaatatgaaaattcaggaccattaacatggccgattaaaaaggctaagtgattattttgagaagattaagtaaagagaagcatcatcaagtgaatcctttatggcatatatatagaaaaattaaattcgtaaaagtgctaaagcaaacgttgattatagaaattgcaagatttgttcctagtatgaaacttaaaaataaaatatataaaaagcttttaaaaatggatgtcgggaatcatacttcatttgcatataaagtgttgcctgatttgttttatccagaatacatttcggttggcaagaatacagtcattggttataatacaacaatattaactcacgaagtacttgttgatgagtggagagtaggaaaagtcattataggcgattacactttaataggtgcaaatacgacaatattaccaggaataaccataggaaatcatgttaaaattggtgcgggtacggttgtgtctaaagatgttcccgattacagttttgcatttggtaatcctatgcaaatacaattagattcaggaggtgacaatgaatggcacaaaaagaaaataacatcattccaatgatttttgatgaggctttttatcgtaaaatggctacccaaaagtggcgacaacaggactacaagaaggcggcagaatattatgaaaaagtgcttgagttgtcacctaaggattttgatattcaacaacactatgctcaatgtttagttaaattaaatatcggcaaaaaagcagaacgtctattttatgagaatattgttaaagactttcatgtagcagaaagtttctatgaactaagtcaattaaatatagaattaaacgagccaaacaaggcattcttgtttggtattaattatgtaatattgtcagaggataaagattttagagaaatgcttgaaaaaacattcgaagtcacgtatacaaatgaacaaaaaattgaattagaagcacaattgttttcaacacaacttttatttcaatttctcttttcgcaaggtaggttagaagaagcccgaacatatattttgaatcaatcttacgagatacaacagcatagggtgattaggaatttacttgcaatgtgttatttgtatctaggtgagtatgatagcgccaaagcaatgtttgaagaacttttaaaggaagataattcagacgtgcatgcactttgtcactacacattattactttataataaaaaagaaacagaaaaatatcaaaaatatcttaaaatacttaataaagtagtaccactaaatgacgacgaaacctttaaattaggaatcgtattgagttatttaaaacagtatcgtgcttctcaaaatttactttatccactttataaaaaaggtaaatttgtctctattcaaatgtataatgcattgagtttcaatttttattacctaggaaataaagacgaaagtattgagatgtggaacaagctcactcaaatttctgaagttgatgttggttatgcaccttgggtaattgaggaaagtaaaacggtatttgaatcacgagtgttaccattattactagatgataataatcattatcgactttacggtatttttttacttcatcaattaaatggaaaagaaatactaatgactgaagatatttggtcaattcttgaatcaatgaatgactatgagaaactttatctcacatatttggtacaaggactcacactcaataaattagattttatacacagaggtatgcaaaggttgtataattttaagaaattcaaatataacacgtctttatttacagattggattaatcaagcagaaatgattatagctgaaaatgtagatttagtagatgtcgatagatatgtagctgcatttgtttacctatcgtatcgtcgttctagccaaccacttaccaagaggcaattgatggacgattttaatgtttctagatacaaactgaataaagcaattgaatttatattgagcatataaatttatgaaatgaaaagtatgatatataatgcgcataatgattaataagtaggaggcatttaaaatgactgaagtagattttgatgtagcaataatcggtgcaggtcctgccggtatgacagcagcagtatatgcatctcgtgccaatttaaaaactgtcatgattgaacgcggtatgccaggcggtcaaatggcaaacactgaagaagtagagaattttccaggatttgagatgatcacaggtcctgacttatctactaaaatgtttgaacatgctaaaaaatttggtgcggaataccaatatggcgatattaaatctgttgaagataaaggcgactataaagttatcaatttagggaatatagttgttgatgtaaatgtgtgtcacagtattgtttaacagtattttcataacgtaataacaatgtgtcaatcatcggtgttgcaacgtttaatgctcttccaatcgcttgaattatcaaagtacgataataatcttcactcggcatgcgtggtatatgtatgactccttgttcatcagtatcaacatgtttgtatggtacggcagaaaaatcaaaatatgcaccttgatcgtccggattagaaaacggatcgattaaaattgctgtatatcgcacataaagtagatactcttgatgaatagctggtaaatttttaaagttttcaatatctacttcgcgcatggtctcataacgtatagggtagttttctttcaccataaactttagaagattgaccgaaggtacctttaatttttttaatatcatcatcatttcttgccacattaatcgcatttcgtgtattaaggtcattgtgattggaccctctggaaatagcttatatacatatactggtactttcgtcccttcaaataccgcctttaatgaaaattgattcataaacaatggtgggtgtacataaagtgaactattatgtatctccgcatgtagtggtgtgtccatcgttgttaattctatattcaaatagtcaaataaagacttaagcttacacaacgtcatagactgagattgagtcgaacctacgaataattttgatttaactcgtgtggttaggacacaatgtggttgtgctttatcaaatattcgggtatcgcctagataagtggaaaatgaaatcacttcaccttcacattgaacatctgatagtaattgcttaacaagcatatgtgatcctaatgttggtgagaccaagatgatttgcttaatacgctttaatgtggacttagataattgctgtaatatcggtcgatacgcatcggcagtacatgctaaaatcaccacgtcataatattcagtaatatctttaacatctttaaaaaaatgtctaaccgtaaacttacctgaaaaacactgatgtgcatcattttgagtcattactgaaaaaaagccgtcacgttgataagcatcaaagactctcttagatttggttgatgcatgaacgcgactcaccatatcaactatatgttctccatgtaaatgacatagtcgagcaagttgaatagcgaccggtccactaccaaccattaatattttagacatgttcaacaccaacttttgatgccactttacaataaagtgcaatatcaaaaatctgcttcggtcgtgtttgtagttcttcacatcgccactgtgtttcgtcagttgcttgagatggataattaaacaatgcttttatatcatcaccgtatcgcatagctacaacaacttcatcattcgtcaatgtgtaaagttcattcaaaatgtcatatttgataggtatcgtcgaactgaatataatatgtgtcacagattgg

SEQ ID NO: 3409 - DNA, 3469 bp, Artificial Sequence
  Description of Artificial Sequence: synthetic nucleic acid sequence
aagatgtaaaaaaacaaaatgattatttagataaaattttacctgaagcttatgcacttgtacgtgaggggtcaaagagagtatttaatatgattccttataaagtacaagtaatgggtggtattgctatacataaaggtgatattgcagaaatgagaacaggtgaagggaaaacattgactgcaaccatgccgacgtatttgaatgctttagctggtagaggtgtacatgttattacagtcaatgaatatctatcaagttcacaaagtgaagaaatggctgaactatataactatcttggcttaactgtaggtttgaacttaaatagtaagtcaactgaagaaaaacgtgaggcttacgcacaagatatcacttatagtacgaataatgaacttgggtttgattatcttagagataatatggtgaactatgctgaagagagagtaatgcgtcctctacattttgcaattattgatgaggtcgattccatattgatcgacgaagcaagaacacctttaattatttctggtgaagcggaaaaatctacttctttatatactcaagcaaatgtttttgcaaaaatgcttaaagcggaagatgattataattatgatgaaaaaaccaaagctgtacatcttacagaacaaggtgcagataaagctgaacgtatgttcaaagtagataatctttatgatgttcaaaatgtggaagtgattagtcatattaatacagctttaagagctcatgttactttgcaacgcgatgttgattacatggtcgttgacggtgaagtattaattgttgaccaatttactggacgtacaatgcctggacgtcgtttttctgaaggtttacaccaagcaattgaggctaaagaaggtgtagcaattcaaaatgagtctaaaacgatggcatccattactttccaaaactatttcagaatgtataataagttagcggggatgactggtacagcgaaaaccgaagaggaagaatttcgtaatatctataatatgacagttacccaaattccaacaaacaaacctgttcaacgtaaagataattcagacttaatttatattagtcaaaaaggaaagtttgatgcggtagttgaagatgttgtagaaaaacataaaaaaggacaacccgtcttactaggtactgttgctgttgagacttctgaatatatttcaaatttactaaaaaaacgtggtgtcagacatgacgtattaaacgctaaaaatcatgaacgcgaagctgaaatcgtttcaaacgcggggcaaaaaggtgcagttacaattgccacaaatatggctggacgtggaacagatattaaacttggtgatggtgttgaagagttaggtggacttgctgttattggtactgagcgtcatgaatcaagacgtattgatgatcaattacgtggacgttcaggacgccaaggtgatagaggagatagtcgtttttacctatctttacaagatgaattaatggtacgttttggttcagaacgcttacagaaaatgatgaaccgtttaggaatggatgattcaacgccaatcgagtcgaaaatggtatctcgagctgtagaatcagctcaaaaacgagtagaaggtaataactttgacgcgcgtaaacgtattctagaatacgatgaagttttacgtaagcaacgtgaaattatttataatgagcgtaatgaaatcattgatagtgaagaaagttctcaagtcgttaacgcgatgttacgttctacattgcaacgtgcgattaatcattttattaatgaagaagacgataatcctgactacacgccatttatcaattacgttaatgatgtgttcttgctgaattattaatgttaaatgctatccatgtgccattacacaccggtaaaattgaagaaatgacacgtgtacttcgtgaaaaataagcataatatatttaagcgtctggattatcatccccagacgcttttaaaatgtttagagaattatcaaattttatttgaatgctttcgctaaaacaaagataaacatatctttcgaggagttttatctagtatacgtacattcttccctcaacaagctaaaaacataactatctgagaattccccttgtaatcgttcattacttctcaatatacctttgcgtgaacccaagtctaattggtatagctctgcttttcttatttttagtagacattcgtatttctatacgattaatatcatacacttcatatacatagcgaattaacgctttagtacatttagtcataatacctttcttttgaaagtcttcagctaaataataaccaattgaagttgttttattaactaaatctaagtaatgcaatcctatgactccaatcaattctttattactccatattccacaatgaaatccattaccatcgataaattgttgcaacgccgaatggataaagtgtttactatcttcaactttcttcgtatgttcaacaaaaggcagaaattcagctaaatagtcacgattgctatctactaatttaaataactgttcggcttctcgttcttctaatatttttaatttaatatttttatttatttgataactaaacatacaaaatcatcctttcttagaattttctgtcattttagtatacgcgagtataggattatgtcataaaacttgattactagaattcgatattctttaagttacaagtgtgtatgtagtatttctcttgcttctattgtcttatacttacaaccaatattagagtgaaaaagcttaacttaagatagataatcatcaacaacacaaacgttaaaaacactgagaaaacttttttaaaatatacttctcaatattgattagtaaaatccaaaatatgaataataagtagacattaaacaatctttattttattctataaataatataaaataaattattagattaatacattatttttttatttctaatttaagttgaaatcgtatgtaatcggaggaaaccataatgatatattctatcggtaagaatttaggtaataaattaacaggtatagaacaagctatgatcaatagattaaagctatttaaagataatttagtcccaaataaactcatattcacatcttggtcaccacgtttatatatgcatgcacattcgttaaacatcgattcaaaagatattttcagtctttacgattttctacaagatagtattaactttgagaaaaaacatattgattggataaattattggcaaaatatatgtaattataccttaaaattcgttgaaaatacgaatgatattaaaatatacgataacgacacatataaaatgtatgtgcattttgttgattcaaattatcaaactttagactatattaaccattttgatatacaacaacgtaaaattcgaagagatttttacgatacaagaggctttttaagttgtagtagaattttaacctctcaac

SEQ ID NO: 3410 - DNA, 2901 bp, Artificial Sequence
  Description of Artificial Sequence: synthetic nucleic acid sequence
taaccgtaggtatagtggttagctttacataattcaatgactttttgtgttacggtatcatttttataggttttgtttttccatcggtaatatgttgatttaggtatgtttaatacttctagtatcaatttgattgaatattttacttttaattgatccactaaatctatgactactgttggtaccacttcctttccaatgccttgtacttttttaaaatatccaattctatatcttttctcttattttctaattttaattgttctacttctgacagctcttctaatcctttaccgtaggtatattgtttaccaacttgttgtgaaaatctataactttccccatttcgataccatcgccaccaagttttcacttgcgtcctatttctaatatttaattctttcataatttcttttgttgaaaatcctgctgctttcatttcaactgctttatactttgtttctactgaataagaagctcttttcatagaaaaaaacctccgtatgattcattttaatatgaattcaacgaaagtgtttttatataattcccacaaattggggtcagtctaataatgaatttcgtgattgtaggctttttattttatatattcattaatttctcttcttgacggatacgtacaattaaaaaataagcatatggaactaataagagtgttgtgtatgtagcatttgttagtagtaatacaccaattaattcgggaatgatatttaaaaaatagtttggatgtttcgttactttatataaccctgacttaataatagggtgattgggcagtataaataatttcaatgtccaaatacgacctaatgtcttaataactataaatagcatgatataagcgatgatcaatatgattaagccaatgccgttaagtagactaaatgtatccttacgaatgaatgcttctatagctgcactcatgtaaattaatacatgcgtaatggctagatattttgaatttttcacaccatattccaccgcgccctctacctttagctgttttgcgtgttgcatagatatctttaagctgatgagtcgaatacagaaaaagataaataaaatagttaaaatcatgatgtcctccattgtttgttatatatatattcttttgctcgtacaatacaaagtattttatatagaaaatgtttcaaatgccattaactatttattaactttagcaccaactcataactcttctaacacctcacatattaagttcagtttttcggataatttaatacttttaaggatattaagcgcttacattgatgtgatatattttttttaacgaagatgataggggtgttagggatgaacttttttgatattcataaaatgccaaacaaagggataccattagctgtacaacgcaaattatggctcagaaactttatgcaagcgttttttgtcgtattctttgtttacatggcgatgtatttaattcgaaacaattttaaagcggcacaaccgttattaaaagaagaaatcggattaacaacattagaactaggttatataggattagcgtttagtattacttacggtttaggaaaaacaatactcggttatttcgttgatgggcgtaatacgaaacgtattatttccttcttattaatattatctgcgattacagtacttattatgggatttgtattaagttatttcggttctgtgatggggctattaattgtattgtgggggcttaacggtatatttcaatctgtgggtgggcctgcaagttactcaacgatttcaaggtgggcgcctcgaacaaagcgcggtcgttatttaggcttttggaatacatcacataacattggtggtgctattgctggtggtgtcgcactttggggcgcgaatacatttttccacggtaatgtggttggaatgtttatttttccttccgtcatcgctttaatcattgggattgtgacattatttattggtaaagatgatccagaggaattaggttggaatcgtgccgaagaaatttgggaagagcctatcgaccaagaaaacattgattctcaaggtatgactaaatgggatatctttaaaaaatatatccttggaaatcctgtgatttggattttgtgtatctctaatgtttttgtatatatcgtgcgtattggtattgataactgggcaccgctatacgtatcagagcatttacattttaataaaggtgatgcggtgaatactattttttactttgaaataggtgcattagtagctagtttattgtggggctatatctcagatttattaaaaggtcgtcgtgcgattgtagcgattggatgtatgtttatgatcacctttgttgtactcttttataccaatgcaacaagcgtgacaatggtcaatatttctctatttgcattaggcgctttaatcttcggtccacagttactcattggtgtatctctgactggctttgttcctaaaaatgcaattagtgtcgctaacggtatgacaggttcatttgcatatctattcggggattcaatggctaaagtgggtctggctgcaatcgctgatccaacacgtaatggtttaaatatttttgggtatacgttgagtggttggacagatgtctttattgtattctatgtagctttattcttaggaatgatattattagccattgttgcttattacgaagaaaagaaaattagaaaattaaaaatttaagattaagtgaatttaaatatatactccctactataaattttatcattatggtagggagctttttcgtgattgatttgcactattttgattgcttattataatcacttggtgacatatgtaaatattttttaaaatgatagcaaaacattttatactcagaaaaacctactttttcagcaatttcat

SEQ ID NO: 3411 - DNA, 1022 bp, Artificial Sequence
  Description of Artificial Sequence: synthetic nucleic acid sequence
ttaagttgttgtaagttatctacttgttcaatccattcgctatctatcgctttcaaaattgatttttgaatgaaacgaagttttaaatatgaatcagcagcaacttctaaacgattgttaaattgttgagtaaattgttgtattaagaattgtatgatttcttcatcattttgcatattaatatttgatacatcttcatcgaagacaaaacttaagttttcgtatatataattcacaagtgcacgttcactacttaagtcaagatttttaacgtcttttgtaaacacatctcgtgcaagctgttcaaaattaaaatcatcaaaatcgcttgcttcaagtatgtgattacgttcagcataaattttatctcgttgaacactaatacttttttcgaattcatttgccatttctctatttttcatagcagtctcttcagatacacgttgcgctttattaacaattgactttacacgttttttaaagagtgcactactttctagtttagatgcatccatcgtttggaggtttttattttctgccaagttagagttactccaacgttttactaaatcatcatcaagtgatacaaaaatctgtgaatatccaggatctccttggcgacctgagcgtcctcttaattgacgatcaacacggctattatccatatgttcattaataatcactgctaagccaccgatatcatgaacctcttttgataactttatatcagttccacgccctgccatacttgtagcaacagtaactgcagataattgtcccgcctcagcaatcatttgtgcctctttagctacattttgagcgattaataaattgttgggtatatcacgtttaaataactcagctgaaaaatattctgccgcttctgcagtacgtgtaattagtaacacaggttgttgagtttcatgtataccaatcactgtctttaaaattgcatcgttctttttgtcaccattagcaaatactctatcaggtctatcatctcgttcaatcggactgtgagt

SEQ ID NO: 3412 - DNA, 2933 bp, Artificial Sequence
  Description of Artificial Sequence: synthetic nucleic acid sequence
gtattcggtaatatcatctgtaagatttttaatttcttgtcttgcatttttcattgcaacagtgtgatggccaaaattaaacatagctctatcattatcactatcaccaataactaaagtttcttcttgcttaataccatagtgatcaatcatttccttgatacctgtacccttatctgtatgatatggcatcgtttcagcattataacgcgaagaattagatacggtaatacctaaatttgattggttttcaacaagctggttgcgaaaatcagttattttatctaagttgggactaaataaatatattttagaaaagtgtgcatcaggtaaggtatctcgccaatctatttttcctttaattgcctctcttcgcgatgaccactcactttgacttacagcgtcaggtggctctatagtggaaatcatttctttcatccaatcttcatcttctttaagagatatacgattactttcaaaaggaaaaacttcataataaatatgttgttttttagccaattccacaattttctgtactcgttctaaagttaaactatgtctaaacaaattatctccatgaatttcacctgaagttccattcgaactgataataccatctacagtgaatccatcaggaacaagctgactgatttctgaataagatctcccagtagcaaggaaaactttataattttgctctctcaattcattaatcacttgtttagtatattccgaggctttattattttcatgtaaaatcgttccatccatatctaaaaaaattgcttttatatttttcatattatcctccattcaagactctaacttatacacttaaattgtgtcacttatcatactaaagtgcaacggctttgattacactttgaacatactataacgttgtcttctcttatttacaatgacatccctatcaaaaaaattgtcatccgataaagatctcataacatcttaaatattaaccttgttaaatatttaaaagtctttaagtaaatctttttcaaaaataacggcatttcttctattatatgtgttacaagtatgacagaaagttgtgaatcatttaaaatatgcttaccaaatgttttaaatagttgtctctttatataaaatccattccagttgtaggtttatccaatactagttaatttagggtactcattaaagtcatttaacaacggcattaaaccgcttcgttaaaattaattgaaggataaatctaaaattaattcaaaaataaagagtagccatttaggctactctaaattataaacattttactctactgtaaccgatttggctaagttacgaggtttgtcaacatctaaatctcgttgtaacgcagcataatatgagattaattgcattgtcactacagatactaaaggagttaataattcatgtacttgtggaatcacgtatgtgtctccttctttattcaaaccttccattgaaatcatacaaggatatgcaccacgtgctactacttctttcatatttccacgaattgatagattaacgttttcttgtgtagctaaacctataacaggtgtgccatcttcaatcaaagcgattgttccgtgctttaattccccacctgcaaatccttcagcttgaatataagaaatttcttttaattttaatgcaccttctaaactaacattataatcaattgttcgtccaatgaagaatgcattacgagtagtttttaagaaatccgttgcaatttgctccatcttaggtgcatcgtcaacaattgtttcaatagctgtagtaaccttagctagttctcttaataaatcaacatcggtttcacgaccatgatttttagcaacaatttgagataagatagataaaacagcaatttgcgctgtatatgcttttgtagatgcgactgcaatctcaggtccagcatgtaaaagtaatgtatgatccgcttcacgtgataatgttgaaccagcaacattagtaattgttaatgatttgtgacctaacttatttgtttcaactaatacagcacgactatcagctgtttcaccagattgtgaaatataaataaatagtggtttttcagaaagaagtggcatattatatacaaattcagaagctacatgaacctcagtaggtacacctgcccatttttcaataaattctttaccaaccaatccagcatgataactagtaccagctgcaacgatgtaaatacgatcagcatctgctacatcattaataatctctgaatcgatttttaaattacctttttcatcttgatattcttgaataatgcgacgcatcactgcaggctgttcatgaatttcttttaacatgtaatgatcatatacgcctttttctgcatcagcagcatctatttctgccgtatacgtatcacgttgttgaatgtgcccctcaagatctttaatttctactgtgtctcgcttaacaataactatttcatggtcatgtatctctttgtattggtttgtagtttgtaacattgctagagcatcagaagcaataacattgaaaccttcacctacacctactaaaagcggagacttgtttttagccacataaatagtatctttatcattatcatctaataatcctaaagcatatgaaccatgtaataatttaactacttttgtaaatgcatcttctgtagctaatccttgtctagaaaaataatctactaattgtacaataacttccgtatcagtttctgatgaaaaagtgacatcagataaatattcagcttttaattcttcataattttcaattacaccattatgaactaatgtaaaacgtccagatgttgactggtgtggatgtgaattttcataatttggaacaccatgtgtcgcccaacgtgtatgaccaattcctaacgtaccatcctcatcactattatctgcaac

SEQ ID NO: 3413 - DNA, 3207 bp, Artificial Sequence
  Description of Artificial Sequence: synthetic nucleic acid sequence
actggtccacacgtacacttccaagttgaaagaggtcgccatgatgacatcacaaacagagggacagtaaaccctgctaaatggctcaaaggtcacggtggtggaaaagttggtggtagtggttctgtaaacgcacgtagagcaattcaaagagcacaatctattttaggtggacgttataaatcgtcttatattaccgaacaaatgatgagagttgccaaacgtgagtctaacttccaatcagatgcggttaataactgggacatcaacgcacaaaaaggaacgccttctaaaggtatgttccaaatgattgaaccatcttttagagcatatgctaaaccaggacacggaaacatcttaaatccaactgacgaagctatatctgctatgcgttacattgtaggtaagtgggttcctattatggggagttggagaagtgcatttaaacgtgctggagattatgcttatgctacaggcggggttattaacactgctggattatataatttggcagaagatggataccctgagatagtaatccctacagatccaagcagacaatcagatgcgatgaaattgttacatcttgctgcaagtaaaattagtggaaataacagaaataaacgacctaaccaattacgtacacctaatgttactagtaatacagttgataatgcagaattactactacaaatgatagaaaatcaacagaaacaaataaacgtgttaatggaaatagcacgaagtaataaaactattgaaaaacaaccgaaaggtttttcagaacgcgatgtaagtcaggcacaaggttcaaggttaagactcgctgcttatagccagggaggtttataaattggaaaataaaaaagtaaaaatatttaacgatcatttcgaagaaacactaacggatattcctcatcttaagtttcacagaggataaatatcacatacagattttgctatacgcaacattgttaaaacatgataactcaatccactcgcgaaattatgatgatgagaactagctgctggataagtgaaaaaacgatcttgatactttttaattaaatgtctagtaatgcgttgtaagttagcattttcaatatctaacataaaatgcgataattcctcttgtatttctgtaggtgacattggcgcaccgtcaacaaagtctttagttgacactttgtcttcagcttgtgcaagacgtatttgatgtattttcatctgtttgcgtccacgataattgatgatatcacctttgacatgaactattgtttctggttttaaagtttgcatatcatctttcgtagcagtccataatttagcttcaatatcaccacttttatcttgcagaaatagtgtcatgtaatctttaccctgagctgtaacaccttgagttgcacgatggatcaagaaaaaatgatccactgagtcgccgggatttaatttttctacatttctcattttttcccgccttcctgtaatttatttaaagttaatacttctttagccggtatgacatgatcttttgtacaagtaaaataaagtatttgataatgttctgatagttctctcaaatatttcaacatacgttctttacgatatttatcaaaatgaacaaatgcatcatctacaatcactgggaatggataatacggttttaatactttaataagactaatacgtaaagccacatataataattcttttgtagattgactcaactcaactggctcaaatacttgtccgttagaatgctttacatgtattttatgattttcagtataatgaatcatattgtaagtaccatttgttaaatttttaaaaatagatacagcttcattaatcacttgtggtagacgcttatcttttatttgcttgatatgttcttccactaaagcttgcatataacttaagcttgcccaatccttagcaatatcgttaagtctattttttaagctataatattcatgtcttaattgtgctaaagttctatctgtttccatatgattaatctgagcatttaaatcactaacttctgcttgcatttctaaaaattgatcattgtaatcgtcaacttgtttagccaatctatgatcttcttcttctagttgagcagtagttttctcacttaattgcgaactcatttcataagtgtaattttgattttctaaatattgatttaaatcattaaatcgatttaaatcactttgatatgtttcaaaatgatgatgatgtgtataataatcttcttcattatctacatcaacataatcaaataattgcttaatcatttgattcgtttcacttaagcgtgacttcaattgctttaattcattattgagtaattgcgtttcagtttgatttttattccaagcctcattttgttcttctgcattttttaaccactgtttcacatcatggaagaaagacatctgattaaatagttttaaatgtggttcagttacagattgtgcacgttcataaaagtgattgatatcttttagcagattattgcgttgttgatttaaatcaataatgtatttatcatgcgctttaatttgaccaatggttgagatactttcaaccactaattcatcagaaagtttttctgataaacgtaactctttttttatttcaataatgctatgttttaaactatctaatcgctcatttgcagtcgttaatgattgattgatatattgatgtttttcttcaagtatttttttattttttttagcatgacgccattgttcacgaacttgttgttgatattctaaatcgaagtcaagattatattctttttcaagttgcgtgagttggttttctaaatcattaatttcctgacttattgctgtgctataatctactgctttagatctagaaaaaatgatacctactacaaaaatcacagttaatagagcaaatattataccaaaaataagatttgcagtgaaaaaagaaaaaatagaaagtgctgctgatagaatagtcaaaacaataaatcctattctcaaaaacttttgtcttttatttttttgtgtttgttcttcttcaaaagtttcttttaacttttcatacaagttctctttttcatgtaattctaaaacttgttgtgtatattcctttttcttttcaaaggtttcgtcaggaacaagctcattctcaacttgattaatctcattagaattagagtttctttca

SEQ ID NO: 3414 - DNA, 3327 bp, Artificial Sequence
  Description of Artificial Sequence: synthetic nucleic acid sequence
actttgttgattcaacagtctctgtagctaaagaagttcaaaagtccgacgacaatctaggtattgctatagatgcctatggtgcaggtagttttattgtagcaactaaaattaagggaatgattgcggctgaggtttcagatgagcgttcagcttacatgacacgtagccataataatgcacgcatgattactatgggagctgaaattgttggagatacgcttgctaagaatgtcgcaaaagaatttgtcaatggtcattacgatggtggacgtcatcaaatccgcgtagatatgttaaataaaatgtgttaataggaggaataaaaatgaaaattgcaataggttgcgatcatattgttactgatacaaaaatggaagtttcacaacacttaaaatcacagggacatgaagtgatagatgttggaacttatgatttcacacgtacacattatccgatttatggaaaaaaggtaggagaaaaagttgcgagtggtgaagcagatttaggtgtatgtatttgtggtactggtgtaggaattagtaatgctgcaaacaaagtaccaggtgttagaactgctttagttagagatatgacatcagcgctttattctaaagaagagttaaacgccaatgttgtaagttttggcggtaaagtagcaggtgaattatttattttcgacatcgttgatgcattcattgaggcagagtacaaacctactgaagaaaataaaaaattaattgctaaaatcaatcatttagaagcacataacaatgaccaagctgatccacatttcttcgacgagttcttagaaaaatggaataaaggtgaatatcacgattaaggaagatgtccaatgattttaacattaactttaaatccctcagttgatatatcttatcctttagatcagtttaatttagatactgttaatagggtatctcaaacaagcaaaacagcaggcggtaaaggattaaatgttactagagtattgtctgaatttggtgaagacgtaatagcaagtggttttttaggtggagcattaggtcaatatattgaagaacaaatagaaactactcgtattaaacaagcatttttcaaaatcaaaggcgaaacacgaaattgtattgcaatactacatgaaggacaacaaactgaaatccttgaaaagggtcccacgattgaacttaaggaatcagaggaattcaagtcacatctattaaaacttttcaaagaaactgatgtggctgttatgtctggtagtctgcccaaaggacttaatactgattattatgcggatattgtgagattagcaaaagaacaaggaattttgaccattttagatagctctggtcaatcacttgaggaagttcttattagtaatgtgaaacctacagtaattaaacccaatatagatgaattatcacaacttttaaattacaaagtaaccaatgatattaaagaattgaaagcggcagtaagtcagccaatatttaatgatattgaatggattattgtttcattgggcagtgaaggtgcttttgcaaaacataatcaaaaattttataaggtgaatattcccaacattaaagtagttaatcctgttgggtcaggagattccactgtagcaggaattgcttctggactcattcatcaacaaaccgatgaagagttattaaaaaaagcaaatgcattcggaatgctaaatgcaatggaacaacaaacaggtcatattaatacagataaatttgacgaaatattcaaacaaatagaagttatagaggtgtaatttatgacaaaatcacaacaaaaagtgtcatcaattgagaaattaagtaatcaagaaggtattatttcagctttagcatttgatcaacgtggtgcattaaaaagaatgatggcagaacatcaatctgaaacaccaacagttgaacaaatagaacaattaaaagtacttgtttctgaagaattaactcaatatgcgtcttcaattttattagatccagaatatggtttaccagcatcagatgctcgaaataatgactgcggactattacttgcatacgaaaaaactggatatgatgtgaatgcgaaaggtcgtttgccagattgcttggtagaatggtctgcgaaacgtttgaaagagcaaggggccaatgcagttaaatttttactttattatgatgtagatgacacagaagaaattaacatacaaaagaaagcatatattgaacgaattggttcagaatgtgttgccgaagatattcctttcttcttggaagttttaacatatgacgacaatattcctgacaataaaagtgcagaattcgctaaagttaagccacgtaaagttaatgaagcaatgaagttattctctgaagatcgttttaatgtggatgtacttaaagttgaagtacctgtgaatatgaattttgtggaaggattttcagaaggagaagttgtttatactaaagaagaagctgcacaacatttccgtgatcaagatgcagctactcacttaccatatatttatttaagtgcaggtgtatcagcagaattgttccaagatacattaaaatttgcgcatgattctggtgcgcaattcaatggtgttttatgtggacgtgccacatggtcaggagcagttaaggtatacattgaagaaggagagcaagctgccagagaatggttgcgtacggtaggatttaagaatattgatgatttgaatacagtattgaaaacaacagctacatcatggaaaaacaaataatgtaagggaggatattcaaatgaatagagatgaggtacaattactcggatttgaaattgttgcctatgctggggatgcacgttcaaaattattagaagctttaaatgctgctaaagatagtgaatttgataaagcagaacaacttgtagaggaagcgaatgaatgtattgctaatgcacataaagcacaaaccaatcttctagctcaagaggctaaaggcgaggatatcgcatatagtatcactatgattcatggtcaagaccatttaatgacaacattacttttaaaagatttaatgaagcatttaattgaattatacaaaaaagggagctgacccctatgaataaattaatagcatggatagaaaaaggaaagccattctttgaaaaaatatcacgaaatatttatttaagagcgattcgtgatggatttattgctgctattccaattatcttattctcaagtatatttattttaattacctatgtaccaaatgtgtttggttttacttggagtaaaactatggaaggtatattgatgaaaccctataactatac

SEQ ID NO: 3415 - DNA, 3153 bp, Artificial Sequence
  Description of Artificial Sequence: synthetic nucleic acid sequence
tttcatcctcaatatccataccaagtagctcttctattaaatcttcgtgcgatacgatagcatccgtacctccaaattcatctaaaacaatcgctaaatgttttcgtgaaacggtcattttacgcaatacccattctgccctattatgttcatttacaaataaagggcttgatgcataattagtaattgcgtcctctttatttttactccaagctaataaatattttgagtggaatacgccgatgatatcatctatattttcatcatatactggatatcttgtatatgggttattcatcactgtatcataagcttcgtcatatgttacttcctttgaaaaagctacaacattaatacgaggcgtggtatcaacatccttaaccttcaattgttcaaagtccataacgttttgaagtcgagtattttctatctcattaaatgcaccttctctacccgcaatatttaataatgtacgaatttcttctttagaaaatcttttttcaacaggttggcctcgagatagtaaatgattaataccatctgtcatcttgtttaataagattgtaatgggcttgagtacaataacacatatatgaatgataggatacacaagttttgaaattttatcaggaaatgttgcagcaattgatttaggaatcacttcagaaataagtataatcacaattgttacaattgctgatgctattcccacattcactccaatatcaatcgctaagattgtcacgagtgtaggtaaaataatattcgctacattgttaccgattaatatagtagtgataaattcacttggtttatctaataactttgttaaaccttgcgccttacgatctccctttttagcttcagtttgaaacttagtgcgattcgcggctgttaatgctgtctcactacctgaaaagaaaaatgaaacaaatattaatagtataattgcaataatcatgatgcatttctccttaagatttagtccgtattaatacattatttcccgagaaatgaattatcaaacttatcatttatattgaattaacacaacacacgaataagaatgaactaatgcaaaatatttttatagtttgcctataattaataaagaagatatcgatttaattattaatagaagtttagaacaaaatgtatttctactaactgaatacattcaaaaaggtaataagaataaagctatacaattagtcaatgatttaatcattatgaaagaagaacctataaaattactggcattaattactagtaattatagattatattatcaatgtaaaattcttagtcaaaaaggctatagtgggcaacaaattgcaaagactgtaaatgcacacccttatagagtaaaactagcactcaatcaatcccgacattataaactagaaagtttgtttaacatcataaacgcttgtgcagagactgactacaaactaaaatcatcttatatggataaacaactcattttagaattattcatactatctctataaaaaatttgaggtaggagatataaaataaatcctatcgacaatagaaatattggttgtaaagtaataaaaaagagcctaggacaattcgttttgtcctaagctctgttttaataatcattatttattagctgacataagtttagatttaatacggtcagctttattagaatggattaaattactttgagatgctttgtcaacttgtttgatagcaaatcttaataattcatctttgttttcagcatcagtagagatagctgttttagctcgtttcacagctgtacgcatagcgtttttcttagaaatatttctttcttcagctgtttcagttgttcttacacgtttgattgcagatttaatatttggcattactgtcacctcctaaaagtgatcataacttatcaaaatttatttgattacaacaagaaatattttatcaaatgtcttatatttgtgcaatcatttatttaaaagtaacttcatttgaatttattactttttaattgttggaatgaactactgaactagatataatagttatgttagaatttacatttaattaattatgtcaaagatatattgcattaaagtaataaaaacgttactatatcaaagatacatagaagtgacaggttataaagatgaaagcgagaaggataaaatggataagcaagaacgatacaatagaagagaaaatattagaaatttctccattattgctcatatagaccatggtaaatcgacattagctgatcgaattttagagaatacaaaatcagttgaaactcgagaaatgcaagatcaattacttgactctatggatttggaaagagaacgaggcatcactattaaactaaatgctgttcgattaaaatacgaagctaaagatggagaaacttacacatttcatttgatagatacaccaggacatgtcgactttacatatgaggtttctcgctcattagctgcatgtgaaggtgcaattcttgtagttgatgctgcccaaggtatagaagcacaaaccttagcaaacgtttatttagcattagataacgatttggaacttttgccagttgttaataaaatagacttgcctgcagctgagcccgatagagttaagcaagaattagaagatgttataggtatagatcaagaagatgtagtacttgcaagtgctaagtcaaatataggtattgaagaaattttagagaaaatagttgatgttgtaccagcaccggacggtgatccagaagccccacttaaagcacttatctttgattcagaatatgatccatacagaggagtaatatcttcaattcgaattattgatggtgttgttaaagctggagataggattaaaatgatggctaccggtaaagaatttgaagttacagaagtcggaatcaatacccctaagcaactaccggtagaagaattaacagttggtgatgtgggttatattatcgcaagtatcaaaaatgttgatgattctagagtaggtgacacaattactttagctgaaagacctgctgacaaaccgttacaaggatataaaaagatgaatccaatggtattttgtggtctattccctattgacaataaagactataatgacctaagagaagctttagaaaaattacaa

SEQ ID NO: 3416 - DNA, 3002 bp, Artificial Sequence
  Description of Artificial Sequence: synthetic nucleic acid sequence
tgtaataccaataagttcagttccttggaatgagaagcctgcgactagaaatacaccaagaattgatagcaagctacctcctaaattcccacctagtattggcccatctccttttgtaaacgtatcaaatcctacaaattctccacccataatccctaaaatagttaagataccaattcctataaatatgatgactgtaactactttgataagtgcgaaccaatattcactctctccatatactctaacggataaagaattaagcgcgaaaataataataaggaaaatacaactccagacccaagctggtataccttgcataggggaccaatattgtataacttgcgctgcaatagtaacatcagctgctactgttatcacccagttgaaccaataattccatcctaaagcaaaacctagtgaaggatcgacaaagcgtgtagcataagtactaaatgaacctgacacaggcaaatatgtcgccatctcccctaacgacgtcattagaaagaacaccatcgctccaataactgcataggcaatcaaagcacccaatgcacctgcgtcatgtatagctccaccagaagtcatgaatagaccagttcctatacatcccccaatggcaatcattgaaatatgtctatcttttaatcctctttgaacaccgtcattttgtttattattctttttcatagaagctccctttccttcataagtagaggctaacttgttaccacatcaatgcatatcattgttgtagataaatttggtatagatgatataaaagtaaaataatattaatatcattttacttttatatcacttgtctttatatctgtatcaataatgtaaaaagtggttacatacctttaagatatgcaaccactaatgtttatctatataaggtagcacatcacataaagtgacagtacaacttctattcgaaagttgtcccaacaatgctaatttatggaaataacatcatttcggcattattacctttcacttattcaacacatgtcccatacgacttctgataagttagtcattaataatgcaacctctaactctatttattatattaatttgtaatatacatgatatactttatattttcaagtttatctatgctttttcaaacggatttcatcaataacattccaaataaattcatctttttcaactgattcttgtttttcagaaccatattttcttacatttacttcttgattctctacttcttggtcacctacaacaatctgataaggtatttttttcatttgagcttcacgaattttatatcccattttttcattacggtcatcaatttcaacgcggacaccttgcgattttagttcatcttgtaaaagtcttgcataatcataatgtaaatctatatttacaggaataatttcaacttgcataggcgccaaccaagttggaaatgcaccttttgtttcttctgttaaaaatgcaacaaaacgttccatagtagaaactacaccacggtgtataactacaggacgatgttgttctccatcttgaccaatgtacgttaagtcaaaacgttctggtaaaagaaaatcaagttgtgctgttgatagagtttcttcttttcccatagctgtttttacttgaacatctaacttaggtccatagaatgctgcctcaccaatagcttcttcataagttaaacctaattcatctgatgcttctttaagcatggattcagctttttcccacatttcatcatcatcaaagtacttatgcttatcttcaggatctctataactcaatctgaagcgataatcttcaaaaccaaaatctttgtacacatcttgaatcatattaactacacgtttaaattcttctttaatttgatcaggtctaacgaaaatatgggaatcattcaatgtcattcctcgaacacgttgtaaacctgatactgcaccacttgcttcgtaacgatgcatagtacccaattcagcaatacgtataggtaattcgcgataagaatgaggtttgtttttataaatcatcatatgatgtggacagttcattggtcttaagaccattgcttcgtcttcatctaacttcattgctgggaacatatcttcttgataatgatcccagtgaccagatgttttatataaatcaacattggctaatactggtgtgtaaacatgatcgtatcccatacttacttctttatcgacaatataacgttctatttccctacgtattgtagcaccatttggtaaccataatggtaaaccagcaccaacgagttgattgtttgtaaacaattctaaatctttaccaattttacgatgatcacgctcacgacgttcttccaacatttttagatgtgctttcaaatcttttttgtcaaagaatgctgtaccataaattcgttgtaacattttattatcactatttccacgccaataagcaccagctgtagataatagtttgaactctttaattttagaagtagaaggtacgtgtacacctcgacataaatcagtaaattcaccttgagtataaagtgttacactctcatcttcaggaattgcatcaataagttctaatttataagggtcatccttgaagaagtcttttgctttttctttactaactacttctcttacaattttatgattttcgttcacaatttgtttcattgttttctcaattttatcaaaatcatccgatgaaaccttatcatccatatcaaaatcataatagaatccgccttctattacaggtccaactccaaatttaacgtctccgtataaacgttttaatgcttgtgccattaaatgagctgttgaatgacgaagtacttctaacgcttcttcactcccaggagtaataatttcaatagctccatcttgttctaaagggcgtgttaaatctacaagttgaccattgaattttcccgcaactgctttttttcttaatcctggactaattgattgagcgatgtcttctgtagtagt

SEQ ID NO: 3417 - DNA, 3643 bp, Artificial Sequence
  Description of Artificial Sequence: synthetic nucleic acid sequence
atactgcgatattaaccgatgaagaaatacgtgaaaaaacaaaatcttttcaaaaagagttagcagaaattgaagatgtaaaaaaacaaaatgattatttagataaaattttacctgaagcttatgcacttgtacgtgaggggtcaaagagagtatttaatatgattccttataaagtacaagtaatgggtggtattgctatacataaaggtgatattgcagaaatgagaacaggtgaagggaaaacattgactgcaaccatgccgacgtatttgaatgctttagctggtagaggtgtacatgttattacagtcaatgaatatctatcaagttcacaaagtgaagaaatggctgaactatataactatcttggcttaactgtaggtttgaacttaaatagtaagtcaactgaagaaaaacgtgaggcttacgcacaagatatcacttatagtacgaataatgaacttgggtttgattatcttagagataatatggtgaactatgctgaagagagagtaatgcgtcctctacattttgcaattattgatgaggtcgattccatattgatcgacgaagcaagaacacctttaattatttctggtgaagcggaaaaatctacttctttatatactcaagcaaatgtttttgcaaaaatgcttaaagcggaagatgattataattatgatgaaaaaaccaaagctgtacatcttacagaacaaggtgcagataaagctgaacgtatgttcaaagtagataatctttatgatgttcaaaatgtggaagtgattagtcatattaatacagctttaagagctcatgttactttgcaacgcgatgttgattacatggtcgttgacggtgaagtattaattgttgaccaatttactggacgtacaatgcctggacgtcgtttttctgaaggtttacaccaagcaattgaggctaaagaaggtgtagcaattcaaaatgagtctaaaacgatggcatccattactttccaaaactatttcagaatgtataataagttagcggggatgactggtacagcgaaaaccgaagaggaagaatttcgtaatatctataatatgacagttacccaaattccaacaaacaaacctgttcaacgtaaagataattcagacttaatttatattagtcaaaaaggaaagtttgatgcggtagttgaagatgttgtagaaaaacataaaaaaggacaacccgtcttactaggtactgttgctgttgagacttctgaatatatttcaaatttactaaaaaaacgtggtgtcagacatgacgtattaaacgctaaaaatcatgaacgcgaagctgaaatcgtttcaaacgcggggcaaaaaggtgcagttacaattgccacaaatatggctggacgtggaacagatattaaacttggtgatggtgttgaagagttaggtggacttgctgttattggtactgagcgtcatgaatcaagacgtattgatgatcaattacgtggacgttcaggacgccaaggtgatagaggagatagtcgtttttacctatctttacaagatgaattaatggtacgttttggttcagaacgcttacagaaaatgatgaaccgtttaggaatggatgattcaacgccaatcgagtcgaaaatggtatctcgagctgtagaatcagctcaaaaacgagtagaaggtaataactttgacgcgcgtaaacgtattctagaatacgatgaagttttacgtaagcaacgtgaaattatttataatgagcgtaatgaaatcattgatagtgaagaaagttctcaagtcgttaacgcgatgttacgttctacattgcaacgtgcgattaatcattttattaatgaagaagacgataatcctgactacacgccatttatcaattacgttaatgatgtgttcttgctgaattattaatgttaaatgctatccatgtgccattacacaccggtaaaattgaagaaatgacacgtgtacttcgtgaaaaataagcataatatatttaagcgtctggattatcatccccagacgcttttaaaatgtttagagaattatcaaattttatttgaatgctttcgctaaaacaaagataaacatatctttcgaggagttttatctagtatacgtacattcttccctcaacaagctaaaaacataactatctgagaattccccttgtaatcgttcattacttctcaatatacctttgcgtgaacccaagtctaattggtatagctctgcttttcttatttttagtagacattcgtatttctatacgattaatatcatacacttcatatacatagcgaattaacgctttagtacatttagtcataatacctttcttttgaaagtcttcagctaaataataaccaattgaagttgttttattaactaaatctaagtaatgcaatcctatgactccaatcaattctttattactccatattccacaatgaaatccattaccatcgataaattgttgcaacgccgaatggataaagtgtttactatcttcaactttcttcgtatgttcaacaaaaggcagaaattcagctaaatagtcacgattgctatctactaatttaaataactgttcggcttctcgttcttctaatatttttaatttaatatttttatttatttgataactaaacatacaaaatcatcctttcttagaattttctgtcattttagtatacgcgagtataggattatgtcataaaacttgattactagaattcgatattctttaagttacaagtgtgtatgtagtatttctcttgcttctattgtcttatacttacaaccaatattagagtgaaaaagcttaacttaagatagataatcatcaacaacacaaacgttaaaaacactgagaaaacttttttaaaatatacttctcaatattgattagtaaaatccaaaatatgaataataagtagacattaaacaatctttattttattctataaataatataaaataaattattagattaatacattatttttttatttctaatttaagttgaaatcgtatgtaatcggaggaaaccataatgatatattctatcggtaagaatttaggtaataaattaacaggtatagaacaagctatgatcaatagattaaagctatttaaagataatttagtcccaaataaactcatattcacatcttggtcaccacgtttatatatgcatgcacattcgttaaacatcgattcaaaagatattttcagtctttacgattttctacaagatagtattaactttgagaaaaaacatattgattggataaattattggcaaaatatatgtaattataccttaaaattcgttgaaaatacgaatgatattaaaatatacgataacgacacatataaaatgtatgtgcattttgttgattcaaattatcaaactttagactatattaaccattttgatatacaacaacgtaaaattcgaagagatttttacgatacaagaggctttttaagttgtagtagaattttaacctctcaacaaaaagtcgtgatggaacaattttttacacctacacaaaaagttaaatttcaaaaatattacaaccctgagcacgaacatcctacggtacaatctatcattt

SEQ ID NO: 3418 - DNA, 3241 bp, Artificial Sequence
  Description of Artificial Sequence: synthetic nucleic acid sequence
cttgaaatatcatttgaattttcttattaaacttcaatcgctctttacgttttctaatttgatgaatatctttaccatcatactcgattgcgccatcagtaatatcatttaatttgataatggcttttccagtcgttgatttaccacatccagactctcctactaggcctaaagtttcccctttataaacatcaaaacttatattatcaatcgctttaacttcattatgtttaccttgattaaaatactgttttaaatttttaacttgtaataatacattttcattactcattaaaagccaccctctctactctatgtggttgttcataattacttggcattgttcttaatcgtttttgaaccattgaaggtggcgtaacttttggagctcttgcatctaataaccaagatttaacaaaatgtgtgggtgaaattttgaaccaaggtggttcttctttaaaatcaatatctaaagcatatcgacttctacgtgcgaaagcatcaccaattggtggatgaagtaaatctggtggtgtacctggaattgcaattaagtccgtgtcattactggttgttaaatcaggcattgaagaaagcaatccccaggtatagggatgtttaggatcataaaatatttcattcacatcccctgtttcaaccatctgtcccccatacattacggctactttgtccgcaatatttgctacaacgcctaaatcatgcgtaataaagataattgaagtttcaatcttattttgtagttctttcataagatctaaaatttgagcctgcattgtcacatctaaagcagttgtaggctcatcagcaattaatattttaggctcacatgccaatgctattgcaataactattctctgacgttgtcctcctgaaaattgatgtggataagctttaaatcgtttttcagcacgaggtaacccaactaaattcaaaatttccaatgctctttgcttggcctttgctttacttaatttcttatgtttaatcaaaggttccatgacttgctttccgatttgcattgttggatttaaagaagtcataggatcctgaaatatcattgaaatatctcgacctcttagctgtatcagttctttttcacttttctgagctaagtcctcacctaaaaataagatttctcccttttttattcttcctgtatccttttgaaaaagttttgtaattgccttagttgttacagattttccagatccagattctccaacaatggctaacgtttcccctttatttaaatgaaaatccacgcctctgacagcttgcacttctcctgcagcaatatcaaaggaaacgtgcaaatcatttacttctaataccgtttctgtcattacttttacctcctttattttcgcatttttgggacgtttaaaacgtttagctttctttctaatactttcgtttttactttgtttagcagcgtcaaagattaagctgtataaaccagattcgttgatgattaccatgtttcgtttttgacctgatgcactaacttggtgcgtcagcttatcttcatcatcaacatgatttctaattgcattatcagatcttgtgtaacctaatatttctgccacgtctttacctaaaaaatatggttctccatctacttctatttttcttactggtaaatcttcaaaattaaatacttgtaaatcttgcatattgtttatgctcctttctgctatactccttataaaaggaggtgaaaatatgaaaagttttattattgcgtatgatttaaataaccaaaaggattatccaaaattaatagagcgtattgaggattatcctaatgttgctaaaatcaataaatcagtttggtttattaattcaactaatgatgctaaaactattagaaacgaattaaaaatgtttattgatagcgatgatagtttgttcgttggtaagctgactggtgaagccgcatggtctaatgtaatttgcagttcacaacatttaaaagattatctttagtatcgttaatcttgagcctctctttttgaggggcttattataatttcgtcaaattcttctgcattttttatattagctgcgacttcttctaaactttcaaaaactaatgtatatccactattctttgtttcttttacaaaaaccctgtataataccttgttttcagtcatttgaattcctcctttaagttaaaactttctttttgcgtaagtctttgttaaaaaaaatatctcttccttcttgaggtgttaaatctaacgcgaaataaattccatttattactggatatgaaggtttagttcttccgtgtatcatattggacaatgtatctctattaacacctatttcttcagaaagagttttgatgttgtgtccttttaaagccatttttgattttaaaagtttagtgtcgataggcatttcatttcaccacctttcgtattacgtaagtaatcttatcatggctgtacaaaataggtcaagcattttacgaaagtttttaagaaaaaatattgcaaatcacgaaagttttccttataatatagttataaagtaaaaggagctgtattacgatgtgcttttcaaaaagaatgaaacaatcaagagaaaaacaaggtatgactttagctgaactaggaagaaaaatcggtaaaactgaagctactgtacaacgttatgaaagcgggaatattaaaaatcttaaaaatgatactattgaaagtatagctactgcattaaatgttaaccctgctttcttgatgggttggatagaagaagttgaggaacaaccacaacatcgtgcagcgcatcttgatggtgatttaactgacgaagaatggcaagaaattcttgattacgctgaatacataagaagtaaaagaaaataaagggtgttttatgtggggaaatatgaagatatgttaattgaacatgactatattgaagtcattgaatgtgataacttacctaaaaggttatctggtttgtggcttggagatatgattttaattaatcgtaacttgcctattacttccaaacttgaaacacttgcagaggaactcgctcataacgaacttacatatggaaatatagttgatcaaagtagttttaatcatagaaaatttgaaggttatgcacgtaggttagcctatgaaaagttaatccctcttaaagatattgtaaaagcatttttgcaaggcattcatgacttgtatgaacttgctaatttttttga

SEQ ID NO: 3419 - DNA, 3603 bp, Artificial Sequence
  Description of Artificial Sequence: synthetic nucleic acid sequence
aaataaacgagaaaaccataatcatgataatcaaccatacaaatagtacaaatgtattaaaggttggatacttatatcatatgttttaatgtttgaaacttttattataaataaatgaattgaaaaatgcttgttgctgactgtttcgaatcatagtcagttgtaagggagcgagacgacgaatctgaaaagaatcggtctcgcttttttagtataaaaatttaattattattttaaaatgataaagtgatttctatagttaaatttagtgcgaggatactttaaaaaattatattgaaaaaatgtcgctattacaaaatgttctaaagtgcacaattcaatttaaaaacaaaaaagaagttttaaaatttatatttctgtctatatatgagttgtgcacgaaatgacaaacgcaattcacatatgaaatatttatcactttacaataatatgttgttaagttgatgtagataaattcattgttttacgtataagtcactatcattgttttttaggattcattttaattatatccaatcgactaaagtgaaaaggaggaacatattaaatgaattggatatcgattattttatttattatggtcgtatgtggcatttctttttatgcctatttgcaatcaagaaaaattaaaacgaatagttcagatggttattttatgggaggaaatagccttactggatttacagttgcctctacaattatcatgaccaatttgtcgacagaacaaattgttgggcaaaatggtcaaagctatgcacaaggaatggaagtaatggcttgggaggttacggctgccgtagcagttgtattgttggcctgggtctttcttcctaaatatctaaaatacggtgttaatacaatttctgagtttttggaattacgttatgatacatttactaaacgttttgtctccattttatttatctttacctatgtcgtatctttcttgcctgtagtattgtattctggttccctagtgttcaataaaatgtttaaagttgatgaatacttaggtgtaagtagttcaactgctgtcattattatttcatctattattggtataattggcattatttacttatttataggtggtttatcgttaagtgcttttagtgattcgatttatggcatggctttaattatagctggacttgcgattacaatattaggtctaggtcaattaggagatggcaacttcctacatggtttcgacaaaatcgtgcaagacacgcctgagaaattgaatggttttggtaaggtggactcggatgttgtaccttggccaaccctattcttcggtatgttctttaacaatttattcttctggtgcgcaaaccagatgatagttcaaaaagcactcgcagctaaaaatttaaaagaatctcaaaaaggtgcaatatatttaagcttatttaaagtgttcggacctttatttacagtcttaccaggcgtagtagcatttaactattttaatggtagtcttgataaatcagataacgcttaccctgcacttgtaacttcagtattaccagaatgggcattcggcttatttggtgcggttatttttggtgcaatattgagctcatttgttggctcattgaatagtacaactacactattaacactcgatttctataaacctatttttggaaaaaataaatcagataaacatattgctcgagtaggccatattgctactgtagtcattggagttattgttgtagcacttgcaccagtcatctcattattccctagtggtctttatgcagtagttcaacagtttaatggtgtgtatagtatgccagtgctagctttaattttaatcgctttcttttctaaacgcacatctaaattgggcgctaaagtgacactcttcacacatataattttatacgctataatcagctttgtatttacagaaattaattatctatacacatttagtgtattattctttgtagatttaattattattttgatttttaacaaagttaaactatctagtgagtttgatttaagcacgcaccaaccgaaagtagatatgacgccatggaaatatcgttacgttgcaggtattattgttcttgctttagtagtagtaagttatattatcttctcaccactcgtgttggcaaaataaatgttacaattaaaacttaatgagtaagaaaataaaagtgtacgttaaggacgtttatcagcgtgatcacgtgcactttaactatgaataaagttgatttaaaaattagaaaggagggacaacgacgatgcaaacagtcggaattataccttcgccaggtatagcacatcaacatgcaaaaaaaataattccaaatgttaaacagttattgtcaaagcgtactaaacatagtcaatggaatttcgacatcaaagtcgatctcatgataggatctgcagaggatgtacatgaaagtgttgaaaaagcagcacaaattaaagaggaacatcagtgggattacgttgtttgtctgacagatttgcctagtatttcagataataaagtggttgtcagcgactttaatagtgacaaacatgttgcaatgctatcattaccgtcactaggttttattgatttgaagcgcaagctagttaaaacgatgacttcattgattgaacaattatattataatcaaccgaaagacaaaaatgcgccacatccttttgtacgcgtgaaggctgtagaacctgacgaagacgccacatcaaaacaacgatatattaatattttatttatcataagttggattcagttaattggtggactgacacgagcaaatcagccttggaaaaacatctttaattttaagaaaatcatttcagttgcctttgcaacaggaacttatgtctcaatattttcaatgccatgggaattaagcgtgatttattcaccgcttcgacttatcatattgatggtgattgctatacttgggatggctggatggctattctatgcgcatcaattgattgaaaagaaaactgctaaatctcagcgtgtatatcgatatatttataattcaaccacacttgttacactaagtttgattacactcataaattatgtcattttatatttattgttaatcatcagtattacactctttgtccctgtggaattatttaatagttggacgagtgcccaatcacaatttacgttctcaaattatatgagattgatttggtttgtatcatcattaggacttttagctggagctatgggatcaactgttgaaaatgaagagaaaatacgtcgtattacttattcttatagacaatatcatcgttataaagaagctggcaagaacaaaaagaacaagaaacttctcgtgatgtatcacaacaaaatgtcgaacaacaaacttcaagtaaagatgaaaataatgaacaatatgaaggtaaaaaacaaggacatagagaggaggatgacgcatgacaaatcaaaaaactgtgggtctagtcgtcgctccaggtgttactgaacgccttgcagaaaatctcatacaagaaatgcctaaaatgttatctacgcattatgatcatcagcaagaatggatttttgattta

SEQ ID NO: 3420 - DNA, 3932 bp, Artificial Sequence
  Description of Artificial Sequence: synthetic nucleic acid sequence
ccaacgtgagataatcagcacctttttcattaataatagctgcggccgattctaatattaattgtcttttggaagttctaggcatttcgtcaccttctttatcgaattctaaataatatataattgtaattatttaacactttttcaacatccatacttatcgagtgtatttattttataaacaacttttcttaaattcaactttattaacatgaattgtatttattaataacgatttacttattactatatgtcacaaacatataaaaagtaaacttatcatataatatatgttcctctgtcaacgtcggttaattatgaaaaaatattaagtagctccattccgttgcttaatacttttttattcacttataaaaatccaagaaaagagagagcgatttcgccctctcttttttgtgtagtagtactattaaattttatctcactaacaattaatatacttattaataaaatgatgtatttaaaaattataataatcttgaaatataattattaagaaattcgcagttatatcatttattaactcagccttattgtacgtgggacgattttttagcagtcataaagtatacaataataccaataatgaaaccaataagtgctggaacaatccatcccataccaatgttaaagaatgggagataattttcaccaaatccaatgattgtttgtgcaaattttgtattaacaaagaactctggacttgctttcacaccatctacaaatgccgccaccattgtaaataatgttgtaaatcgatagacaattttagaatgtttaaataatggactaagtaatgctaataaaattaaagtaatcgctaaaggataaatgaacatcaacactggtgttgaatacataataatttttgttaaacctacattagcaaatatacaagctaatatactcaccccagtagctaaccaaagatagttagatttagggaataactctgtaaatgtttccgaaaaggctgtgatcaatcctattgctgttttcagacatgccacaatgatgattagtgacaaaataataattccgtaatcccctaaataatgttgtgcaatctgagcaagcgcaataccaccattttcacttactttaaaacgacctaaactcatcgtacccattaaagctaataaagtataaataacgcccatagctataatactaatcgtacctgattttaaagtttctttagcgattgtattcggattagtaatccccaactttttaattgtagtaacaatgataataccaaatgctaatgatgccaaagcgtctaatgtattatatccatcgataaaccctttgagtaacacgctattgctataatcagcacttactggcgcatgactaattccacccataggacggataaatgcaagcacaacaacaattccaagcaagatgagaaagaccggatttaagaattttccaatatagtctaatattttagaaggtttacgcgaaaataaccacgctactccgaagaataaaatactaaaaatagcaacaacgcttgggccgtaccagatgaaataaatggtgaaaatgctatttcaaatgacgtcgtcgcaagtcttggcaacgcaaaaaacggacctataacaagatacaagccaattgtgaacaaataaccatatattttacttatccttgaggaaatttcaaagaccccgtttgttttagatacacctatcgctataattcctaaaaaaggtagtccgatagccgtgataagaaatcctaaattggcggtccatacatttgcccccgcagtttgacctaagtgaattggaaaaatgagatttccagcaccaaaaaaaagaccaaacagcattgagccgataaatagattctcttttaatgttaatttatttttcatcattaattatgtatctcctaatatgtattattagctattatacatgattttaaccgtctgcgtggcacgaagttatatttatatatgtgtgtattattacatcttaatctcatagcttttcattttataacacgattcaaactataaataatgaaaaatttttaatatttctatacattgttgttttttataagaaatgttaagttaatatttattttttattaaaaatccatttattttagcatataatttttaattaataaaagtttttgataatattaagtgtacaaggatttttattttttattaaaaagtgaaaatcattactaaaaatgaggaggactgtgaaatgactgtattgagtgagcaagacaaaataagattattagctgatatcgtcaagattcaaactgagaatgatcatgaaattaaagtatgtgagtacttaaaagacctgttaagtcaatatgatattgattctaagattgttaaagttaatgattcacgcgctaatttagttgctgaaattggtagtggcgctccagtcttagcaatcagtggacacatggatgttgtagatgctggtgaccatgatgattggacttttcctccatttgaactcacagataaagatggcaagttattcggcagaggtaccactgacatgaaaggtggtcttatggcgatggtcatcgcgatgattgaattaaaacaatcaaacgcattaaagcaaggtacgatacgtttattagctactacaggagaagagacggaacaatatggtgcacaattactagctgatgaaggttacttagatgatgtgagtggtttaattattggcgaaccaactagtaatatcgcttactatgctcataaaggttctatgagctgtgtagtcacagcgaaaggtaaggctgcacatagttccatgccacacctaggtacaaatgctgttgatattttagttgattttgtaaatgaaatgaaacaagaatataaaaatattaaagaacatgataaagtacacgagttagacgctgttccaatgattgagaaacatctccacagaaaaattggtgaagaagaatcacatatctactctggatttgtaatgttaaactctgtattcaatggtggtaaacaagttaattctgttcctcataaagcgacagctaaatataatgtaagaactgttccagaatatgacagtactttcgtgaaggatttatttgaaaaagtcattcgtcatgtgggcgaagattatttaactgtagatatacctagcagtcacgatccagtggcaagtgatcgttggagatttaattaaacattttaaaaaataggagtgcatttacatgtttaaaaagttatttggaaaagctaaagaagttgacaaaaacattaaaatctacgcacctttgacaggtgagtatgtcaaaattgaagatattcctgatccagtgtttgcgcaaaaaatgatgggagaaggctttggtattaatcctacagagggtgaagttgtttcaccgattgaaggcaaagtcgataatgtttttccaacgaaacatgccgtagggttaaaagccgaaaatggattagagttattagttcatatcggattagataccgttcaattggatggcaaagggtttgaagtacttgttgaaagtggagatgacattaaaataggtgacccacttatacgttttgacttagaatatattaataataatgcaaaatctattatttctcctattattattacaaactctgatcaaactgaatcaattcatattgaagacgtacaagcagtagttaaaggggaaacacaagttattgatgtgacagtaagctaatggttaagaattattcattttatcaatttattatgaccgtgcgcggaagaaaagacgataaaggggtttttgctgagcaaatttttgaagaccttgcctttccaaaacacgaagatgattttaatacattatctgaatatattgagacacatagcgaattcacccta

SEQ ID NO: 3421 - DNA, 3272 bp, Artificial Sequence
  Description of Artificial Sequence: synthetic nucleic acid sequence
atactttcctaaacttctaaattgattagcataagcatccaaatcgtcttgatgtttatttagttcaataatcttgtctgcaaattgattaattttaggcaatgaattattagcttgatatacagcactcttaattttattgattgtaggtacattatcttcaattgatagtccgactttattagcttcagaaagtaaagcggttgctacggttttgttaaattgtttatttgctttatcaatcacaaacgacgatcccgtatcggttaacttagctgctacagcattaatcttctgatttactttaaaatctatatccgccttttgaggatgttttcttaaagtaccagtgatttcatgtgtgaatttcttcggtatataaatacctgcataatattttcccatcttaatttcatggtcggctttttctctactcacaaattgccagtcaaaactatcattcttttttaaagttttgaccattttatttcctacattaatattcttaccacgaactttttcaccttggtcttcattcactacggcaactttgatatgtcctgtatgaccatacggatcccacatagcccagaggttaaaccatgcatagaatgaaggaagaattgctaaaccagctaagatgacccatacacctggtgttttagcaactctttttaaatccgtgataaaaagttttagtgcgtttttcattttcacactcctaattatcattattcttttttattgtaatacatttccgtacagatgattacttaaatgtgcatatttttttgcttacgtaaagatgatacacatattatattaaaatttgattaaatggatttatttttctaatgttgattagtataatatttgtattaaggcgtaattcatttttgttgatgcttgtcaactttataaaccataagataaattatatcaaattctcatttgttatgacaataactaaaaataatttttaagggagcacactgtaaaagcctttagaccttcctttcttaatggcgtttcaacatatctaaatgataattcggctaataatacagtaattacgatatccataatataaacataagttggtaattgaccatcaataaaataactatgaataaagctaattacaggaaaatgccataagtataaactgtatgaacgctttccaatgtagacaaataaaggatttcctaataacttagctaaaattgtcgttggatgaacaacacttgcaataattagcaaagtcattgttgaaataagataaaatccaccgttataaatccaatcactttcatcactaacagtaaagaataatagaattaaaaatgtaagtcctatgatacccgcactattaatcacagtttttaatcctttaggtggattgggatttaatttaaaaggtggccagataaatgctagaagtacacctaaaagcagtgtctgcaatcttgtatcagttccaaaatatactctagaatggttcaagtgaggttgagaaataacaaccatcattaataatgaaaccagggatatgatccaaaacatcagtatgacatttttctttttcttaactattgccataaataataagagtactgctgggaaaaaaaggtaaaactgctcttcaatggctagtgaccataggtgctttaaaggcataaaagaaaattgctcgaaataattgacatctttagcaatataccaccaattagatacgtaaaatattgctgctatcatatcatgtttaactcttacaatatgctcggggtgcaataataaagttgcaattccaactactactattaatgcaaataccgctggtaataaccttttaatacgacgaatccaaaaatttttaagatttattgttccagtatcttcatactctttaagtaataagctcgtaatcaaataacctgaaataacaaaaaaagtatctacgcctaaaaaaccacctgttaaccattgtttattcaagtgataaataataataccaatgactgcaattgctcgcaaaccatctaatccaggcatatatcgtatttttttagcagagcgatattcattatttaatttttttctcattgttacattcttccctattaataataaatttcgttagacaagtaacttttttactaatcaatttcataagacgaacgctattgcttctaatcaacttattcaaacaaattttatctcattcaaattaacaaggtcattctcttatgttatagctatccctatcatatagcgcacgtttccattgagttaattatcatacttcgtaagatatacctcattaaaaggttataagtcttaagtattgtaatacatttgtaatattaattcaattttattataggcctaatttataaaaatattaaatgaacatacgataattcttattgaattttctttaataattaaaaaggatagctacatcattattccaaacaatgagtagctatcctttatattatccgatgcctaaagctattttggcatatcgtgacatcatatctttattccaaggtggactccatacaatcatcacttctgtatcagaaatttcaggaatctcagccaaaacactcttaacttgttcaataatttgtggtcctaatggacatcccatcgaagtcaatgtcatttcaactgtacataaaccttcatcatcaacatcaactttatatactaaacctaaattaacgatatctatccctaactcaggatctattaccatttcaagagcgcctaagatactatcttttagtgcttcttccatcagtatcacctctttaaaattttctttacaccaatatatcaaatatccgacaaaacgccaataaaatgctatgatactgttacataataattaacaacacaaggagtaatatatgcaaccttatttaatttgtctagatctagatggtacattattaaatgacaataaagaaatctcaccttacactaaacaagtattaaccgaattacaacaatgtggacactacgttatgattgctactggaagaccctatcgcgcaagccagatgtattatcatgaactaaatatgagcacacctgttgttaactttaatggagcatttgtacatcatccaaaagcaaacgattttaaagtgatacatgaagtacttgatgtggaaatttctaaaaatattattacagcacttcaacaatctcatattacaaatatcattgctgaagtaaaagactatgtctttataaatagt

SEQ ID NO: 3422 - DNA, 2408 bp, Artificial Sequence
  Description of Artificial Sequence: synthetic nucleic acid sequence
acatatcgcacgtgcaatagctacacgctgtgcttctccacctgaaagcatatgtggataacaatacaaacaatcagattttaaccctacttcacgtagtaacgctgttacatactcttccatattctcctttgatgtacatcgacactgattcattacttcaaacaaaatatctttgacagtatgaaaaggatgcaaagaagaagtatagtcttgaaaaaccgcagcaattcgatgacgtctcactttttttaaatgaacaggctgaccgtccaacgtcacttgtccttgatctggtttttctagtcctaaaatcatacgactcaacgtagactttccacttccactttctccaataattgctattgatgcaccagtggggcaatcaaatgacacgcctttaactacaggaatacgtttatcacgaaatattgatttttttccataaaatttaataacattttgaaccttaagcattgaaatcacccctcagcactaactgaaaataatcatgaattgtctttttagtagataataaataagctgtatagtgatgacgaggttgttgtaataccatatttgttcgaccttcttctatcacgcgaccttctttcataactacaacacgatctgcaattttattaatcactgtgaggtcatgagatataaaaatcatggcgcaatcaaaatgttgttttatatctttaaaagcattgatgacttcatattgtgtaatggtatctaatgctgtggtaggctcatcagcaataatcaatttaggtttcaatgccaatgctagtgcaatcatcatacgttgaagcatcccacctgacaacatgtagggatatgcttttaataacgagcggggatctttcaacttcatatacgtcatataatgaatgagttcttgttttatttgttgctttgataatgtcgtatgtgcacgcaaagtttcaatcatttgcttccccactttagttgaaggatcaaatgctcgtgttccttgttgcataatcatagcaatatctttaccacgaattttgcgtagttgcttttcagttattgtatttaaattttgatgttcaaaaaagatatctccgcttacagataaacgttgagcatttaaacctattaatgctttacaagtaatcgattttccgcttccactttctccaataatacctaatgtttcaccacattgaactgtgaaattcacgttatcaacgagtgtctcatctgaccatgtgtccttaattcttaaatgcgctactttaagcaatgtcatgtgctttcacacctttcttcaatgccagtcgtttctctttagaggacatacgaggatcaatcgccatttgtaaagcatctgataaaaagttaaacgccattacaattatgacgatagccacacctgttgtcatcatcattccaggatgtgtgaacattacttttcgtgcttcattaagcatcatcccccattcggctgtaggtgccttaacacctaatccaaggaacgagaatcctgacatttgtaatatcattgagcacatcgaactactagcaataatcgctatgtcagtaaaggttagtggcaaaatatgtttgcgaatgattgttaaatcattcataccaattactttggcaaattttacatgatcagcttcaatatattgcattacactggttcgaatcacgcgacaaaaccacgcccatcgagtcaatataaacgcaataataatattttctacacccatgccaaacaacgtaatcaatgccaatgtcaccacatagcttggaaaagctaacatcacatcgcatatacgcataattattgcatcgatataacctgggaaataacctgaaataaacccaagtatcgctcctatcacaacggaaataatcaatgcgacaaatacatataacaaactaggtcttatggcgtatattatccgtgttaatacgtcccggcctaaatggtctgtccccaaccagtgagaccaacttataccagcaaatttatttgctgtatcaatgtgattcgcttcataaaatgtaattaaaggagctaaaactccaagcactacgtagattgtaataatagctatagcaactatggcacctctatcttgaaatagacgacgtaacacaatcatttcattgcctcccttaaacgcggatttaatattgcattaatgatatctgcaagtgtattaaaaagaataaacaacaccgcgacaatgagcacgtatgcttgaattactggaaaatcatgttcagtaatcgctttaacacttaatggtcctaaacctggccacgcaaatacattttcaataacgactaaacctcccatgatcattggtatcgacatacaaaaaatagatacggctacctgtaatgcattacgtaataca

SEQ ID NO: 3423 - DNA, 3506 bp, Artificial Sequence
  Description of Artificial Sequence: synthetic nucleic acid sequence
ctggatgaacttcagccataactccatcagcaccaacggctaaagccgctttcgctgtcggtaacataatatcttttctacctgtactatgcgttacatcaaccataacaggtagatgtgttccttgctttaaaataggtacagcagagatatctaatgtatttctagttgctttttcgtatgtacgaatacctctctcacataaaataatatttcggttaccttgtgaagcaatatattctgctgcatagataaattcttctatcgttgctgataaaccacgtttcaataaaataggtttatctgtacgaccagcttctttgagtaactcaaaattttgcatatttctagcaccaatttggaaaacatccaaataatctgaagcgatttcgaaatcatttgggttaactatttcacttactacatttaagttatatttatctttaacatttttcaaaattttgagaccttctactccaagaccttggaaatcataaggagaagttctcggcttaaacgctccgccacgaataaatttctcgcctttagcctgcaaatcttgtgctacagcatcaacttgttcttgtgattctacagaacaaggaccaaatacaaatgatttattaccatcaccaatgattccaccattatcaaatttaacgatcgtatcttcaggtttcaatttacgtgatacataaagatgtttttcattttctgatttttgtaaatctgtagaggctttaaaaatttctttaaataattgcttaatcacattgtcgttaaatggacctttatttttatctaatagctgattaatcatttccttttcacgctgaggatcatatactcgtgtaccttgcttaattttttcttcaccaattttctgtgctaattctcctcgcttcgatagtaattctaatatttgatcatttaaggaaacaatttcttctctatactgttctaatttattagtcatttctactcacctctaagatatagttacgcataaagtatgttactttaaagcgataaaattaaaattattcaaatctaattttaacaatttcacatttatagttcaagcgtcaatttacagaaaatactaaatcttctgtaaatttatgtaagtaataatttgttaaataatgatattacaatattatttaaatgttaaaaaagataggaacgaactgaatataaattcgtcgtcctacctcaagatttcagatattatttaaatatctaattttaaagtgaaataatctcttaaattaatgacttaaatttaaaatttaacataataattacaatagttagtaaatcgtgttaagtagataaagaatataacttttataatgttcaatacacttcattttactctttatcattgttaatatttaaaactcgagattaatcattaaatgttcgtttttcaattttgctactagttttttctactttttgttgtttattacgtttgttttggttaggtgtatgttgctgtttgcctttggaatcctctttagttgctgttatattcttagtctgattcgaatttttttggctgtgcggattatttgaatgttttttagattcagtaataagtgtagggatacgcttcaattttgtttgagctttagcaattgatggttcttttaacaacgcttctgtaagttgtgtttctttagagccatttgtgagcttagatcttttttcttttgctgcctgtgctaagcgataagcaactgaattagtatctgatgcttgagattgatttaaattagttacaagatttggaacatcagagttatttgaagcttttatagcttcttcttgcattagatttttcgtgttactagcaacttcattattattatttattctatctttttttgcttttgccgctgcagctaatttttctgtttcagtttctgacttacttttagtatcttctccacttgcagaagggtttgctaaatcatgattgcgtgcttcttctttaactgccgtttgagcaattgcaatttcttcagcagaaggttctttctcactatctatgtgcgtcgtagatgttttattgtttgaatcaacttcacttttagcttcttgaattgcctgcgcttccggtgattcatccgctaagtctgtttcgtgttgaatagcattttgttgagctgctaattctgttgctgatggtctcacatcatccacttgttttgtttctttttttgcttcttgaattgcttgcgcttccggtgattcatccgctaagtctgtttcgcgttgaatagcagctttttgagcttgtaattcatctgcatggatattatctttggaatcatattttaattgctcaactttagatttaacagaaaccactgtatcttccgctcgttgtctatagttttcaactttactacgtaaatcttgttctttttctttcaattcatccgtttttttatatattttatttttatagtacaatccaacagcagaacctactatcgcacttgctatgaaactaactacaaaatccttacgcttcaatgagttagattgtgaacgagatgtgcgatgatacaattcttcgcttgtatggcttttctcgaaattatcacgattataatgttccataaactttcctcctaaaacaaaagcacttaaataagtaaaagcctcatttaagtgcatttgtcattaaatagtattaattatttattaacacgtgaattgtagctatgatttgcatcatctgctacagtgtttgttttgtagtttgcacttcctctacgattgtatctgttttgccatttgtcagcaatttccattgcaacatttgaccattgtacaacttgagaaattttatcttcattttgagaaatattgtgcgtaattgagtttgtaactctatctacagatccatttaagttttgtactgagtctccaatgcccttaacagcatcaactacagaatttaaacgatcaactttaccttgaatatcttcagttaagcgattcactttatgaagtaaatcagtcgtttcacgagtaataccttgaacttgaccttcaacaccatctagtgttttagccacatagtctaaattctttttaacagaaataagtaccacgacgataccgatacataaaattaaaaacgctatcgcagcgatgattcctgcaattggtaaaatccaatccattaaaaacgcctcctaattaccataaaataaaagtcattaatatttaatacccatgatgcttttatataaacatattaaaaatcattttttacgcctaatttttcgaaataagcttttagtaacttttgaatgtcaccagcgcccataaataaaattacagcgttatcaaatttttctaatacatcaatactattttcatctataagcgtcgagccgtcaatacgattgattaaatcttctatagttaaatctcccgtattttctcttattgaaccgaatatttcacataaaaatacttggtct

SEQ ID NO: 3424 - DNA, 3155 bp, Artificial Sequence
  Description of Artificial Sequence: synthetic nucleic acid sequence
gagacgtccaagttgaggatatgtttcagtattaccatgagtcatacccataccgccaccgatagtcacattaaatccaattaactcatcttgttcaacgatagcgattaaaccaatatcttgagaatagacgtcaatatcattagatggtggtactgcaatacctattttgaatttacgtggtaaatacgtattcccataaataggttccttttcctcactcgaatctaaaaccttttcaccatcaagccaaatttcatgatatgcatttgttcttggaagtaagtgattacttatacgcgttgcataatcattaatctccttatgtacttgagattgataaggattaggattgcacatcgtattacgattaacatctccacatgcagcaatagaatcaagtactgcatgattaatatttttcattgattgtttcaaattacgtttaagaattccatgaaattgaaatgcttggcgtgttgttaatttaatcgtatgatttgcatattgattagagatatcatccatagcaatccactgttcaggagtcgctttccccccaggtacacgaactcgaatcataaaactatatgcaggctcaagtttttgtttacgacgctcatctcttaaatccctgtcatcttgcatataacttccgtgaaactttagcagttttgcatcatcttgtgtaatggatccagtgattggattagctaaactttgttcaatagttccacgcaaaaagtcactatttgcttttaaaaattccatttcatcaagatttttatctaattcttccgaaatatgattatttgtattaaccatgtatcccccgtcccttctattaatacacgtctctttgatatcttttatctcttttcatttgttttaagtattcttctgcatctgtttcagataggttttgctctttgattaacacatttttaatcgcttgatgaacatcctttgccattttactttcatcaccacatacataaatagtagcgccattttcaatccatcgattaaattgttcactattttctgcaattttatgttgcacatacacttttttatcagtatctctagaaaaagcaacatctaattttgataaagttccatcttcaagccattcttgccattccgtttgatacagaaaatctgtagtgaagtgttgatctccaaagaataaccatgtatttccttcaaaacctagttcctctcgttcttgcatataggatctaaacggtgcaacacctgtcccaggacctatcataatcacaggtgttgattcatcttgcggaaacttaaaattcggatttcgttttaaatagataggaattgtatcgccctcttgtattctctctgcaaattgtactgaacaaacacctgaacgttcccgaccgtgtgcttgatatctaactgctccaacagtaatgtgaacttcatctggtgttgctttataactactagatattgagtactctctaggtggtaactttcttaataattgatgtaaattttcaggttgtagttctgtcgttgcgaagtcatttaataagtcaatcaaatcccttccctcaacgtagttttgaatccattctttatcttgaattttttcagaaagctcttcattatcaaaaaatatcgcagcattttctattaacggttttgttaatttagtaatttcaaaatgcgatgttaatgcctcttcaagatttaaagtatctccatcctcgttaattaaaacttgtgtttctggactccaacctaatgtgctaataagtaagtctacgatagctggatcattttgaggcaagacaactacacaatctcccggttcatattcctcaccaaaattatcaagtaataactcaatatgtctcgtctctttgtctgaacctctaccattcaaattaatattggtcaatacttcagcatcgtaaggattagacttactatatttcttttcttttgctgattttatagattcgctaacaacttgttcactttcagtaccagccggtgttgaatcaatcgtattaataacattggccatccacttttcagcgtcttcttcataatcaacatcgcaatcagtacgatgataaagtctttctgcccctaattcagccaaacggttatcaaaatctttaccagtttgacagaagaattcataggtttgatctcctaatgctaatactgaaaatctcaccccatccaattttggcgctttacgtccgtggatgtattcatgtaattcaacagcgttatctggtggatctccttcgccatgtgtagatgtgataataaataaatcttctactttcttcaaattcttaggtttaaagtcatccattgatttgagcgtaacgtcatttccaatatcagataaacgttgttcaaatatttctgcaagtccttgcgcattaccagactcagatccatataaaattgttatcgatctagcttccggctcaactgaaggttccttttcatgtagcatcgcttctgtattgtcatctgagttatgttgttctacagaatctgtagatgtatttgattgttgatttgccatcagatagccacttaaccatacttgttggttagatgataaagtgtgaagcaattcattgatttgtttagcttgcccttccgtaaaaggactattggtaacacttaagttcaatcttatccacctcttatactttgttattccgatatttgtcattatttatatatgtctatttttgaaagttattaattatatcttcaattctagtatgtaccatttgttattttcagtaaatgtaatactcaattgataactaaaatcgaaaagacaattcataatatcaaagggcaatacaaacttttattactcaaaattatcgttactaaataaagctgtatcagcttttaacaaacaactctttatttcttatcggaatactatgttttgaaattaaaattttttgactatctcttatggtttatcagctacatgtaatccacattcagtcttactagaattggaccaacgaccagcacgtgaatcattagaatcaaatacgggtgatgtacatggaatacaaccaatacttggataattttgatcatgtaattcattatatggtaaatccttatcacgtata

SEQ ID NO: 3425 - DNA, 2901 bp, Artificial Sequence
  Description of Artificial Sequence: synthetic nucleic acid sequence
taggtaaacaatgattgatactttgatttgttcattgctttatcatttaaacaaacatagtgattttaatttttatcatataaaagaatgaagataaaaaagatgtatgtgaaaagtgtgctcacatacatctttttattaatatacatcttagttagcaccaactgctactatagaatttgatgtggatgcatcatcgtaagaatcaattactttgaattttttaccgttaactgtaaattgtttgtttttagtattgtgatatacccaaaagccatttatttcagctatatccctatcattaatttttaaatccgtcatggtcgaacaccctatactcattaatttgattgttacttatgtttggatcgttgatttttaatttgttattgctaaataataagtggaatgtgaaattatgtggaatagatggctcttttctcatttctttagccatggataaagtattttttctaatgattttttcgtcatattcgtccagagtactgaaaagtgtagtcgttatttctgtattaatatacgtatcttttttagactttaattgtttcatatgctttttaaaatcatcgtcactttctttaattaaaggttcaaaatgttttctataatctcgtaatttcgtggaactagtagtaatgtaaaagtaattattttgataacctatattttgagttttagttattgcttcatcggtgaatccagtatagtgatatttatcttctttatctttgaggtatttttctaagttatccattttttccttatttgctctatactcaaaaccgcttaacacagttcctaccatcatactcatagtatctccgttatcattgcttcgcatggagccttcttcatggattgattccatatcaaaagggatgcttgcattaaacacaatgtcatgatcatcgcaatgaacgtaaacttcggcgccatcaccacttcctacaacatttgtggctttaacattaaggctaaaattatctttaaaaaattgttcgccaagtttttcgtattcttcacgatattttttcgcatgtgcgatagcacttttttcagctaatggttggaaatcttgacctttgtattgacttgcaggaactttttctatttcgtctttcattgtcgaacaacttcctaatattagtgttgaaacgataattgtggcgattaattttatcatgatacacctttctttactaatattacatcttaattaatatgaaatacattatttaaatcaagcccaaaagctatttaattcagcaatatctctatcattgattttactcatgtttatgcactccatattctaatgggttgttagcatcataaaatgcgcgtgtagaattaatttttggctcacttaattgtaaagttatgtttgtgttttcaggtttttctttgtaatgatataaatcatcacttaagaataataaatctttcttagagttatttttagtgaaatcagatttagtactgaataatgttgaaacaacttcaattttggctttgaaatttgttgcttcatttgcttttttcatgccttctttgaaattcttagaatctttttttattaaaggttcataatattttctataattattaatattagtaacgttacctgctaaataataatactcattttgatatccaacattctgtgtcttatgtattgcttctttagtaaaaccggtatattgatatttttcttcattgtctttaaagaactttgttaagttatcatatttttctttttgtgctttatattcaaaaccacttaacaccgttccaaccatattactcatggtatctccgttatcattgcttcgcatggagccttcttcatgtattgcttccttatcaaaagggatgcttgcattaaacacaatgtcatgatcatcgcaatgaacgtagacttcgacgccatcaccacttcctacaacatttgtggctttaacattaaggctaaaattatctttaaaaaattgttcgccaagtttttcgtattcttcacgatattttttcgcatgtgcgatagcacttttttcagctactggttggaaaccttgacctttgtattgacttgcaggaacttcttcaggaattgattgtgatgaatgttttgcttctttatgcactgtggaacatcctccaattaataatgttgaaacgataatggtagatatcagttttctcatgatacacctcaatataagattagttactttaattttaacttaatttataaattatataaaaagaatttataaaagtattgaacaaatataacatttttcacatattagttatattgattttatagcaatttcaaacatattcgaataaaaaaataaaaagcttacacaatgtaatttgatacatgcataagctttgtcatatgattaacgatttttattctgtttatcatttgttccatgattttgattgttggaattattatttgagttgccattttgttgtgaatcagattgattattatgttgtgacgactgttgtggtgttgattgtgctggttgatgatatgattgattagttttgttctgattcggtttctgtttgttattttctgaagagttatttttatttgaaccagactgttgattattatttgggtattgatggtagttaggttgttgtgctggttgttcagtacctgattgattatcgttgttatagtcattatttgttggttgagtttggtcttggtgttgattagtatcacgattttgatttgaagtatcattttgtttgtttttgcgattgtgttctattttttttatcattcttattagaattagtatggtggttaatagctgcatataatgaaaagcctaatgcacatataagaatgattac

SEQ ID NO: 3426 - DNA, 3024 bp, Artificial Sequence
  Description of Artificial Sequence: synthetic nucleic acid sequence
taacccagccactcgaaccataaagaattcatctaaatttgaactgaagatagaaataaagttaagtttttcaagcaacggattatttttatcatatgattcttgtaatactctgtagttaaaatctagccaacttaactccctattgttgtaatactgcggtaaattaatatctttttctcccaatcgagtttgcatactatacatacacctcattaattaatctttattatgcccaatctaaaatatcataataattttaagattttgtaaatataatagaaaccttaccttttaaaattttctcaatatgctttttctgacgatttgcttggtattcttctgcaataggtgaacctttgtaataaactaataaatcgtatttgtcatctttctttgcttttagtttaacttcctctacaaaactagtatgtgagatattcaaggtgtttgcaaatttaataatccctcctaaagcttgtattgtatctatttctttattactaaaccactgtgtttctttgcaataaaatttaagtaaagatttgtttttaaaactagctaacaaagctaatttcacacgatctttatgtgaaaagccgttaatcattgaatttgcgattaagtaatacgtatgtggtgaacttgagtctgaatcaatgaaactacctagataataaatgtaggcaccttcaataaataattctttttccatttctgaaatattaagtgatcgttcacttataatttgattcaataaggattgagctaatttcacacgacgattagcactcgtttcttcaatatgatattcgttcgctaaatgacgtaatgcatctttacgtacgttacttttattaaactcatcaggatatcgtttgctgatgtggttcataataaatccttcacgaattccttttcttgagaaggtgaattgtgtggcgtcaatttttttgaaaagtgttttaaagacggagatagccggcagaataatatcgacgcgatcgcgacttaaaccgtctaaatttgttagttcatcgcgagaacttttacggattagatcataaacattgttaatatctttcgaagtcatcgtatagttatgaacgccaccgatagggtatgcatgtgctgattgatgaatgcgtgcaacattacgtgcagaaccacctactcctacgagcgcaatatgttggttggatagccagtctaactgactaaattgctcacgtaaaaactgttccatatttttaatggctgttttgtcattatgttctttatcaccaaaaaactgacgcttaagtgataccacgccaaatggaaagctatgagcctctttaagttgtttgtctttgaaaagggtaacttcggtagaaccgccaccgatatcgacagaaattccattttcaatatcagtagtatgtgtaatcgcatagtaaccgtaaaatgcttcatcttcttcaggtacaatttgaatttcgatatgaatatcttgtttaatttctttaatgatagcttcacgatttttagattgacggatagcagctgttgcgatgggatataatgcatcaacgttaaatttatccgcaacttttctaaaactgcttaaagtctcttttaaaacatgaataccttcatcattcatttcattggacttagtgagatattgacttaaacgtgcaggtgtttttatattcagtatttcattgagcccagtttttttattgtagccaaatataacaagtcgaatcgtgttggaaccaatgtctatcaaaccaattctttcttccatgtttgcctcctattattcaaacaatgcgtttaaaataatccctatttaattttattgtacatgatatagataaattgaaaagaacttacagttaatttttctgaaatatttaagatgattgataagtaattataatttttaaaaatacaattttagtaaaaagagaagtatataaatgtatagcttaactcagctattcattcttcgtgcgtcttattcttatcactgtttaagttgattcacatcgtggaaaactaaaactaacatgatacctaattgtattaagtatgtacaagtgataggagagtgactttggatggaacgtttagaaaacaaaatcgcagtgattactggtgcgagtactggtattggacaagcatcggccgtggcgttagcaaaagaaggagcacatgtgttagcgcttgatatatcagatcaattagaagaaactgtgcagtctattaatgataatggtgggaaagcaactgcatatcgcgtagacatttcagatgataaacaagtcaaacaattctcagaaaaaatagcacaagaatttggacatgtagatgttatttttaacaatgcgggtgtagataatggcgccggacgtattcatgaatatccagttgaagtgtttgataaaattatggctgttgatatgagaggaacttttttagtaactaaatttttattacctttaatgatgaaacaaggtggttctattattaatacagcttcattctctgggcaagctgcggatttataccgttcagggtataatgctgctaagggcggtgtcattaattttacaaaatctatcgctatagaatatggacgtgaaaatattcgtgctaatgctatagcacctggaacaatcgaaacaccacttgttgataatttagcaggtacatcagatgaagaagccggacaaacattccgagaaaatcaaaaatgggtaacaccattaggtcgactaggaacaccggatgaagttgggaaacttgtagcctttttagcttccgatgatagttcatttataactggtgaaactattcgtattgatggtggcgtgatggcttatacatggctacaacacgcattttcattttttgtcgttgttttttcttattttcttgtgacgtatattggttaccgatatgttctacttttttattcattgcttgtcacctccttaagcatttcactcttcattaatacgttcttctttaatc

SEQ ID NO: 3427 - DNA, 3108 bp, Artificial Sequence
  Description of Artificial Sequence: synthetic nucleic acid sequence
tgttctaaattagcaataacactttcaagagacgcacgtgtaggatttgcagtacgtgaatattcgtacccttgtcttaaatcaccaatatcatcttgtaaataagtacttgtttgataaataggtgttgtcactgctccagtatagttgtctgtcgtatgtcccccatgtatcatttgcgtttttttattcattattaaaactctccttatagttgaatatttgtttggacatgtatcgatcgcttccatctggaaagatggtaacaatcacaccattttgaatgcttttttttaattccaacgctccttgtaatgccgctcccgaagaactaccaactaacaatccttctttattcgcgacaagtttaacattattaaaagcatctttatcggcaacagtaaaaataccatctactaattctttttctaaaaatgatggccacttttcagaaccaatcccttcagttgcatgaggatgactgacaccaccatttaagacagagccttctggttctacaatataattttttacatcatacgtttttaagtgttgtgcaactcctgtaaacgtaccaccggacccaacacctgccacaaaataatcaatatgtgaaagttcatctgtgagttgtttggcaagtgtttgtgtatatgccccaggattatctttagtttcgaattgattcatatataaatatccatatcgtgttgcgtatgccaacgcctcttgctgtgcgccagtcattccctcagctttgggggtacgtctaacatctgcacccaatgctttcataattgaaattttttcttctgcaaatccttctggagcaaagatgatacattttactttgtgccgattagaagcaatagcaagtccaatgcctgtattaccagcagtcgcttcgactattgtatccccttctttaagtcgtccttcatctattgctttttcaattaagtacttccctagacggtctttgatgctaccaccaggattaaattgctcaagtttggcgtatattttaacattctcgtcactaaagctttctaataaaactaatggagtttgtcctatcaaatcgtatgcaatcattatttttggttcagatgacaacaatgagtatcactgaacttaacccactttctttatttatgttagcgctaattcttacttatcagatatgaattataacttatcggcattgtttttgcaatttctgaaaaacgtacaatcaatttgaaatttaaacattatttaaaataagtatttttataattgattacgtttatatgagaatacataccgaaagtgttatgataggggtaaataagctagcacatcgataaaagttatcgaattacatacactagaaatgataaggagctgctttaattatgacgaaacaagatttatctttatctgtatttaccaatgaaaattataagaatcttcgttacacatcatctagttttagaaattctatgtatgatgaattagaggttaataaaagtcgttttaaaaactgtaattttaatgaaggtatttttaagaatatagaagcaatttgtaattgtaaatttacaacgtgcgggtttaataattgtattttcgaagatgttcatttttacaaaaaccaatttaaagattcaacatttgtgaatacaccatttgatcaatccgtatttaatagtactttattccaaaatgcaatgttcgatagcaatctcattcgtagcgtaaaatggactgatatcatttttaaaaacgtttctttcaaaaatgtagaaattgaaggaacaacatttaaagatgtaaaattcaaaaattgtgagttcaaaaatgtaattattactaattcaactatgtcgcaaaagttaatgaatgaattacaaaaacaagatgttactttagaaaatatagacacttctatttaacattcattatcttccgcttaagaaaacaatttaagatcatagttaaacattcgctcgtttaatggtgttagatatttcgaatcaactacataacattctttatatagtaaaacggtcaactccactaaaaaatggaattgaccgtttgttttagttttatcaataacgtctcaatgacttaaaataattgaactataaatactaaaataataacaataggcatgatgaacttaattaaataataccacggtaaaaataggttgaatttgtctttcccaaagctttcttttaataattttttatctagtaattggccaaccactaatgttgttcctagtgcccctaatggcataagaatattagatacaataaaatccatattatcaaatatcgtaccagcgccaaaacgcaaatgacttagactactaaaagataatgttgctgggatactaatgataaatacaagtatactacctatgattgccactttttgtcttttactattatcatttttagtaaaattagatacatttaactctaataatgatatagaagacgttaatgccgcaaataagaataatagtaaaaatataaagtaaaagaatgtaccaaaagtcatttcgctaaatactagtggtaaaaccttaaataataagccagggccttcttggggttggtaaccaaatgttttaagcgcaggaaatatagctaatccagccaagacagaaattaaaatattcattacgacaattgaaagtgctgaagactttatcgtcatatttttaggtgcatagcttgcataagtaatcattccggttgtacctagggacagcgtaaaaaacgattgtcctaacgcaaatagtacaccttgaatagacatatcttcaactcgaggttgcagtatataacgtacaccttctaaagcaccttctaaagttaaagattgtgctacaacgataattaaaaagataaataatagaggcatcattattttagaagctttttctaaacctttttcaacacctaacataacaattaccattgttatcaaaataaatatgccttgacctaaaacagtcaaccatggattactaatgattgtttcaaattgaatatttgtcagcgtacttgatttaaaaaccatgatttgtgctatgacataacctatata

SEQ ID NO: 3428 - DNA, 4017 bp, Artificial Sequence
  Description of Artificial Sequence: synthetic nucleic acid sequence
aaaatcaaatccggtttagcttttattaattcttctttatttaaattcatcgcatcgaattgttttttacctttttttacatctttaggataatcatccacagtggatacaccaactatatcttctccgattcctaagcgatataaaatttctgtgttactaggaatgagcgaaataattctatgatattttttatcgcttttttcagtgtctttattattagatgaatgattggcatcttgaccacatgcagccagtactacaatcaatgcacatataactatccatagtttacttttcatttggagcatcaccctttcacaaattatttttaatgttcctattcatcatatcaaaatataccaatatttgtagatacaattttatttgattttcacaaaatatgaaaaaagacaactttgaattaaatctattaatatatttaaccccaacttgctttgtctgtagaatttctcgttgaaattctctgtgttggggccacaaccccaacttgctttgtccgtagaatttctcattgaaattctctgtgttggggccacaatcccaacttgctttgtccgtagaatttctcgttgaaattttctgtgttggggccccgaccccaacttgccttgtctgtggaatttctcgttgaaattttctgtgttgatcagttttataatgttagtatcaatcggtaaaatgctaaaatgtctgagacaatcaacaatgtcccagacacataatgttttataatttaataaatgtttttatcgcgtcagaaatgtataaattcaaaccacgttcacgttgcttgttaataaactttacaaatcgctcgtcctcaatataaatctgagctatatattctaaaaattgattgtcacaattaggaacttgttctttcaaaatacattgtaatttcttagtttttccacttgcttcaagtatagaaactttgtttaagtatagttgattcatttcgtcaaaaaacatatttaattgcttattaatttcctcaaaatgattttgctgttctgattcatccttacatttttgtttatctttatatgcttgataataatgagtatctccatacttacttgctgcttctttttcatactgttcatttaaattgaaattttgcattgtagttacctcaatctcatcgttatctttgtgaaaatgatgttctaacgtacggataatatcgtttaagcgatctctttttttaacaatgtgataaaaattatcatgtaatattttagttctaaaatcactatcaccttcaaaatacgtctgtatttgctttaatgttaaatctaattcctttaaaaagagaatatattgtaactttgaaatatcttgaacattataatatcggtatccattagcactcatttgttgtggcacgagtaaccccttttcatgataataatgaagcgtgcgtatactaactccggtaatgtcagaaagcgttttgggactgaagcgttctttcatcatttcacctcctgaattaaagtatgaggtatgacgttacgttaaggtcaatacttattttttaaaataggtatctaaaaaggtatagcgttgtttccccttaccattaaaataatttttcccaaaattatctaataaagcgtgaaactcatttgcatcttgatttgaaaatgattcaggaagtgttaattcctgtttcaatttatgataactttctgtatgttgatatcccaattttctaaaaatacgtctagtataactatcaggtatgaattctttacctttaaaaatatatactattaagacatcggcggtctcttcacctataccacggatggtgagtaattcttttcttaagctatcaccgtataacttagctatactactataatcaaaatgatgttgatttaaccatagtaacaatgcctgtatagccttagctttatttttatagaaaccactcgaacgtatcacttgctgcaacgattctaaaggcattttcaatatcgtctgtgcattaaaagaagtttcttcttttaatcttgataacgctatatctgcattgttccaattagtattttggactagaattgccccaagcatcatttctattggcgtttctgctggccaccaatattgagggcccatattgtattttgaggaacaataggtatctataatgattgatttaacaatgtttgtaacatgttaacagattttacaaagacggtagctaaatatataatatggtacatagatgatgaaagtgagatgacattatgggacgtaaatggaacaacattaaagagaaaaaagcccaaaaagataaaaatactagtagaatatatgccaaatttggtaaagaaatatatgtagctgcaaagtctggtgagcctaatccagagtcaaatcaaactttaagattagtattagaacgtgcaaaaacatattcagtacctaatcatattatagatagagctattgataaggctaaaggcgctggtgacgaaaactacgatcacttaagatatgaaggttttggtccgaatggttcaatgcttatagttgacgcattaacaaacaatgtaaatcgtacagcatcagatgtacgtgctgcgttcggtaagaatggaggaaatatgggagtatctggttcagtagcttatatgtttgaccatactgcaacctttggtgtagaaggtaaatctgtagatgaagtcttagaaacactaatggagcaagatattgatgtaagagatgtaattgatgacaatggcttgactattgtttacgcagaaccagatcaatttgcacaagttcaggatgcattacgtgaagctggcgttgaggaatttaaagtagcagagtttgaaatgttacctcaaactgatattgagttgtctgaagaggatcaagctatttttgaaaaattaatcgatgcacttgaagacttggaagatgttcaaaatgttttccataatgtagatttaaaataatgatgactgctaatgattggatagaccggttggaattaatttcgcatcctgaaagtttcaaaacgatttcgatcaaactgtttatttgtgtcaagaaatgttccatccatatctaccgcaatggctttaatcatcgttaatccccctatctatagattaaaattcataatcattatatagctgttggatttggtattgaagcaatatcaaatatagtgaaaacatattcatatattgaaattgttttcaacataaaaaataattacctttgtcattcacactatcgcttaatatataagataaatctcttattttcatttatataacttgaatcaaaaatattaaaaagagccaaggacattcactttgtcctcgaccctctaatcaataagttattaaaatttattttaacaaagcatcttctcgaagaagaacataattaatacagtttattacgtatctttcacttataagaatattagttaatttgtgtagctatgaatattttccttgtttcccaaacacccgtttcttcgttatagtcatcgcaagtaattaatgttaattgatttttcttattaggatgttcgtctaataccttaacctctgtaggcttaacatcacgtattttagttattttatactttctagtttgatttccagttttaaaatacactttactaccgattttggctgattttaaatttgtaaattgatagtgcgaacgatctgtaaacgtatgaccagcaattgaaatattctgttgattaagagattcgtcaccttctgcaaaactaacacctctattgagttgttctggtgttgctggaccagggtatactggttcttttatttgtgcatctggaacttctatataaccagccattttagatttatcggaaggtatctttggcgtcgatttagatgtctttgtctgttctttttcctttttatcataattttcaattttatgatcgttatctttttcatgtagataattatcgatatatggctttga

SEQ ID NO: 3429 - DNA, 3807 bp, Artificial Sequence
  Description of Artificial Sequence: synthetic nucleic acid sequence
atagtgtttgatctagtgcacctgcggatccagtattaatgacgacttctggattaaatttttctattaacaaagtcgttgagatagaagcattaactttacctataccactttgtgttaaaaccacctctttgtggtttagcttgccaacataaaatttaacatgcgcaatatttatttcattcatatcattcaatttacgctttaaaatcgtcacttcttcttccattgctccaataattcctatcatatatctttttacacctcatttataaagcattagcataagtattttatcacattttaaatatctccacgatagctagttttaaagtatcaatgcttaaatcactatgattaaataatatctcttcttatttataattaaaaactaccctgcaattgatttaaagacagttgcgggtagtcatagaactttattatacaattaacctttccaaagacttgctaaatcttgtaatgaaaagataccagtcattattgtgacaattacggctataataccaaaaacaagcatccatgttgggtgttggtaattaccaacgatagattttttcctacttgcaatgagaattgcacctaatgtgattggtagaatccaaccattaatcgcaccagctattataagtaaactcaccggtttaccaataaataagaaaacaaaagttgaaattacaataaatgtaataacgataagattatttttattgagtaacgatttgtgtagtgtttttaaaaatgttgcgcttgtatatgcagaaccaattactgaggacattgctgctgcaaatattactacgccaaaaatatttttacctataggacctaatgcatgttggaaaactgatgctggtggattttctgaactaagcgtaacgccagttacaacaacacctagtacagctaaaaacaataaggtgcgcatgacaccagttgttaaaatacctgctacagcagatcgatttacgaaaggaaggtatgacttaccttttataccagaatctagaattctatgtgcacctgcaaaagtaatataaccccctactgtaccaccaactaatgtaattataggtaatataagtttgaaaggatgttcaggtgcaaatgtatgtactaatgcatctccataagggggatttgaaacaaccatgacataagcgactactaaaatcattacgatacctagaatcatactaataacatccattattttctgaccacttctactaacaaagataagtatcgcaaaaatagctgttattgcagcaccccattttacatcaagaccaaacattgcatttaaacctaaacctgcaccagcaatattacctatgttaaatgcgagaccaccaaatgcaattagtatggagataatagtaccaagtccaggtaatactttattagatatttcttgtccacgtaatccagttaccactaatattctccaaatatttatttgagcgcctatatctataataatagaaattaatattgcaaatgcaaaactagcataaaattgtgcagtaaacactgcagtttgagtcagaaatgctggaccaatagctgatgtagccattaaaaaaactgaaccatataataatcgtctatgtttttttgtgaatttaaaattttgtcctttttgattgaaatcttgttttgtattttcccccatcttttgaccccctataaggattgaatatcaatgccttctttcattaattcatttctaatttgcgtaacaaattctaatgcgtgttttccatctccgtgaacacaaattgtatcagctttcaaatcgatgatttttccatttttacttacaactttattttccaaaaccatttttaatgcttgttggattgcttcgtcagtattagtgatagtggcatcggttttttttctacttaccaattgtccgtcatcttcataacgacggtcagcaaatacttccgaagctaccttaagccccactaattcagcttccgaaataagtaatgtattcgctaagccgacgaaaattagatttgagtcgaaatcaaaaactgcttgagcaattgcatgtgcaatttctttatttctagcccccatttgataaagggcaccatgaggtttaacatgcatcatttttacatgattgattttacaaaagccacttaacgcacctaattgatatataactaagttataaatttcatttggagtaagatccattttacgacgaccaaagcctttcaaatcaggaagacccggatgtgctccaatacttatattattttttttcgctaattgaacagtttcattcataacatcttcatcacctgcatgataaccacaagcaatattagcagaagttattaatggtaaaatgtgctgatctccaccgaatgtatagttaccaaaagcttctcctaaatcacaatttaaatcaattttcaacttcatttcacctctttaatgatttgatgtttttcaagaaattttatatctactttactggcatcgccttttgcatatattggataatttaaaaccgcatataaaaagtcagctgtagtagtaaaaccttcgatgaccatttcatctaacgcaacttttaatttattaatagcagtttgtctattagaatcctttacaatcactttagctacaagtgaatcataataaggagaaacctgataacctgtgtaaagtaaagaatctacacgtatattaaatccttgtggtaagtgtaatttattaacttttcctggagagaattaaatgctaaaccagttcaagctggtgcttacgatattcatttcgtagacaatggataccaatacaacttcacttcaaatggttctgaatggtcatggagctacgctgtagctggttcagatgctgattacacagaatcatcatcaaaccaagaagtaagtgcaaatacacaatctagtaacacaaatgtacaagctgtttcagctccaacttcttcagaaagtcgtagctacagcacatcaactacttcatactcagcaccaagccataactacagctctcacagtagttcagtaagattatcaaatggtaatactgctggttctgtaggttcatatgctgctgctcaaatggctgcacgtactggtgtatctgcttcaacatgggaacacatcattgctagagaatcaaatggtcaattacatgcacgtaatgcttcaggtgctgctggattattccaaactatgccaggttggggttcaactggttcagtaaatgatcaaatcaatgccgcttataaagcatataaagcacaaggtttatctgcttggggtatgtaatccaaatctaataatataattagaaagagtgagacagcattcgttgttctctcagcaacgaggactaaaattgactccttgtatataagtaagttttaattttagttatcgatgcaatacattaaaaagcctaggacacattgctttgtgttctaggctcttttttatttgaaagtctaattaaaatgatttatataacaaagtgatgttaacaaagtgaaaatataacatctagactgaaaaaatataataaaattaaatgatattatgtttgtatttatttaaaagatatggttatataaatggtgtgtttaatatcatatatagatacatttaaattgcttgcctacacaacttatatgaagatgctctaataaatgtatacctatttaatttgttaaagtataatattaaagtaaaaagatgacatgtcaatgcaattgaggatgtaattgtgataatattaaga

SEQ ID NO: 3430 - DNA, 3602 bp, Artificial Sequence
  Description of Artificial Sequence: synthetic nucleic acid sequence
gtattatattcaatattgacgacatagtcatcttgatcttcttcaataataaatgacaaatcaaatttagctgttgttgactgaggtggaatatgtgtcaattgactatgtccaaaattcgcatgatttgtttcattattttgaagtacgagcatcacatcaaataacggattatgtgaagcatctctttcatcaacaagatcattgactaagctttcaaaaggatattcttgatgttcatatgcccctagacacatctctttcatctcagccatcaattgatcccatgtcttttgatcatgtggtcgaccacgatatacaagtgtattagcaaacatacctaacatattttcagtatcgcgatgagtacgcgcactgattacactaccaatagcgatatcgtcctgacgtgtatatttgtgcaataataccatgattgcactagcaaagaacataaagtctgtcacttgatgttgttctacataagatttcaattgctgtttgatttgacgattgtaatgaaacgtcaacatattaccgttggttgttttaatacttggtctaggataatccgtaggcatatttaatattggaacctgattttcaaattgctgtaaccaaaagtgacgttgtttagataagtctctgtgcaccatccactcactataatctttatactgaagcttaagttcaggtaatgatttatcttggtataaagcgttcaaatcagatagtaaaatcgtgttactcataccatcattaatactatgatgagtatccataaataaataatcttgttgtggtccatgtatatatttaactcgcatctgacttggttgttctaaatcaaacggttccataaatgattgaataatatcttgctcgttcgttagagatgtcgttacctcttcaaaatcaggcgaaacatgtgtcgcaatacgttgtttaacttcattgtcatcaattacatattgtgttcgtaatatttcatgacgttcaatcaacttagataatgcacgttgcaattgcataacattaagttcagaagataatctccataagaatggaatgttatacactgtgtctttaggattgaccttccataaaagatacatacttttttgagacgcacttaaatcatattgatacgattcatttgctttgggaatcacttcatagacatcattttgcagttcttcaatttgttgtccaagttgctctacagtaggcgatttcattaaatcacctactttaagacgtttttttaacctttcttcaatacggtttacaactaatgttgctctaagagagtgtccacctagttcaaagaaattatctttaacacctacctgatcaacatgtaaaatctcttcgaaaatacggcaaactgtgcgttcaatatcgttacgtggttctacataatttctattattctttagattaatttcaggtaatgcacgcacatctaatttcccattcatcgtgataggtatacgatccaccttcataaaatgcacaggtatcatatattcaggtaatgtttcacttaaaatatcttttaattgacctgttgattttaattgcgatgcttcataatatgccactatttgtttatcttggtcttgctctcgaacgatgactacagctttattaatatcacgtatagcttctaatgctttttcaatttctgataattctattctaaaaccgcgtattttaacttgcttatcgatacgactaatataatcaatatagccatcttcttgaagacgaactaaatcaccgcttcgataaagcatttcattgttaaaaggtgactgaataaaacgttcagcagtaagtttaggttgatttaaataaccttttgctaaacctgcaccaccaatgcacaattcacctggaacacctacgccacaaatacgattaccttgcatgacataaactgtcgttccactaataggtaaaccaataggtatacgtgaaggcatctcttgtggaatcgcaaaagttgtagtaaatgttgtattctctgtcggtccataaccattgattatttgaggatgacactcacgcgaatttaataagtgaacccatttagcatttaacacttccccaccaataagtaaataagttaaagattctagtgcttcgatacgttcgctagcaatttgattaaataaagatgacgttaaccacatcgtgttgactttattttcagtaatagcttgatctaacaattgaggatttaacaacgtatctttagatgtaatgactaaccgtccaccattcaataatggaccatatatttcaaaggttgctgcatcaaaagctactgttcctgataataagacggttgtattttcgttcaattcgacataatttggattgtgtactaagcgatcaattcctctatgtggcaccagtgtccctttaggtttaccagtcgttcctgatgtatagatgacataagcgatatcttctgaacaattaatgcctctcgggttatcaatatcatgttctcttgaatcaactatcaattctatatccatttgaggtaaacctgattgaaatgatgtacgatatgttacaaccgctttaggttttgcgtcctcaataatataattcattctttcttcaggataatccggatcaattggtatgtagcctgcaccagctttcaagatccctaacattccaataatcatttctaagctgcgttctgctattaatgccaccatatcattaggttcaatctgatgatttaaacgcaatctatatgctaaaagattcgcacattgatttaattgatgatatgtcatcgatcgttgttcatattgcaacgcaatactatcgggatgttggtgcacttgacgttcgaatctttcaaccacggttttataagtgacctcactataattaatgtcattgttttgaagattgatgtcattatatttagctaaatctgagcgatcactgagttttatatctttaattaataatgatggattttgtgtaatttgcatataaatcccattaattaatttgactaacgtatttacagttaattcatcataaacgttgtcattataaactatatcaaaaccaccctgcacatgaggataaaactctaaatccgcgaatgatgatgcttcattgtatagacgatgtatatgatgacatatatgattaagctcaaattgttcttgtactttttcaatatgaatcatcgtttctacatctatttgtactgctttaggttgaacaacaaaagacgcaccacacatttgaagctcttcaagtagcgcggaacactcatccaccatatcttttacggcgtcactttgactaatacttaaattaagtggggcaatgtctgtgtttaaaaccatcatattctcagtatttttattatctatcgaaaaatggatgcctaacgtcacatcagaagactgacttataaaatgatgcgctaagtaaatacttacaatccacgcatcaatgtctaaagatggtagttctgcatgcaaagaacacatttttttcttttcagatgtattctttacaggtatgtaagcgtaattatcaccgtctgcattcaatac

SEQ ID NO: 3431 - DNA, 3133 bp, Artificial Sequence
  Description of Artificial Sequence: synthetic nucleic acid sequence
aacattaagatactccccttgctcatttacacccaaactagtgataattggtattatgtcgcgtgataacattttttctaatagcatcgtgttgatttctttaactttaccaacgtaaccatagatatttttatttaaaaattcggcgcttacaagttcttttatcttttctttaaattgaaaaaattctaaattagattctttaagtctttctaaaagttgatggccaactatgttaattaaagcatcatatatgataggtaaatcatttttagcagttactctcatgccatcaattttaatagttgaatgattgtttttagttaataaattactgatgacttggccgccaccgtgaacaataattatttttttgttttcaaggtgccaagcattaatttgttgtataaatgcgtcgtttaaattttctatagctataccaccgagcttaattacgatgatgtttttcatatgttcctcctaagtggtgtatagtgcgttgattttaacgtagtcatacgataaatcacatccccatgcttgaccttcacaattcccttgatgaaggtcaagctgaattgatatttcttcagcactcattatttcttgaatttcttctttatcgtactttactggtgaggatcttattaatacaggtatcctacctataaaaatgtctacctgattaatatcaaaatatgttttagcataacctgcagcagcaataattctaccccaattaggatcttcgccaaaaattgcggtttttactaaacttgaacccaccacacttttagcaatcattcttgcagcactagattcttttgcacctttaaccgtgacttctattaatttagaagcaccttcgccatcccttgcaatactttttgctaaatcggtcataatatatagaagcatctgcttaaatttatagtagtcttcgctgtcttttttaatttcgttattatttgtacatccatttgacatcacaagcaccatatcatttgttgaagtgtcaccatctacagtgatttgattgaatgtaacttcaaccacatcttttaaagcctgttgtaatgtttgtgatgagatgttagcgtcacaggttataaatgctagcattgtagccaaattaggatgtatcattcctgacccttttgctacacctgccatcgttactgtatcgctaccaaattcttcgtttacaacgcatgtttttgtatgagtatccgttgttaatatcgcttttgcaaagtcatcagcattaccgtttttaactagtttggaaaagccattctttagaatagacattggcatcacctttccaataacaccagtagatgcgacaccaacatattctggttgaatttgtaatttatttgcggccagttgttgcattttaaaagcatctttttctccttgtttaccagtacaagaattagcaatacctgaattaacaacaatagcttgcattttaccacttttttcgatgctgttttttgttaattttaatggtgcagcaatgaccttattagttgtaaatacaccagctacatttgcaggtacttctgaaacaatccaaccaaagtctaattttttctttttaaagccagcgtgcagaccatcagctgaaaatccaagaggacttgcaatatttcccttaattatattcataatttagtccccctatattagatatataaaggcgccaaaattaaaccatcagtttcgtcgaaattaaacatcagattcatgttttgaattgcttgtccagcggcacctttaattaaattatcaataactgatgaaattgttaaaacacccgtggtttcgttataaacaaaaccaatatcagtgtaatttgttcctattacttcatttaactgtggtaatccatctttaattcttatgaaaggcttatttttatatacatccttgtaggtagattctatttgatttattttaactccgttttcaagccgtgtgtatatagttgcaacaattaattagaatctagtgattgattgtcagattgtaccttagcaagtgctttttcaatcttatcactaccttgtagtgaacgtgtaattgcttgtatatcttgtttttcatctgtgacatgttgatcttttgaatccctaatttgatcagtatctgatgctatacgttctaatgttgagcgacgaccatcattacttttatcgtctttactatcactatcggattgatttgttgtcgtactagattcttctttgttattttcgtttttattacgatggtgatgcttgctgatcgctttgttcagaaagcttattattagagtcagacttaaaatcttgttggattttatctaatttatcaataaccgactcttcagaatcatcagtagttgcattgcgtgtactagcatttgtatcgtgtactttattatttgaatcatctttttcatcggttgttgagtcactaggtttagaagcactattttcaccttgttgacggttatcaacatttttagcaattgaatctaaatccgacagtattttatctaagtctttagtcatatcatcattatctttttcagatgtatcgtcatcttcagtttttgatgatgtggcactagagtctgtcgattttaaatgattatttttatcttttgcatcatttataatacggtcaatacttgattgattatcgactttatctaaacgttcttcaaaacttttgatatctgcgtcagaaagttctttcaaatctttaatatcatctttagcttgttggattttgtcagcgatggagttactattagaagtattttcaacatttgatgatgtactttctgaatctgcaaaagcatcttttgtgaagccataaccaaccagcgaaccactaagtaacaacgcagaacatgacagcttgaggtagacaccaattttatctgttctcttcatttacacatactcctttaataaagttacctgtattattctttaaatagatttatatgatttaatcaaaaatatacatatcacattataatacataatttcatagatttgtagataatgaacctaaaataacaaatttaaaaaacaaatttcttgtaattattagtaatttggtattacacttcttt

SEQ ID NO: 3432 - DNA, 3063 bp, Artificial Sequence
  Description of Artificial Sequence: synthetic nucleic acid sequence
tggatgaacttgttgtcctttaataatatgacttgcttcaataagatcagataatcttgcattcgtgcatgaacctaaaaaaacataacctaattttatatcttcggctttttgacctgggtgaagtcccatatagtcataagcacgttggtcatttgcatttttaatttctgggaatggattactaaaactaactcccatttctgggttagttccccaagttacttgaggttctaaatttgttacatcaagttcaataactttatcaaaataggcatcatcatcagaataaagttctttccaccacgccatagaactatcaaaatcagtagcataaggacgaccttttacgtaattaaaggttgtttcatcaggttgcattaaaccatactttgctcctgcttcaatagccatattacaaatcgtcatacgtgcttccatggataaattttttatagtttctcctgtaaattcaagagcataaccagtaccgaaatctacaccatattgattgattaaatataaaataatgtctttagcataaactccagctggtaaagaaccatttatattaattttcaaatttttaggttttgtttgccataatgtttgtgtggcaaatacatgttcaacctcgcttgttcctatcccaaatgcgatagcaccaaatgcgccatgtgtagcagtatgtgaatctccacatacaatagtttttcctggttgagttaatccagtttctggtccaaccatatgcacaataccttgttcgtcagaacccatatcaaaaatatgtacaccaaagtccttagcattttgttgtaaagttgtaatttgtttattagcaatttcatcttttatattaaaaatatcaattgtgggaacgttatgatctaaagttgcaaaggttagatcaggtcttctgagtttacgattttgtattctaagtccttcaaacgcttgaggagaagtgacttcatgaatgagatgtaaatcaatgtataataattgtggttcaccttcttttccatgaagcacatgttttttccatactttatcaaacagtgtttgacccataattttctcctcctcttatagatatttttctttaagcaatttaaaaatttctgaagttcgatattgtccacctaaatctgcagttgtcttattagattgaataaacgagtaaacaattgactcaagttcgttagcagcatcattttgatttaaactttctcttaagcaaagtgctaaagatagaaccataccaaatggattcgctttatcttcattagctatatataaagaacaatgtgaactgacctgttaaaagtcgtgcaacaagtcctccacctaagttgtggatagcttttacatttccatcattggtagcattgatagttgtaccatatggagcgccatagtcaataccaaagtgagcaccaccattaaaactataaccaggagcaccaccattaggataataccccgtagtaattgggaatttagtgaacgaagaaccatctccaccgcctgcagagtctaaaccttcattaaagaagtctttaataccatttttaagtttcttaatcatagctgtcattaaatcaaatggtaatggtgcatttttcataaagtctaggttaaaaccaactttctcaaagactttatttaccaatttcataggatgacctacataatcaaaaacatctccaatacccttgataacagtgctagacacatctttagctttatcaagtgcttttgtacctatgtcttttgctttgtcaaacgtagtaccacctatgtctcttgctttaccaccaatgtcttttactttattaacatcattttttacaccagagctaataacatctaatataccgtctttctttttagtacctttactaaatttaggtagttttttcttcttagtgtcatatcctgaattagataaaatagcatgtgtttgcgcgccactatatacacttgagcctttaggtaagaatgttgttgtatctttgttaggtgttagtgccattcttccgttaggataacggatcatttcatttctaaagccaccaggtccattacctcgacctctatctcctacagtagccattgtacctttattgattttaccgttggtaatataactttgtgtatgcgtagattgagtacctgtagataatttaatcttaggtattttatccatacctaatttatctgcgacccagttaacacctttgattaatccattaaggccttttttaacgcctttaaccattccaccaaaaagattcccaattttaccggtaactgttttgataccgtctctcattttattcatggtgcccataactttcgatttcatgccatttactatagatacagtagtacttttaattccattccatttcttgctcatgaagccacctacagcattcatggtgttatgagtaccttttttaagtgatccccaagcacctttgacgcctgaccatagagctttcgctttattaacagtaccttttttaatactgttccatttagaactcatgaaactgccaactgctttaaatatgccaattgtaccttttttgagtgcattccatgtatttttaactccagaccataatgcttttgctttattcactactgatttttttatagccgtccagattttaactgcggcattctttacagcattaaatattacaacaatacctttttttaatgcgttaaatacagatagaacacctttgcgcaaagctcgaacgattcctaacacaccattttttaatgcagtccaaactttaatagagaaactcttaatagcattaaatatcgtaactactatgcgcttaataaggttgatattaaattttacttgcgcaacatatgctttaataaactaagtaaattagaagtacaagatcgaacacaagcagtaatatatgcgttccagcataatttaattcaataaattattaaaggcgaaagtaaagatacatctatcgatactttcgcctttcaatattatcagtcgcttgtgtgatgttcttc

SEQ ID NO: 3433 - DNA, 3835 bp, Artificial Sequence
  Description of Artificial Sequence: synthetic nucleic acid sequence
tttaattgttctacttctgacagctcttctaatcctttaccgtaggtatattgtttaccaacttgttgtgaaaatctataactttccccatttcgataccatcgccaccaagttttcacttgcgtcctatttctaatatttaattctttcataatttcttttgttgaaaatcctgctgctttcatttcaactgctttatactttgtttctactgaataagaagctcttttcatagaaaaaaacctccgtatgattcattttaatatgaattcaacgaaagtgtttttatataattcccacaaattggggtcagtctaataatgaatttcgtgattgtaggctttttattttatatattcattaatttctcttcttgacggatacgtacaattaaaaaataagcatatggaactaataagagtgttgtgtatgtagcatttgttagtagtaatacaccaattaattcgggaatgatatttaaaaaatagtttggatgtttcgttactttatataaccctgacttaataatagggtgattgggcagtataaataatttcaatgtccaaatacgacctaatgtcttaataactataaatagcatgatataagcgatgatcaatatgattaagccaatgccgttaagtagactaaatgtatccttacgaatgaatgcttctatagctgcactcatgtaaattaatacatgcgtaatggctagatattttgaatttttcacaccatattccaccgcgccctctacctttagctgttttgcgtgttgcatagatatctttaagctgatgagtcgaatacagaaaaagataaataaaatagttaaaatcatgatgtcctccattgtttgttatatatatattcttttgctcgtacaatacaaagtattttatatagaaaatgtttcaaatgccattaactatttattaactttagcaccaactcataactcttctaacacctcacatattaagttcagtttttcggataatttaatacttttaaggatattaagcgcttacattgatgtgatatattttttttaacgaagatgataggggtgttagggatgaacttttttgatattcataaaatgccaaacaaagggataccattagctgtacaacgcaaattatggctcagaaactttatgcaagcgttttttgtcgtattctttgtttacatggcgatgtatttaattcgaaacaattttaaagcggcacaaccgttattaaaagaagaaatcggattaacaacattagaactaggttatataggattagcgtttagtattacttacggtttaggaaaaacaatactcggttatttcgttgatgggcgtaatacgaaacgtattatttccttcttattaatattatctgcgattacagtacttattatgggatttgtattaagttatttcggttctgtgatggggctattaattgtattgtgggggcttaacggtatatttcaatctgtgggtgggcctgcaagttactcaacgatttcaaggtgggcgcctcgaacaaagcgcggtcgttatttaggcttttggaatacatcacataacattggtggtgctattgctggtggtgtcgcactttggggcgcgaatacatttttccacggtaatgtggttggaatgtttatttttccttccgtcatcgctttaatcattgggattgtgacattatttattggtaaagatgatccagaggaattaggttggaatcgtgccgaagaaatttgggaagagcctatcgaccaagaaaacattgattctcaaggtatgactaaatgggatatctttaaaaaatatatccttggaaatcctgtgatttggattttgtgtatctctaatgtttttgtatatatcgtgcgtattggtattgataactgggcaccgctatacgtatcagagcatttacattttaataaaggtgatgcggtgaatactattttttactttgaaataggtgcattagtagctagtttattgtggggctatatctcagatttattaaaaggtcgtcgtgcgattgtagcgattggatgtatgtttatgatcacctttgttgtactcttttataccaatgcaacaagcgtgacaatggtcaatatttctctatttgcattaggcgctttaatcttcggtccacagttactcattggtgtatctctgactggctttgttcctaaaaatgcaattagtgtcgctaacggtatgacaggttcatttgcatatctattcggggattcaatggctaaagtgggtctggctgcaatcgctgatccaacacgtaatggtttaaatatttttgggtatacgttgagtggttggacagatgtctttattgtattctatgtagctttattcttaggaatgatattattagccattgttgcttattacgaagaaaagaaaattagaaaattaaaaatttaagattaagtgaatttaaatatatactccctactataaattttatcattatggtagggagctttttcgtgattgatttgcactattttgattgcttattataatcacttggtgacatatgtaaatattttttaaaatgatagcaaaacattttatactcagaaaaacctactttttcagcaatttcataatgcttgtagtgctggtctaaaagatgtaatgattttaaaatacgataacgatttagataatcaactatcgtaatgcctacatgttctttaaacgtcctcatggcgtatgactcacttacatcaataggattaattaagtcaagaacagtcactttcttgtgataatgttgcttgatttgagacaaaatttgattgacataatagtcatcgtaatcaatttttaataatggttgaaaggcagtatgatatgccgcgtcatcattggtagaatgtgggcgttctaataacctttgaactaatatgtctagaatatgctctaactgagtgtggtctactggctttagtaaataatcaagaacatgatgttgtataccggctttcatatattcgaagtcgtcataactcgataaaatgataatctggcaatcaaggtctttgatgtcatctagtaggtcaacaccattttttcgaggcattcgtatatcagtaatgacgagttcaggttgatgttggcgaattaaagacaatgcttccacgccgtctttggcagtataaacagtggtgaaatgatagtcctcccatggaaccatttgctttaagccttctcttataatcctttcatcatcacaaataactactttaaacatctttattcctcctagacaagtggtatttggtaacacattaatgtcccttgctggcttcttgagaaaatgtgcagacgtgcatatgttccatattgaatcatggctctattatgtaaatgatttaaacctaggtgtgtcgtatcaaaaacatcgtgatgaagggattggcgcacgtgttctaaatgtgatggagacataccgatgccattatcatgaaccagaatatgtaatttgcgcttcgtaagtctgatacgaattgttatctttaaaggttcactatcacgaccatgcttgatggcattttctacgagtggttgaagcatcatcttaccaattgtttgatgttgtacaccctcagtagcatcgatgtaaagctgtatcatatcatcgaagcggatattttgtatggcaacatactgctcaatgtagcttaattcttctgctaatttgactgtgtgcgatgctgtgcgtagagaataacgtagcatttgtgatagttgttgtatgactgtttgtgctactttgggtgaaagaggaat

SEQ ID NO: 3434 - DNA, 4020 bp, Artificial Sequence
  Description of Artificial Sequence: synthetic nucleic acid sequence
gcgcggcaattgaacaaaagaaaaaaggtattgaaacattagtaattgaaaaaggtaatgttgttgaatcaatctataattatccaacacatcagacttttttctcatcaagtgataaattaagtatcggcgatattccttttattgttgaagatagtaagccaagacgtaatcaagcgcttgtatattatagggaagtcgttaaacatcatcaacttaacatacatccattcgaagaagttttaacagttaaaaaaataaacaataaatttgcaattacaactacaaaaggtgtatatgaatgtaaatatttaactgttgctacgggttattatggtcaacataacactttagaagcggaaggggcagaattaccaaaagtattccattactttaaagaagcacatccgtattttaatcaaaatgttgttattattggaggcaaaaactctgctgttgatgctgccttagaattagaaaaagctggtgctaatgtaactgttttatatcgtggcgaacagtaccctaaagcaattaaaccatggatattacccaatttcgaatcattagtcaatcacgaaaaaattacgatggaatttaatgcgacagtaaccaaaattaccgatcattcagtgacttatgaaaaagatggtcaacttatagaaattgataatgactacgtttttgctatgattggttatcatccagattacgatttcttaaaaacaataggtattgatatccataccaatgaatatggaactgctcctgtttataatcgagaaacattcgaaacaaacgtcgaaaattgttatatagctggtgttattgctgcgggtaatgatgcaaatactatttttatcgaaaatggtaaatatcatggtggtgtcattacacaaagcattttgacaaaaaaacaaacacctcttgaaacatagagcttacaaaaagcttgggatactaaacaatgtcccaagctttcttaatgtatagtcaatcaatgactcaattaaaatgcacatattaataataggtaatccttaattatagtataattgcactaaagaagtttcatagacaatgcatacaactaatagaaatcggagtgtgacaatgaacttgatacgaattttgtcccactctttttaattactcttcgaaatatcgctctaattgattttgagtcatgtcttgactcaaaccaactagtaattttagccttgcctttggtccatttaaaccgttcgaaaaaataacaccattatttttcaaatctgcgccaccaccttcataagcatatacaggactaacaataccattgaatgatctagatacgagaactagaggaatgtttttctttagacattgctgtagtccattaagacaactttttggaaggttaccttgtcctagtgcttcgatgactataccatcaacgtgttgttgtgaataaaatgatagtacatcatcttccatacccatgtatgcttttacaagtggaacacgtaaatttacatcgatatattggtaggtagtttgtctgtaaggatgatgataaaattgtactcgattcttggtaagtacacctagaggcccctgattaggactttgaaatgtattaatattcgaagtatgtgtctttgtcacattacgagcagtgtgaatctcatcattaaatacgaccataacacctttatgattagcctcagatgaagaagcaacccttatagcagaaataaaattatagagaccatcggaaccaatttcattggatgatctcattgctccagtaattactataggctcttgaatatcaattaataaatctattaaaaaagctgtttcctcaagtgtatctgttccatgagtaatgacaaatccatcatatatattttctttagaatatgtaatgatttcgtctcttaatcgcacaacattcgaaattgtcatatgcggcgagggtatatttaaaagattgatttcgtcaacctctgcatattgactaatgatattttgatgttgtgatattggattttcttcattcgttatcactttattagtttgatcttgtgacatacttattgtgccaccagtatgtatgataagtagacgtttcattacgaattcctcctatttattctttacttttttatgataaaataatatctataaaacaacaaggaaggttatcaaataatgagttcaattaatattgcactagatggcccagctgctgcaggtaagagtacaattgctaaacgtgtagccagtcgtctatcaatgatatatgttgatacaggagcaatgtatcgtgccattacatataaatatttacaaaatggcaaacccgaaaattttgattatctgattaataacactaaacttgagcttacttatgatgaagtaaaagggcaaagaatcttactagataatcaagacgtcactgattatttaagagaaaatgatgtaacacatcacgtatcttatgttgcatctaaagaaccagtgcgttcatttgcagtgaaaatacaaaaagaattagctgctaaaaaaggtatcgttatggatggccgagatattggtacagttgtattaccagatgccgaattaaaagtttatatgattgcatctgttgctgaacgtgctgaacgtcgacaaaaagagaatgagcaacgtggcattgaatcaaatttagaacaattaaaggaggaaattgaagcacgagatcattatgatatgaatcgtgaaatttcgccattacaaaaagccgaagatgctattacacttgatacaactggcaaatctatagaagaggtaacaaatgaaatattatctctactttaaatgttaaaattaaactttttatattgtttattgtaaacatttaagcggagtagaattaataatcaatgactcgaaaatattgaatatattagtattgatttatagaaaagccacggacgctctgtctctggcttttatttttgaccattgagaactatgtaaataaacttatttttaaccaagtcccctctatagagaagtaatactatgtttattaccaattttaatatatctttttcatttttattcctcatattattatgagcttagggttaattgccataaaatttatgttacaataaaaataacaatgttattaaatatactacaaactaaattgaccatcacttaactaggtgctctgttaaacttttgttataaattaaagatagaagcaacctattcatataaagtggtatctcttgacaattttactcgtttataagatgttataattatgtagtgtataaggaggcatacaagatgactgaagaattcaatgaatcaatgattaatgatattaaagaaggtgacaaagtcactgttgaagttcaacaagtagaggataaacaagttgttgtgcatattaatggtggcaaatttaatggaattattcctattagccagctttcaacacatcatatcgaaaaccctagtgaagttgtaaaagtcggtgatgaagtcgaagcatatgtcactaaaatcgagttcgacgaagaaaatgatactggggcatacattttatcaaaaagacaacttgaaactgaaaaatcttatgaatatttacaagaaaaactagataacgatgaagtgattgaagctgaagttactgaagtagttaaaggtggtttagtcgttgacgttggtcaaagagggtttgtacctgcttctctaatttcaactgatttcattgaagatttttctgtattcgatggtcaaacaatccgtattaaagtggaagaacttgatcctgaaaacaatagagtcattttaagccgtaaagctgtggaacagttagaaaacgacgctaaaaaagcttcaatattagattctttaaatgaaggcgatgttattgatggtaaagttgctcgattaactaactttggtgctttcattgatattggtggcgtagatggtttagttcacgtttctgaattatctcatgaacatgttcaa

SEQ ID NO: 3435 - DNA, 3088 bp, Artificial Sequence
  Description of Artificial Sequence: synthetic nucleic acid sequence
atctactattttctcaacatcttcttttgtatgaatgccactctctgaaatgtagcagcaattagactttttaaacttaagtaatttatttgtatgtagaacatcggtttcaaatcgttttaaatcacgattattaacaccaataattttagggttaatttggtgtgcacgttcaagttctctaattgtatgaacttctactagagcttctaaattatggtttgttgcatatgaatacaattcttttaattggtcatcacttaaaatatttactattaataaaataatagatgcaccagctcgttttgcaacatctatttgaattttatcaataataaaatctttacataaaactggtaacgatgttatctttgataactgatttaatcgttcaaaactaccgccaaagtatttttcatcagttaatattgaaatagcattagcaccatatttttgataatctttaacttgttgaacaagatcacgttgcggtaattgaggtacagatgggcttttcgattttatttcagcaataactgataatgttctatcatagttaagtgaatcaatcagctttctcctcttaacatttccgttatcttgtaaaatttcaagttttttatcatagtatttacgctcaagcaaagtttttttatactcaataatttcatttaaaatagtcattacttaacctcccatttttaaatattgtttcattgccatacctgtatcaatgagatatttcgctctctctacgccatgtttgatactttccacttgctcagcaacatataaagcaattccagcatttaacaaaactacatctcgtttacttgagtgatccgtgccacttaggatattcaatgcaatttgtttatttgtttgaggtgaaccacctatcaacgtgtcattatttgcataagctaaaccgacttcttctgcttttaaactatatttttttaatgctctttcgctgctaacttcataaatgatattttcaccagaaagcgtggcctcatccatcccatttgcaccatgaattaaaattgctcgttttctacctaaatcctttaatgtttgtgctatattttcaagttgtgaagcttcatatacccccatcacttgataagttaatttgaaaggattaattaatggtccaatcaagttaaaaattgtaggtgttgcaatcgattttctaattgattgaagctttttcatcattggataagaatcagttgcacttatgaatgctaatcctttcaaatttaattgttgctctacttcgttcattttgtttgtttttatattcatttcatgtaatacatctgtacttcctgaatgtgaagtaatacttttattaccgtgtttaatgactggcactcctgcacttgctacaacaaaagctacagttgtagaaatattaaagctatttgattgatctccacctgtgccacaaacacacatagctttattataaaatggttggtttggatagtttgtctggataaaatattcaactaaatacgttagctcatattgacccatgtctttatttgtataagctttcaataattcaacctttacattggtttctatatttgaatcaaacagtgtaacaataaatgattgcatatcttttttagataaagatttattttgtttaattttctcaagaagggtcattttcaacttcctctcgttgctatatttataaaattaataatgatttgtttcccattttctgtagcgaatgactctggatgaaactgtatgccataatgttttctgtttttgtgttggaaagattgtatactatcatatgtttggccagtgattaataaactttctggaaatgagcatggatcactaattaatgaatgataacgcataactttgaaacttgacttaattcctttgtatagtggtgactgattaacaatagttaaagtatctacttttccatgtttgacacaactaccttgtataacatcgccaccgtaataacaagtgagcgcttgtgcacctaagcaaacacctaaaataggtaaattttcgaaattttcaattaatttaattaataattgattgtctaatggatgtccaggtcctggtgaaataataactgctgtaatacctttcagattacatatatctgtatcatcgggatatttaacaatcgtttcacattgtttttctacaatatctacaagattgtaggtaaaagaatcatagttatctattattaatatcatggagttacctccaataaacttttagctttaagttttgtttcttcaagttctttctctggaatagaatcatatactactccacatcctgcctcgacactgactttttcctcatcgataatcatggtacgtatagccaatgcaaaatctaaatgatgattacagttgatatacccaacaccaccgctatagatacctcttttataaggataagattcgtatattctctgtatagctctaagtttaggtgcacctgagacagtacccgttggtagcaaacttgcgatgacgctcataggagatagatggggttttaattctccaataacttcactaacgatatgcatgacatgttcataacgttctattgtcattagtttggtaatttgtgaagtgcctgttttacttattcgatgaatatcatttcttcctaaatctacgagcatacgatgttcactcaattccttttcatctttcattaatgtcttttcattattttcatcttcttttttattttgacctcttttaattgttccagctataggattcgtataaacttttccatcttttacctttacaaaactttcaggagaacttcctattacaatcggtacatctttattaatataatacatatatggactaggattttgtcgctttaaattttgatataactgaaaagttaattgatgtaaattgtgttgaaaatggtgtttataactataaattcttgaaggaactacttgaaacatatctccttcagtaattttcttttttaaaattctaatagtttgaacaaattgttgctctgatatattggtggttatatgtcgagggat

SEQ ID NO: 3436 - DNA, 3381 bp, Artificial Sequence
  Description of Artificial Sequence: synthetic nucleic acid sequence
acaattatatttgatataagtatggttgtaattgaaaataaaaaataggacagaattcatgttgaatcgactgtcccactcttgtgaatgatattacttttagtgattctttgacatagctatcttattagacaatattaagtttattgacaattatcatcaaaagcatcttttaaatccatagctatatcattgatgtcgcgcccttcaatatgttcgcgaggtataaaatgaactaaatgttgacctttaaataatgcgtatgagggacttgaaggaacttgttggatgtaatctctcattgtttgtgttgcttctttatcttgaccagcaaatacagttactttatgatctggtttcacttcattttgctctgcaactgcaacagctgctggacgtgctaatcctgcagcgcaaccgcatgttgagttgattacaacaaatgttgtatcatcattatctatattttgcatatactgattgacgtcatcactcgtttcaagacttgtgaatccattgtctgttaattcagctctcatttgttgtgcaagttctttcatataagcttcgtatccattcatcataaaatgctcctctactaataattgtttctaattgtactatatagaaaattaattgcttttagcgaacgtgttttctatttgtggtaataattcattccagttagcgttatcttctttatcaattgatataaaatccaaaacatagaatattgatttaacaccttctatttcaaataatcgattaataaattcaggttgaccttcttgagcggcagtatatgttgtagatgagttatcttgacgtggttcactcaacgaaactttcattgtattatgattaggtgtttctgaaattcctataatctccatgtgacatcctcctattgtaactcattaccaatttgtttaatttgtttaccgaccgtacattcatttatacaaaaatgatgtgcttgtgttttaccgtgagtttttctattgtgcttttttaatggacattggtgacaataagtattcatcaattggtcgatgtgttgaattgcttgttgttctgtattagtgagtatagctttcacttcccttagctatagactatttatatttatacccatttcacatgtttgtattatagcatttataagttgggaatttgaaataatcaattttagttttgagaaaactgataacttagacatttgtttaagttattatttatttactcttcttttttagcattgcattaaagatgaattttaagtaaaatagtatagttaattttggcggtttctaaacacccgctttaacaaaatttaggaggaaagttatatgtataatgaaatatttggtattgcgtcatttattgttacattcgctttaatggtactgatgtatcgctgttttggtaaacaaggactaattgcttgggtagcaataggaacgattatcgctaatatacaggtcataaaagcggttcatatttttggtattacggctacacttggaaatgtcatgtttgcttctatatatttagctactgatatattaaatgacatctatggtcgtaaagttgctaaaagagcggtgtggcttggtttctcttctaccttagtaatgattatagtcatgcaaatgtcattgcattttattcctgccccagtagacaatgcgcaaaactcattaaaaatgatttttgatttagtgcctagaattgctataggttccattattgcttatatcataggccaacatattgatgtatttatattcagtatgattaaaaagatatttagctctgataagaccttttttattagagcatatggtagtaccattttaagttctatcattgataccggtttatttgtttcaattgcttttattggtactatgcctggtactgctgtttttgaaatatttattaccacttacttgttaaaactagtgtcaactatttttaatgtaccatttggatatatcgctaagtcactatatcgaaaaggaaagatagaacaactagataatgggtattgatatttattgtatcagaaatatagatatacaaaagcgaatcagagttccatgtgctgaactagcttcgaaattcaatttggtttgtccgtagaattttcgagcaaaattctcaatgataggacctacgaccaaagttaaataaatcttaatataagggctaaatttagacatcaatgccctatttgttagcagaacctgaagtatatatgttatcttaggttctgtttgtttttgatttaatttttagtgttttgtctttttagtttgatacaatagaatagatacattttagtgagtagacaattctgaagaggagtaaaagtaatggctaaaatacattttgatgctgcgactaaaggaaatcccggccgaagtgcttgtgcgattattattaaagaaaattcacaaagatatacatttacccatgatttaggtgaaatggataatcatagtgcagaatgggcagcaatgttacacgctttggaacatgcacgcgaattaaaagtatctaacgcgttactttttactgattcaaaattaattgaagatagtatgatgcaaggtaaagttaaaaatgctaagtttaaagtttattttgaaaacatagaaatcttagagcaaagttttgatttgatgtttgtgagatggattccacgaaagcaaaataaagaagcgaatcaacttgctcaacaaacactatacaaacttacatcataataatctaaagtgttaatatgatatgttacgtatttaattgtttgttcaaccttaccaataagatttcggctttgaaaagcttattataatatgtttgtactgaattatcgatggttaacaaaaaacaagcctgggacattaagtcccgggcttgttctgtgttaaagatatattttactttttagaacgctttttggtttttacaacttttttagttgattgaggcgttttcttctttttagaagtaactttcttctgttttgtatctttgttatcactgttttgtttacgtttaacgacggggattgaatgaatatctccttcactcaattgcttttctttagatttcttatgtttagcaactggaattgaatgtttgtcatcgttttgaatttgttcttctttatctattttacgcttagttattacaattggatctattttatcagtatctgaaagacgaatgtctttgtgataattttttatcgattgtttttcttcttcttttttacgtcttttagccaaaactaaccagaaactagaaagtaaaccagttaatgtaataacacctacagttttgccgaaattatcaactaaatgtttgaatagg

SEQ ID NO: 3437 - DNA, 3734 bp, Artificial Sequence
  Description of Artificial Sequence: synthetic nucleic acid sequence
cttcagcagcaaagttagcttcacctgaaattccatgtctttcatgttgaactctaagcaacataacaatatctactttatcaatgacttcatcaatttcaacataaggcgcctctaatgtattatctacccattcttttggacttgagaacattacgttggcacctaatgatgttaaactatgataattacttcttgcgacacgagaatttttaatgtccccacatattagaatattcaaaccttcaaacgaaccatattcttcatatattgtcattatgtctaataaactctgagtaggatgttgtccacttccatcacctgcattagcaattggaatatttaattgatccagttcttcgtaataagaattttgggagtgacgtatgacaagtaaatcaacacctatactttcaagtgttttacatgtgtcataaagtgactcacccttttttacagatgatgtacttgtttcaaaattaataagttttaatcctaatttttgttctgccatctcaaagctacactttgttcgcgttgaattttcgaagaataagtttgatacgtattgaccgttaaattgaggtaatggtcgctcaccagatttgaattggcaagcgatagtaattaaatcataaatttctgaattagataaatgctccattgataataagtgttccataaagcgcctcctatagaaataaagcttaatttatttggtttttatcttttggcaaaattaaatttaatattattcctgaaagtgctgataatgccattccttcaatttgtaaattgatacctatgccttttaaattgataagaagattaccaatcccgacaacaagcacaactgatgctataaccaagttgcgattgcttgcgaaatctacttgactttcaacaagcattcttaaaccactagctgctataataccgaataataaaattgagacaccacccatcactggcgtaggtattgaagatattaaagcagtgaacttaccaataaatgcaagaatgatagctataactgccgcaccaccaataacgtaaatactatatattttggtgatcgctagtacacctatattttcaccataagttgtactaggaggacctcctatcatacttgcaaacatagttgaaacaccatcaccaatgattgatttatctaaacctggattttcaaagaaattgcgtcctactattttattaattaccatttgatgaccaatatgttcacttaccgtcacaaacaccacgggtatcatcacgagaatgagtcctaaatgaaaagatggtgtgtaatctttaaatggtagataaatatgaggaaaatctatccatttcgcttgtgctattggagcaaatttaactatgcccatgaaaatggatacaatatatcccactataatacctataagtacaggtattagtgataaaaatcctttgaagaatccttggacgatgatggttactgctaatgtaatcaaagcaacaattaagtaacttaagttataccctttcatttcagcagaattttcgaacatggccatgtttactgctgtaggagctaaacttaacccaatgaccattattactggtccgacaactactggtggtaacaagtgcattaaccaatgtgttccactcaatttaatgaaaatacctataatcacgtacattaatccactcataaataatgcaaccagcatatctccaagactatgtgtacttaaccctgtaatgataggtgtaataaaggcaaaactcgatcctaggtaggcaggaattttcgcttttgtgattaatatgtataaaagtgtaccaatacctgatgccaacaaagctgctgatataggcagatgtgttaaaaatggtacaagtacagttgatccaaacattgcaaataaatgttgaagactcagaaatgcccattgtgctggttttggtttatcttttacatcaagaactggctgaacggtacgctcaaacatttgctcattttccatgttgattcatttcctttcataaaaaaagtctctttacaatcagtagaatgtaaagagactaaaatgaaatatatctaagtgtaatgttaagttaaacttttatcatcacatttatcaatgaagcttctattggatatttatagtttacataatctttttatagtcatatgtagatttatccataagaaacacttcacctttttcagtctctcgtactgttttaaaaggataattattcaatgacgactgcatttctatcgtcaatttcttctaaataaactgaaacagattcatctcgtgctgtaggtatattttttcctacaaaatctgcgcgtatagggagttcacgatgaccacgatccacaagtgctgcaagccctattttaataggtcttgtatgtaataaaatcgcatctaatgaggctcttactgtacgtccggtatacaaaacatcgtcaatgataacaaccactttgttattaatatctacattaatatcaaaagcgtattgatcagcttgttgcactaccttatcaacgtcatctcgaaaatgcgtgatatcgatagtacctgttggtactaattgttgttcaattgaatttattttatcttgtatacgatgtgctaaaaaagcacctcttgttttaatgcctaatagaactaaatctttagttcccttgttatattctagaatttcatgagcaattcgtgtaattgtacgttgtatcgctgcctcatctaaaataattcgttcagacattgtttcacctcttttaatataaaaaaactcatatctttaataaagatatgagacaaaaagttaaagagaataatctatattctctattatattcacattcttaagttataaacacagcaaaagtattagtaacttaatcatcaaaatattattatcctaattattcatatcttcggagcctctctggaccctcaattaaagatgacgtttttatatttaaactgttattagtttaaaacttttaatagtataagtcaatggcaaagttagtatttataattaaaaatcgatgcctcattcgtttatgcatctctacgtcttatatcatctagtaacttttcaaaatcgttaggtaatgttgcatgcttctcaatgtattcatgtgttacaggatgttcgaaaccaattataccagcatgtaaagcttgtccatcgatatctaacgtttttttaggtccatacttcggatcccctacaagaggataaccaatatatttcatatgtacacgaatttgatgtgtacgccctgtttctaattgacattctatcaatgtataatctttaaaatgctctaatacattaaagtgtgtcacagcttctttaccgtcatcaaccacagccatcgattgtctatcgtttttatttcgaccaattggtgcgtcaatagtgccataatcatgagggatattaccatgaactaacgccgtgtattttcgtttaacagttttagacataagttgttcaactaaatgacgatgagcaacatcatttttagcaaccattaataaaccagacgtatctttatctattctatgaactatgccgggacgtatttcgccattgattcctgataaatctttaatttgatacattaatccatttactaatgttccactataatggcctggagatggatgtacaaccataccttttggtttatactttagagcacagtggcg

SEQ ID NO: 3438 - DNA, 3410 bp, Artificial Sequence
  Description of Artificial Sequence: synthetic nucleic acid sequence
ctgtaattatgagtgaacgactagttaaagatgatgtatatacatctattcatattgaagagtatgagtcagaagctcgtgatacgaaattaggacctgaggaaatcacacgtgatattccaaacgtatctgaaagtgcacttaagaacttagatgatcgtggtatcgtttatgttggtgcagaagttaaagatggtgacatcttagtaggtaaagtaacgcctaaaggtgtaactgaattaacagctgaagagagattattacacgctatctttggtgaaaaagcacgtgaagttcgtgatacatcattacgtgtacctcatggtgctggcggtatcgttttagatgttaaagtctttaatcgtgaagaaggagacgacactctatctcctggagttaaccaattagtacgtgtatatattgtccaaaaacgtaaaatacatgttggggacaaaatgtgtggtcgtcacggtaacaaaggtgttatttctaagattgttccagaagaagatatgccttatttaccagatggtcgaccaatcgatattatgttaaacccattaggtgtaccatcacgtatgaacattggacaagtattagaattacatttaggtatggcagctaaaaacttaggaattcacgttgcttccccagtgtttgatggtgccaacgatgatgacgtttggtcaactatcgaagaagctggaatggcgcgtgacggtaaaactgttctatacgatggacgaactggtgaaccattcgataatcgtatttcagttggtgtcatgtacatgcttaaacttgcacacatggtagatgataagttacatgcacgttctactggaccatactcacttgttacacaacaaccattaggtggtaaagcacaattcggtggtcaacgtttcggtgagatggaggtatgggcacttgaagcttatggtgctgcttatactttacaagaaatcttaacttataaatctgatgatactgtaggtcgtgttaaaacttacgagtctatagttaaaggtgagaacatttctagacctagtgttccagaatcattccgagtattgatgaaagaactacaaagtttaggtctagatgttaaagtgatggatgagcatgataatgaaatcgaaatggctgatgttgatgacgaagatgcagcagaacgcaaagtagtaaaatatactggattaaataacataatttgatgaatcaaaccacttacgccgtgattttttggcacccataaaattggagacatataaaacaatattctcattaatgcttgcataatcatctgcgtatctctaattaaaatccccaaagtggatgttaaaagtgccaccgacgatgttagcaaatatgcaaaaggtacatatataagtaattgtacaatgtgaattgaagggataattccattgaacatacaagctattataataattgctaataatcctaaatgaccatagaacctacttgttacaatataagtaggaatgattgagagtgggaaattcatctttgccacttgattgaatttctgtgagattgatttagttccttctaggacaccttgattaataaagaaccacatacttataccaactaacaaccaaaatacaaacggaatgccgtgtataggtgcattgcttctaattcctaaaccaaaaacaagccaatacaccatgatttgtaaagcaggattcaacacttcccatgcaatacctagatagttattatgattggtaattttaatttggaattgtgctagtctttgaattaaatagaagtttttaatatgttcttttaaaaccgttccaactgcgaacattaaacttaaccacgctttctcctataatagattatctatctattgtaaatcattaatagtttctctttaatttgattcattgagtccattcttaaataataacatttaactgtttatcataagctcattatattatacaatcaattcagttaaaaattgttagaaatttcgtgtaagatttaattttagaaaatgaatcactttcttaactcactgtgttatatttattttcaacaaaatcttctattcactttacactaggttaataaatttaacaactgatgtgttgtatattataatctatataaatgtttataaggaaggtacaaaaatgagcgtttcggtaaatattgaaaatttaacaaaagaataccgtatctatagaaataataaagatagaattaaagatgcattaatacctaaaaacaaaaataaaacattttacgctctggataacgtaagtttaacagcgcatgagggagatgtgataggtttagtcggcatcaacggttcaggtaagtctactttaagtaatatgattggtggctctatttcaccaagttccggtgaaataacgagacatggtgatgtgagtgtcatcgctattaatgcaggactaaatggacaattgacaggtgtagaaaatattgaatttaaaatgctctgcatgggctttaaaaggaaagaaattaaaaaattaatgccggaaattatagaatttagtgaactcggcgaatttatttatcaacctgttaaaaaatattcaagtggtatgcgtgcaaaacttggattttcaattaatattactgttaatcctgacatattagttattgacgaagcattatcagtaggcgatcaaacatttactcaaaaatgtttagataaaatttatgaatttaaagcggctaaaaaaacaatattttttgttagtcataatattagacaagtgcgtgaattttgtacaaaaatcgcttggattgagggcggtaaactaaaagaattcggcgaacttgaagaagtattacctgattatgaggcgtttcttaaaacttttaagaaaaaatctaaagcagaacaaaaggaatttagaaataaattagatgagtcacgttttgtcgtaaaataaatttgaagaaagtaaaacttaaacattaagggagtgcaataaaattcatccgaattgattgcctcccttttttactcttattttgatttcattttatatttttgtattgctacctttaacataaatttaggaatacttatcattctcccaatgcgtttccaatcaataagcacacgatatacccactcaatatttaactttctaaatatttgaggtgctcttttctttgagccactgaatacttcaaacgacccacctacgcccatcatcacagtgtgcttaaacttgtccttatgcttttgaatccattgttcttgctttggaaatcccattcctacaaaaatgtaatcgggattaaaacttgttatacgttttatgactgtttcatcttctagatgaatatagccatgatgatgtgcaaagtggatattagggtattgagat

SEQ ID NO: 3439 - DNA, 3690 bp, Artificial Sequence
  Description of Artificial Sequence: synthetic nucleic acid sequence
agcagaagtagctgaaaacaacattgtgaaggaaaacccagatgtagaaatctttgaagaaggtattattgattcatttcaaactgtaggtttacttttagaaattcaaaataaattggatattgaagtgtcaattatggactttgatagagatgagtgggcaactcctaataaaattgtagaagctttagaagagttacgatgaaactgaaaccattcttacccattataatcagtggcgtcatatttattatatttttatttttaccagcaagttggtttactggtcttgtgacaaataagacgttagctgataatagaatttctttaactgatcaagttttaaaaggcacgctcattcaaaataaattattcgagtcaaataagtattacccgatttatggttcaagtgaactggaaaaggatgatccttttaatccaggtatagcgctaaataaacaaaatgctagtaaagaaacgttccttattggtgcgggaggttcgacagatttaattaatgcagttgaacttgcagcgcaatacgacaatttaaaaggaaagaaatttacatttattatttctccacagtggtttacgaatcatggattaacaaatcaaaactttgatgctcgtatgtcacaaagtcaaatcaatcagatgtttaatcaaaaagatatgccagctaatttgaagaaacggtatgcacaaagattgttacagtttccgcatgcacacaataagtcataccttagagaacaagcaaaacatcctaatgatgtctctggaaactacatttcttcatttaaagaaaatcaattaactaagattgaagctattaaatcattattctcattcactaagccacctctagcagaagtaaaacctgcaacaagagaagatgcttcatgggatgagatgaaacataaagctgccgatataggcaaagcaaatactcaatctaataaatatgatataagagatccatattggaaattgataaaacaaaacaagcgtaaaatcaaaagggattatgagttcaacattaactcacccgagttccaagatttaaaattattagtgcaaacgctacatgctgctggagctgatgtacaatatgtttgtataccttcaaatggaagatggtatgatcatataggtatcaaaaaagatagacgtgaagctgtatataaaaagattcactcaactgtagttgataatggtgggaaaatttatgatttgacaaataaggactatgaaaagtacgtaattagtgatgctgttcatattggatggaaaggttgggtttacgtcgaccagcaaattgcaagacatatggatggtcatgcgcctaaaaatcatgaagtcgattattctaaaaataaaccaccgcacaaacatcacaacgatcgtcaagatgatcaacatcaaggcaacaaataatattattaaccgaaataaaattaagtgagctaggtacagaattcgttatttcatcccgtgtaacgagatttataaaggaaatacctcgacgtaatgtatttttcgtttacttctttgatagccagtatataaaatgcttaggaacaatgttttgtatcctaagcattttattgttttatttagcatcatagagttaatattagtgcgctatgacttcatttattaatttctatcaaattaaaaaacctaggacgtcactatctatcctaggttaataaataattatatagggatgtattagaatacttgttctacttctattacacctggaacttcttcatgaagtgcacgctcgatgccagcttttaaggtaattgtagaactaggacatgttccgcaagcgccatgtaattgtagcttaacaataccatcttcaacatctacaagcgtacaatcgccaccatctcgtaataagaatggacgcaaacgttctataacttctgctacttgatcaaacattgttggattctcagtaggcatgtgacatgtctcctttcagagcaattatttcataatcattattattacattataatagataaagtagtaaaaatctataaaacaagataggggattttaatgactaaaattagtgttgtcgtatatggagcagaagtcgtttgtgcgagttgtgtaaatgcacctacatctatagatacttatcaatggcttcaagcattacttttaagaaagtttcctcaacatcattttgaatttacatatattgacatacgaaatgatactgaaaatttaactgatcatgatatgcaatttatagaaagaattaatgaagatgaattgttttacccattagttacgatgaatgatgaatatgtagcagatggttacatacaatataaacaaataacccgttttattaaatcatattttactatgtaagattaaaagagggggcaatattcatactaacgatgtgcctcaattgacagtgtctgtgttattttttagtgaaaatcttcatttttaggctatatcttttattgagaagaaggacatttcaatgctgtcatagtttgtgattattaattaagcacctagggaaatgtaaatgccctaggtgctttatttattaaccattatgatatttatagcgccacagaacacctgattttagaatagaggctaatcgtccggtaactgttcgatccatgatataagcaaaaccttgtttgtcacctaaagagcctaaaaagccttgtactttaatttcaggcattttatctggaagtggttcgttattccattgcttcttcaacacctcagcaatctgttcaccttgtagttctgctagttgagcactgggtgcatgtggtaaattagcacagtcacctacgacataaacatttctataggttgggacttgatggtactgattaataattacgcgtccagtggtactcatatcaataggaagattacgcacaatttcaacaggttgtatgcctgctgtccaaacgactaaatcaatattttctggtttaccattattataaatttttccgggttctactctgtcgatgactgaattaggtactacagtaacattgtgtttagaaaaccaattagatatgtatttactcagtttctctggaaaattccttaaaattcgaggccctctatcatataacaaaatttccaagtctgatcgactttcacgtagctcgctcgctaattcaatgccacttaaacctgccccaacgatacctacacgtgcccctttaggtaactcgctaattctatggtatgtttcacgcgatttagataatgtttgaatgctatgtgtatatgcttcagcaccagggacattatgatatttatcctcacaccctagaccaatgataagttcgtcataatctatttttgaatttccaactgttatcatttgttcgtccaaatctatatcactgatttccccataaaccgtattaatttgactgctatctggaaattggattcgcacctctttgtcagatttagttcctgctgcaagtgcataaaattcaggttttaaaccgtggaatggcatgcggtcgattaaagttaagtgatatccctcaggaattgaatgaggtaaaatgcgcgacataattcgcatattaccatagcccccgcctagtaatactaagtttttcattgattctttagagcacagtggcgatgatatcagat

SEQ ID NO: 3440 - DNA, 2856 bp, Artificial Sequence
  Description of Artificial Sequence: synthetic nucleic acid sequence
attcaaccactttacgaatatatataataataacgtttgcattaccatattaactatctgagtgataggaaatcttaaaaacttttctattgtaggttttactttatatacaaaataacaatttaaataatatgaaataataaaacttacaataaatccaacaatgtgactaaccatataattcacatgtaacacctttaacaaaaataagtatgttatatagtagttaaaggtattaattccaccaactatgataaactttataatctcataatgtattcgggttaacttcataatatttcccctttgaacagttattgttttgtaccatatgggactactttaaatgtgatgtctttgggcaaatcataatagtgtttgaaatcttgaagttgttccttcgactttggtgtagtcatatgagtatatcgctcaaatggtaatctttccaatgttattttctgatagcgatgatgttgtgttatttgttctttaatgaagtctattctgtgcacactactaatatgtataaaagtaaatccaatcatcataatgatgctgatgataatcgcaaatattttaattatatgttcaagttgtttaaatagcacatcacattgctgaattaaacaaagtaatatcacgatccataaagtataaataaaataaaaatttctataacttataggcgtcacaaataaaagtggcaaaacagatgaagccatagctataaaactccccatcacaatcattcttatgtatctttgctgtatcattttaaacacaacgtatatcacacttatcatgtaaatgaagcaaatcgttgtattcaaaacggctatagaaaatgaagctttatataattcaaaatgaaattgattgtaaacgaagatcttataaataggtaaagtaattaaacctaagagtagtggtattttaatataaactctcatatgcttcaggcttttattttgcttaagtaaaactatacttactattgatatcacggtaagaataatcatttgattaataaacatatattctggtacaagcttaaataacgtcacacctgctttatgtatcattccatgactatcggaaattgaataatgcgtatttaatccatccttaattaaaaaataattgaagtttaaaaacattataatgttacctatacaactaagcataaatcctacaattaagaaataactgagtctttttttaacaaagaaatagactaccattcctattaaaataattaagctattagcgatggaaagattctccaagaagaattgtccaaacaaacttactaataaaaatacccataattgcatttcagaaactgtatcgtgcgactcaatctttttaactaccgtaaaaagaataaaaagtgataggactgtagcaggtatataactaaaaaatccagtaaaccacccgtaagtttcgctataaattgtattaggtacagtaaccattaacacaaaactcaaaataaaataaatacgattcgtatgtaattgaaccatataagcaactaaatagataactaaaaacgaagttatcgcatatattaaagctcttattatgttattatgtacggcaacccattcaaataaatgtcctaaataacgaccattttcttgagtcaaatattgacttagattaactttatatgcatgccaatccgtagttgataatggtgttagaattgccattataagataaaagataaaaattcctattaaccaaaaaaatgattcatattgttttaagttattcattgttgacctctctgttcttcatgatgtaattcaaaactaacatttaaacgattatcatgtttattctcttttttatgtgatttattcaattatctactgaaaatatatagacatttattgaagctttaatcatattaatatatacatattgctcatcgtcaattttatattcttattattatacaattcacgtatgatttccattttaattatcaagatttctttagtttaatttcatttttggatagaataaatataaaccaattgtttaggaagtgatataaatgtcaccatataaagttatcattgcacctgattcttttaaagaaagtatgtcggcgaaggaagctgctttagctattaaagatggattccaagaggtgttcgattccagtacaatatatgacattattcctatgttgaaataagtcatcgtattcatgaacgccctgaattaggcaatgaagaaatttttgcatcgagaacattaattgaccaattaagagcaaatcgattcgaaatcgaaacggatattgcaggacatgcaacaggatttatagcaacgtatgattctgatatgactggaccggttataggatttctagctgaatatgatgctttacctggtcttggtcacgcatgcgggcataatattattggtactgctagcgtacttgctgcagtagcactaaaagaagtcgtcgatgaaattggtggtaaagtagtcgttttgggatgtcctgctgaagaaggtggggaaaatggctccgcaaaagcttcttatgttaaagcaggtgtcattgatgaaattgatgtagcattgatgattcatcctggaaatgaaacttatcgtacaattaatactttagctgtggatgttctagatattaaattctatggacgtagtgcgcatgcatctgaaaatgcagatgaagcattaaacgctttagatgcaatgatttcatatattaatggtatagcacagttaaggcaacacattaaaaaaggacaacgagttcacggggttattttagacggtggtaaagcggctaatattatacctgatttt

SEQ ID NO: 3441 - DNA, 3153 bp, Artificial Sequence
  Description of Artificial Sequence: synthetic nucleic acid sequence
gtataagtagctaatttttcatcgtataaagtgtaaggagattgtctgccattgacaatagcgttccctttaaataatttaattctcacatctccctcaacatattgttgagtactatcgataaagagttttaaactatctgttaatggcgagaaccacaaaccattgtatatttgttctgaaaattgtttttcaatgacaggcttaaagtgcgctacgtctttagttaatgtaattgtttctagtgctttgtgtgcttttaaaataacttccgcaccaggtgtttcataaatctctctcgattttatcccgaccattctgttttcaacatgatcgattctaccaataccgtgtttgccagcaagttgattcaagtaaagaataaggtcatctaattgataatctttgccatcaacttgtactggaataccttgtttaaatgtaaggataatttcgtctgcattgtctggagtttcttctaaaggtgtagttaaatcaaatgcatcttccggaggtgcggcatacggatcttctaaaataccacattcattagctctcccccataagttttggtcaattgagtatggcgagtcataattgattgaaacaggaatattatgtttgattgcgtaatcaatttcttcttctctgctccaagcccattcacgaacaggtgcaaatgcttttaacttaggatttaaagctttgattgccacttcgaaacgtacttgatcattacctttaccagtacatccatgcgcaataccaatagaatttgttttttcagcaatttcaaccagttttttcgcgatgagtggacgtgataatgctgaaactagaggatatgcattttcatacattaaatttcctttaatagcataacttacataatcatcactaaattctttagttgcatcaataatatgacattcgactgcacccatatctaaagctttttgatatacaacgtctaaatctttgccttcgcctacgtcaagacaacaagcaactacatcatatcctttatcaataagccattgaactgcaacgcttgtatctaaaccacctgaatatgctaaaacgattttatctttcatatttacacctcaaataattttttatgattattaatatgcatctatcatatcagattgataatgaaaataaaaccattattttacataaatattcatttttaaatctgattatatttagatatttttgtttgaaatactgttataaaagcttttatatatattttaaaatttctgtaaattgtatatctaaagtggtggtgtgacctttgatattaaaaataacttttttatgaatgaaaggttacataaaaaataattttcctgtgataagttagccttgagaattgaatagcgcatctaaacttagtagaattagtataagtacttataacaggaggcaataagatgactcacattcaattagactatggcaaaactttagaattttttgataagcatgaactagatcagcaaaaggatattgttaaaactatccatcaaactattcataaaggtacaggagcaggtaatgactttttaggttggttagatttacctgttgattatgataaagaagaattttctagaatcgtcgaagcatctaaacgtatcaaatcaaattccgatgtacttgttgttatcggtattggaggttcatacttaggtgcacgtgctgcaatcgagatgcttacatcttcatttagaacaaatacggaataccctgaaattgtatttgtaggtaatcatttatcctcaagttatacaaaagaattacttgattatttacaaggaaaagatttttcagttaacgttatttcaaaatcaggtactacgacagaaccagcagttgcatttagattatttaaacaattggttgaagaaaaatatggaaaagatgaagctaagaaacgtatttttgcaacgacagataaatctaaaggtgcacttaaacaattagcagacaatgagggttatgagacgtttgttgtacctgatgatgtgggaggtcgttattctgttcttacagctgtaggattactaccaattgcaactgcaggtatcaatattgaatcaatcatgattggtgcggctaaggcacgtgaagagttatcttctgatgatttagatcaaaatatcgcatatcaatatgcaactattcgaaatattttatacagcaaaggttatactactgaaatgttaattaattacgaaccctctatgcagtatttcaacgaatggtggaaacaattatacggtgaatcagaagggaaagatttcaaaggtatttatccatcaagtgcgaattacacaactgatttacattccttaggacaatatgttcaagagggccgtcgtttcttattcgagacagtggttaaggtcaaccatccaaaacatgatatcaaaattgaagaggatgcagatgatttagacggactgaactatcttgctggcaaatcaatcgatgaagtgaatactaaagcatttgaaggtacattacttgcacataccgatggtggcgttccaaatatcgttgtaaatattcctcagttagatgaagaaacatttggatatgttgtttatttctttgaattagcttgtgcaatgagtggatatcaattaggtgttaatccatttaatcaacctggagttgaagcctataaacaaaatatgtttgcgctattaggtaaaccaggctttgaagataagaaaaaagaattagaaaatcgtttataattttaagttgaacttaaaaatgagcctaggattatctaggctcatttttattatgtgtattaataagagtaaatgaaaattgattaacgtcagattaataagaagtcaaattcagataggaaatattaaattttcaattcattagagtttcgataaagaatggaataataaaattgatgaattagatatcaatatatagatttattaattcctacctaagtctgatttatgttgttgacctaattttaatgtttcaaaaaatatcatttacaactataatgaataagtaatacaaccctaagaaaggatttgatgtattgtcgctttctcagttagaagaatggtttgacgcatttcgacaattcggatatattcctgg

SEQ ID NO: 3442 - DNA, 3716 bp, Artificial Sequence
  Description of Artificial Sequence: synthetic nucleic acid sequence
acattcaaaactagatagtaagtaagattttgcgtcgcaaaacgttttttaaaaattgattaagtcttcgatcgattagtattcgtcagctccacgtgtcaccacgcttccacctcgaacctattaacctcgtcatcttcgagggatcttataaccgaagttgggaaatctcatcttgaggggggcttcatgcttagatgctttcagcacttatcccgtccatacatagctacccagctatgccgttggcacgacaactggtacaccagaggtatgtccatcccggtcctctcgtactaaggacagctcctctcaaatttcctacgcccacgacggatagggaccgaactgtctcacgacgttctgaacccagctcgcgtaccgctttaatgggcgaacagcccaacccttgggaccgactacagccccaggatgcgatgagccgacatcgaggtgccaaacctccccgtcgatgtgaactcttgggggagataagcctgttatccccggggtagcttttatccgttgagcgatggcccttccatgcggaaccaccggatcactaagtccgtctttcgaccctgctcgacttgtaggtctcgcagtcaagctcccttatgcctttacactctatgaatgatttccaaccattctgagggaacctttgagcgcctccgttaccttttaggaggcgaccgccccagtcaaactgcccgcctgacactgtctcccaccacgataagtggtgcgggttagaaagccaacacagctagggtagtatcccaccaacgcctccacgtaagctagcgctcacgtttcaaaggctcctacctatcctgtacaagctgtgccgaatttcaatatcaggctacagtaaagctccacggggtctttccgtcctgtcgcgggtaacctgcatcttcacaggtactatgatttcaccgagtctctcgttgagacagtgcccaaatcgttacgcctttcgtgcgggtcggaacttacccgacaaggaatttcgctaccttaggaccgttatagttacggccgccgtttactggggctttgattcgtagcttcgcagaagctaaccactcctcttaaccttccagcaccgggcaggcgtcagcccctatacatcaccttacggtttagcagagacctgtgtttttgataaacagtcgcttgggcctattcactgcggctcttctgggcgtgaaccctaaagagcaccccttctcccgaagttacggggtcattttgccgagttccttaacgagagttcgctcgctcaccttagaattctcatcttgactacctgtgtcggtttgcggtacgggcacctgttatctatctagaggcttttctcggcagtgtgaaatcaacgactcgaggaaacaatttcctctccccatcacagctcagccttatgagtgccggatttgcctaacactcagccttactgcttggacgtgcactccaacagcacgcttcgcctatcctactgcgtccccccatcgattaaaacgatactaggtggtacaggaatatcaacctgttatccatcgcctacgcctgtcggcctcagcttaggacccgactaacccagagcggacgagccttcctctggaaaccttagtcaatcggtggacgggattctcacccgtctttcgctactcacaccggcattctcacttctaagcgctccacatgtccttgcgatcatgcttcgacacccttagaacgctctcctaccattgtccaaaggacaatccacagcttcggtaatatgtttagccccggtacattttcggcgcagtgtcactcgactagtgagctattacgcactctttaaatgatggctgcttctaagccaacatcctagttgtctgggcaacgccacatccttttccacttaacatatattttgggaccttagctggtggtctgggctgtttccctttcgaacacggaccttatcacccatgttctgactcccaagttaaattaattggcattcggagtttgtctgaattcggtaacccgagaggggcccctcgtccaaacagtgctctacctccaataatcatcacttgaggctagccctaaagctatttcggagagaaccagctatctccaagttcgattggaatttctccgctaccctcagttcatccgctcacttttcaacgtaagtcggttcggtcctccattcagtgttacctgaacttcaacctgaccaagggtagatcacctggtttcgggtctacgaccaaatactcaacgccctattcagactcgctttcgctgcggctccacatttgctgcttaaccttgcatcagatcgtaactcgccggttcattctacaaaaggcacgccatcacccattaacgggctctgactacttgtaagcacacggtttcaagttctctttcactccccttccggggtacttttcacctttccctcacggtactggttcactatcggtcactagagagtatttagccttaggagatggtcctcccagattccgacggaatttcacgtgctccgtcgtactcaggatccactcaagagagaatatgttttcgactacaggattattaccttctttgattcatctttccagatgattcgtctaacatgttcttttgtaactccgtatagagtgtcctacaaccccaacaagcaagcttgttggtttgggctcttcccgtttcgctcgccgctactcagggaatcgatttttctttctcttcctccgggtactaagatgtttcagttctccgggtctgccttctgacatgctataaattcacatgtcgataacatgacataactcatgctgggttcccccattcggaaatctctggatcaacgcttacttacagctacccaaagcatatcgtcgttagtaacgtccttcatcggcttctagtgccaaggcatccaccgtgcgcccttaataacttaatctatgtttccaccatattttgaattgttattcaaaataaatagctaaaactagttattaatcttgtgagtgttctttcgaacactagcgattatttatgaattcaagcttatttaaaactctattcactcggttttgcttggtaaaatcttacttgcttatctagttttcaatgtacaaatgaatgttaataaacattcaaaactgaatacaatatgtcacgttattccctcatcttcgtagaagatgttccgaatatatccttagaaaggaggtgatccagccgcaccttccgatacggctaccttgttacgacttcaccccaatcatttgtcccaccttcgacggctagctccaaatggttactccaccggcttcgggtgttacaaactctcgtggtgtgacgggcggtgtgtacaagacccgggaacgtattcaccgtagcatgctgatctacgattactagcgatttcactaatttcttgaaaagttttttctaatttttcaaagaaaccaccttcttgatgttgctcgtttgaggttttttgattgggtctttgattttgtctgtcctcgtgacttttatctcgtaatgcgctaacacctgtaattatcacagatatgatgaaaatgataatgccaatattcatcttatcacctcttcattattgttgtggtgattcatcatcgttttgatcagtgcgcttatttattgcatttctcatacctgtatccgcttca

SEQ ID NO: 3443 - DNA, 3618 bp, Artificial Sequence
  Description of Artificial Sequence: synthetic nucleic acid sequence
tgtagcaataccaccatgcaactgacctacgttttcaaatccttcttttactaaccaaccagaaaatttttcacaacgaatgccacctgtacaatatgtgacaatattttttccgtcgagttgttctttattattacgcacccattcaggtaagtcacggaatcgtgttatatcaggacgaatagctccacggaaatgtcctaaatcgtattcataatcatttcgagcatctaatataacagtattttcatcttctagtgcggctttaaattctttaggagaatagtatttaccggtaatttcacgtggattaatatcttcttctaagtcaagtgcaacaatttcacgtcttggacgcacgtgcatctttttaaacgcatgactttcagcttcatcaattttaaaagttaaatcagcaaaacgactatctgcatgcatatgctctatatatttatcagtatcttcttttgttccagataatgttccattaatgccttccgttgaaactagtattcttccttttaaatgatgttccttacaaaatttcaaatgttcggctgcaaaagtttcagggtcatctatagttacatatttataataaagtagtactctataatccataaatctgtgctcctctttagtcaattttagttaatttaaaagtatttgaagttatataaaaaaatgatagtgattgaagtttaaaaattagacattttaatattgtatcaaaatgagaattgctttcaataagatagcctataaatccgtcatttgaccgatataagatgtggtggttttcatatatgaataaaagtgtagtcgtgtagctataatgacatttaatataaatttttataaaatgagaataaagtcactgaataaagagagggattcaatcgatggcaaatcaaaaattaccaacattaaaatatactggtaaatcagaaagtgcagtgccaattgtgtcagaaagtgaattgcaaacggtaacagcagagccgtgggtgaaaatttcagataaagggttacaactagaaggacttaattttaatcgcgaaggtcagttattcttattagacgtgtttgaagggaatatttttaaagttaatcccgcaacaaaagaggttacaacaaaatttcagtctgttaaagataatccggcagcgattaaagtacataaagatggtcgtttatttatctgttatctaggtgattttaagacaactggaggcatatttgcgacaacagaaaaaggtgaacaaatagaagaaattatttctgatttaaatacagaatattgtattgatgacatggtttttgacagtaaaggcggattttatttcactgattttagagggtattctacacaacctttgggcggtgtttactatgtagatccagactttaagacggttacgccaattattcaaaatatttctgtggcgaatggtattgctttaagtacggatgaaaaagtgctatgggtaactgaaactacaactaatcgacttcaccgaatcgcattagaggatgatggcgtgactattgcaccatttggagcgacaataccatattattttacaggtcatgaaggaccggattcttgttgtattgatagtaatgataatttatatgtggctatgtatggccaaggacgtgtattagttttcaataagagaggttatcctataggtcaaattttaatgccaggacgtgatgatggaaagatgttacgtacaacacatccacaatttatacctggtacaaatcaacttataatttgtactaatgatattgaaaaccattctgaaggtggatctatgctttatacagttaatggttttgctaaaggatatgagagttatcaatttcaataaactcttgaaaaagcgtatagaataagttgttatgtataaataaaagaagtagaacaaaggttgaataaaactttatgttcctcactcgtatagcttaatttgaaaatttgatacaactcattgtattttctattaatgcaacgattgccataaataaatatgcctgagacatttaatgtgtcccaggcatttataatatgtgttcttgtattttactgttaaagataaaagcttaagaaaattttctataacaaatcgtttaattgtcgatgctaaattctgctgatgcttcaaattttacgtttttacctaacatcacgccaccagtttctaaagcttggttaaaattaataccatatttttcgcggttaattgttccactaacgataaaaccagtgacttgttgtccattcattggatttttacttacaccattaaattcaacatcaaatgtctcttcatgagtttcacctttaattgtcaaatctccaactacttgattttcgttaatttctttagttacaaatgtcattttatcgttgtcttctgtaccaaagaaatcgtttgatcttaaatggttgtctctgtcctcattttgagtgtcaattgaacttggaataatagtagctgttgcttttagtgaagttaaatcattaatatctccatctaattgaacatcgaattgcttaaatgttccttttacttgggacaccataagatgtttaattttaaactgaatatcactgtgaacttgatcaaagttaaattttgtcattattataaccccttctctctttattacaataattacgtttcttgtacttgttattctagatacagtaagatgacttatcaatttttttactctcattaaatttacggctttttaaacttttttagtgtgtctatattactatattcgttaaaaagaaatgaagtatacataagagaatgatgatatttggcaatcaacagtaaatatatcttccagaaaaatgttgtgaaatttcacataaatataaaaaagaacatgtgattgttgatttgaggttgctcatagtgaggattattgaattataaactaaaaatatttcatttaatactgaagtaaaataacgtatgtctcaaaaaataattaaacacatacattttcatttgacattgcaattagaagaaagtaacataacattaaatcgtaatttttacgatttaggaacgatatagagatgatggttggatgaatataagatggacatatccgtccctgtctattttatttgaagtgcaaacaaagtgaaaattcttcaatacctcatataatacatcaattgaccatcatctattatattgttctttttatgtttagtttccttttatttctaactcttttttttttcactcgtcttaggacgggtgttttttatagtagagttatgaaattgttgaaggttccgttcgattatattctgaaattaaatcaattcatagacttcttcgtatctatgatgacttgcaacatggaatttcaaataccccttagtacaatgaacatatttatataaagagtgaatgggttaaactacgtttttaaaaatgtataatgagatgatatttgagtttgtttttatataaagagaggcaagtttgttttttatatagaaacggtgtttataaaaaataaattgtgacggaatcgtgtgattagttattttaaattattgagtttaaaaaaggacaa

SEQ ID NO: 3444 - DNA, 2851 bp, Artificial Sequence
  Description of Artificial Sequence: synthetic nucleic acid sequence
aaatatagattgtcgctttaacaacagaattcaaatcagaacctgcttcttttaataccacagttaaattttctaaaacttgcttagtttgttcttgaacatcatcgctaacaattgttccatcaagtgtgagtggaatttgacctgatgtaaagacaaaaccgtttataacagttgcatgcgaatatgggcctagtgcttcgggtaccttatctgagttacaacaacttattcctaaatattgtgttattttcccttaaatctcctcaaagataaatgatttaagggtttttttatgcataaatcatttgttctaacccgttttactatctataagattgttattgtaataaaatattgacattaaatactaacataacgaaaaataattgaaaggaatgaaataatggtacaaaatgcatttgttgcactggactttgaaactgctaacagtaaacgaacaagtatttgctctgtaggtatggttaaagttattgataatcaaataacagagtcatttcatacccttgtgaatccttttgactactttactgaaacaaatattactgtacatggcatccatcccgaagatgtgcaagatgctcctggattcaagcatgtctatccatatatgctaaaatttattgatcaacttcctgttgttgcccataatgctgcttttgatatgaatgtgttacatcaaagtttaaaaagtcataatatagatacaccttctttgacatacttttgttcatatcaattagctaaacgaacaattaatgcatatcgatatgggctaaaacatttaatgaatcattaccatttagattttcacggtcatcatgatgcgttaaatgatgctaaagcttgtgcaatgattacctaccgcttattgaaacattatgatgatcttcaaagcatgttgagtatatatggaaaaaatctcaaagataaaggctgattgtccacttaacttgtgttcatcagccatttaaataaaatcatatattgttaaatttttaaaatcagattgctctaaactcccgaccgttacacctattaatcgaatcggaatctctggatcttttaagtcgttatataaagtataggcaatattatagatatcagtttcagtacgaataggatctctcaaacttttttgctttgagattgtttcatattgataggtctttatttttacagtgactgttttacctgatttttgaattttatttaaacgttctgctgtttttcctgaaagctctcttatttttcttaaaataacatcatcatcgttaacatctgtagaaaatgtcctttcagtcccaacagatttacgaactctactcgcctttacttcattatggtctatacctcgagctttattatacaaacctcgtcctcttttaccgaataaacgtattaattcaaattcatctttattatataaatcttgacctgtatatatatgatgttgatgcatttttttcttcgaagctttgcctacccctggaaaatctccaatatctaattgcattaatatttcatgtacattattgtaatcaattactgtcaaaccattcggcttgttcataccactcgctaactttgctaaaaacttattataagacacgccagctgacgcagttaaacgtgttacttcgtatatatctctgcgaatataatttgcaatggttgatgctggtaaatccggtctcactaaatgtgtaatatctaaataagcttcatctaaagacatgggttctactaattctgtataacttctgaatattttcatgatttgaccagatacctctctataagtatcaaaacggcttgttacataatatccattggggcatagcttatgtgcttgagtcataggcatagcagagtgaacaccataagctcttgcttcgtatgatgccgtagaaactacgcctcgatgactcgctttaccgccaacgatgacaggttttccttttagtttaggattatctctcatttcaacttgagcaaaaaaataatccatatctatatgaataattcttctttcagtcatcgactcacctcactatgtcttccaaataatggctttatattattatacgccatcctttctatgtttacatgtattgtgcacatggtaatatttgtattgtttatttaattaatgtaataaaaaaaataggactacaatttttagaataaattcatagtcctatccttttctacataagtagttatgtgaatgtagttgcatattttaatgagattttttattacaattgaaacgagttgaaaaataagaaatgaaatttttaaatcaattatcaactttgatatatacgcttgtcactataattagtgattattcataataggtttgagtaggcttttgatgataaagatacaaaccttctccataggtttgtatgtatttgaatttgctttgtaatgccaatgctactaaaaacacatctatcatacaataacttgtatgtatactaaacataaagattaaagatgagaaggaatatatttgaataagtgctagtaaggtcgcacttatgataacaagtggtgctatcatgataattgtaaattgccaccgatgaaaacaagtctgagagaactgtacaataattttgtttttatcatattttaaagatggtttttcacctttagaaaatataatgaacaaaatacgatgaataaactcgtgcaaaataactagtactgcgaaacctacaaatccaaaaataagattcatgacaagattttgttcaatgatatgcgttgtttgataagcccatttataagtaaatagtattgtaaatagcgccaatac

SEQ ID NO: 3445 - DNA, 3376 bp, Artificial Sequence
  Description of Artificial Sequence: synthetic nucleic acid sequence
aataaattttttgaaacggctttggaattgatattcaaatatatcaaaatctaaacctaccaataaataaaaaattgccatacaaattgccataacgaccagtatacttatttttttattagcgctcatttgcataatttttcctacctttcattagcaagattaggaaaataattgtgccaaatacacctatcgtcaatccaatattaatttcgtaagggtaaacaattattctaccaataatatcagcaattaaaacaaaaattgcaccgagcataagcgtgtgtggtaaagcatttttcaaatgatcgcctctatagatagatatgatattcggtacgattaaacctaaaaatggtaatgttccaacagtaacaacaactaatgctgttagcgttgctgttatgaataatgctattttaatgattttttcataacttacacctaaattatgactaaagtcttttcccatacctgcaatagtaaaatgatttgcaaatacaaatgccaaaataagtaatggtattgtgagatacaacacctcaaaacgaccactcgttataactgcaaagttaccagttaaccagtttccaatgctttgtaaagcattggttctcaacgctacaaatgtagtaaaactggataaaataccaccaatcataatgcctaaaagtggaacaaagattacatcttttacacggataagattaattaattggacaaataaaaacgttccaacaatacttagaacaacagcaaataataatttgattaaaatgggaccattaggaaagaacaacaatgacattaaaatacctaattttgcccactccatagtaccagcagtcgttgggcttacaaatttattttgcatcatctgttgcataattaatcctgataaagctagtgaactacccgaaagtagaatactaactgttctgggaattcgactcgaaaacaaaatatttatttgttcatcacttaaatggaaaatatctattagagagagctgactcacccctataaataaagagacaatagttaaaatcactaataaaataaataaggtataacctttaaaaataaatttcattagttaatctccttgctaaatattaaagatgtataaggtcaatatacgaaagtaatgataatgataatgattatcattaacatcaatattatagactctattttcttttttcaatagttttttcatattttttgggaattttataaatgttttatccagcagtaataatacatcaaaatattttataataccaactttcataaaaaaagagattcctactaattttaatagaaatctctttaaaagtactatattaattatcaaaaacaaagtcttcatcacgtagaggctcaacatttaaagccaatgtatagccatcacctttaacagagaagaaatcgtggttctttgtagatgtatctagtgcattttcaataatagggttaaactctctctcttcgaaatatggttcaaaacctaaattcgataatgctttatttccattatatcgaacataatttaatacatcttcagcaagaccaatatcatcatataataaatgtgtatatgaaacttcattatcataaagttcatttaataatttgtacatttcttgatcagctttttgtttctcactttcagataactcattacgtagactttgtgcatctaaacctgtgaacactccatgtatagattcatctaaaagtatcttacgtataatttcacctgacgtagtcatttttccttgtcctgcgagatataatggataatagaagccagaatagaatagaaatgtttctaagaatacactagaaacacgagcaatatattgatcgtaaatcgatgcttctttaccccaaagtttgtggtaattttctacaattttatctgatttatattttaaatgtggctcttcaataacccaagtatccaataaatagttggtttcactagatggtaataatgtagtgaagatatgagaataacttttcgcatggatttgttccatcatagccataaatgaataaacagctttctttcttaaatcagtagtatgaagcatgattaatggcataccatcatcagcttgatgtgtatctaaacctgttaaacctgcaagcgcttttttaaaagtatttttctcagaatctgttaatgttttccaacttgctatatcttttgatactttaaattctgtttccacccacatttgtgagatattttgacgccagaacatattagtcatatcttcttgggtgttccaatttaccgccttcattaaaatcctcctgtcatatttatgtataaaataaagagttttgaaccaatgtaaatctataatttaaagaaatacatcaattcatcactctactctaaaatctttacaacttaatcaattaaatcgcacaacttgtacattcttccacacttaataatttattacgtgtatagtataaagatttaaggcctttatggtgtgcatatacatataatcttgaaagttcacgtgttgaaatttctgaattaacataaagtatcgttgaaataccttggtctacgtgagtttgaattgtagctactaagtcaataagtttcatttggtcagtattaaatgctgatttgtagtaccacattgtttctggtgataaaaatggcattggataaaatgtttccgcatttccatacgtacgacgttcaatttggtcaacaataggcataacagaacttgtcgcattttgaacataagaaatactttgagtcggagcaatagctaatctataagcgtgataaagtccatattgttctactttattttgcaattctttccaatcatttgaagtaggtatatcgataccatcaaaaagttggcgaaccttttcaaattttggttcaaattcttgagatgtatagaattcaaaatatttaccatttgcatagtctgattgctcaaagtcttgatacttttctccacgctcttttgcaatttccattgaacgttcgatggaataatagttcataatcataaagaatatattagcaaagtcttttgcttcttcagattcatagccaattttatttttagctagataaccatgtaagttcattactcctagtccaacagaatgtagttcactattcgctttttttacacctggtgcattttgaatatttgcttcatcacttacaactgtaagagcatccatacctgtgaacacagaatctctgaatttacctgattccataacattcactatattcaatgagcctaagttacatgaaatatctcttttaatttcatcttcaattccatagtcgttaattactgatgtctcttgtaat

SEQ ID NO: 3446 - DNA, 3328 bp, Artificial Sequence
  Description of Artificial Sequence: synthetic nucleic acid sequence
tatatttcgtgtgattttctttaactactgcacctgccacaattcgatgcggttttttctttaattcttttagtaaagtaattccacgttgtgcgcgtttagcttcttgaagaacattaaaatcaatacgcttcatagcaccacgttgtgtaaccattattatggaatctgagtcgttcacatcttctgtcataacaacatagtcttcatctttaagattaattgatttaacaccagctgctcttaagcctgtatccgataattcattagttgaataagttaatgacatgcctttatgggttagaacagtaattaactgatcagactctaatcgaacgacattaataagttcatctttgtctttaaccttcatatttatgagtggtttattaaaccgagtagttttaaattgtgaagcactacttttcttaatcatgccgttttttgtagccataatataaaaggcttcatttttaaaatctttttcgttgtatacatttaccacttcttcatcttcatctattggcacaatttgtgatatgtgttgaccaagctctttccaacggatatcggctaatttatgaacaggtataaacaaatatctacctttatttgtaaatacaagaacagtatcttgagtattcacgctttcatgttttaataaacggtcgccgtccttcaaaccgatttcagtcacaccacttgcgttaaaactacgtgtagatgtacgttttatatagccatgttgcgtcaaacttaaaatcacttcttcactaggcaccataacttctttatcaattttgatttcggaaatttcagcttcgattgtagatagtcgatccactttaaatttctttttaatttcatttagttcatctttaattactgctaaaagtgcctcatgattatctaagatatttcttaattcttttattaaagcttctaactcttcatgttcttttttcaaagcttcaatgtcagtatttgttaatctatacagctgtaacatgacaatagcttctgcttgagcttcagtaaagtcatactctgcaactaaattatctttagcatcttttttatttttagaattacgtatcaatgcaataacttcatcaagtatagataaagctttcattaatccttccacaatatgcatacgtttttcagcttgctctaagtcataacgcgttctatttgtaaccacttcaatttgatgatttaaataactttctataatttcacgtaatcccatcaacttagggcgaccttcactaatagcaaccatattaaaattatatgaaatttgtaaatccgaattcttatataaatagtttttgattgattcgctattagcatctttttttaattcgattgcaattcgtaatccagttctatcagtctcatctcgaacttctacaataccatcaacctttttatcggcacgtaattcgtcaattcttttaactaaactacttttattcacttcatacggaatttcagtcacaattaattgtttacgtccacttcttaaaggctcttcatctactcgtgaacgcacgacaacctttcctttaccggtctcatacgctttttttataccttctattccttgaatgataccacctgtaggaaagtcaggccctttgatatatttcatcagttgattaattgtaatatcaggttgatcgatatacttcaatgtgccttgtattacttcggcgaggttatgcggcgggatatcagtagcatatcctgaagaaatccccgtagatccattaattaataaattaggaaatctcgctggtaataccattggttccaaagttgtgtcatcatagtttggaataaatgatactgtttccttattaatatcccttaatagttcttctgataattgactaagtttagcttctgtgtaacgcatagcagctggaggatcgttatcgatactaccattattaccatgcatttcaattagaacatgacgtaacttccaatcttgacttaagcgcaccatagcatcatatactgaagagtctccatgaggatgatattgacctattacatcaccgacagttttcgcacttttacggaaatttttatcatacgtattcccacttgaatacattgcgaatagtatacgtcgttgtactggttttaaaccatcacgtacatcaggtaatgcacgttcttgaatgatatatttactataacgtccaaatcggtcaccaataacatcttcaagtgacaaatcttgaattatctcactcaattcgtttcctcctcaatatatttttcattctctagtatttggacttctttattatccaaaatgctttgatcttcttgcataccaaattcaacgtgtttttcaatccactctcttcgtggggcaaccttatcccccatcaaagtagtgacacgttttgatgaacgaacttcatcttcaacttgaactctaattaatgtccgagtttctggattcatggtagtttcccataattgttctggattcatttcaccaagacctttataacgctgtaatatgaaaccttttcctaattgcttttgtaaattttctaattcttcatcagtccaagcgtactcaacttttttattcttacctttgcctttttctaatttgtataaaggcggtaacgcaataaagacacgtccagcttgaacaagtggtttcatatatttaaagaaaaatgtaagcaataatacttgaatatgtgcaccatccgtatcagcatctgtcatgataataattctgttgtaattactatcctcaattttaaagtcagtaccaacaccagcaccaatagtatgaataatcgtattaatttcttcatttttaaaaatatcctctaaacgtgccttttctgtattaataacctttccacgaagaggtaaaatagcttggaatttacggtcgcgtcccaattttgcagaacctcccgctgaatcaccctcaactagatataactcgtttttatcagtatttttactttgcgcaggagttaacttacctgataacaatgtatctttacgtttatttttctttccggagcgtgcatcttctctagctttacgagcagcctcgcgtgcttgttgagctttaattgcttttttaactaatgatttagataattggcccttttcttctaagtaatatggtaatttttctgaaacaacagagtctacagcactccttgcttctgaagtgccaagttttgatttcgtttgcccttcaaattgaagaagttcttctggtatacgtactgaaattatcgctgttaaaccttcgcgtatatcattaccgtct

SEQ ID NO: 3447 - DNA, 2818 bp, Artificial Sequence
  Description of Artificial Sequence: synthetic nucleic acid sequence
caaatttacatcgacaaacactcttcgatgaagaagacgcacatactttaatatccaaagttgaagcaatcaagcataaggttaatcaaattaatataaatgtcaatctaacaacttatgatttagaagttacttcatcaaatatcgaaaatttgataaaaaatgtcgaaccagacatcatcattgatggcatggataacttcaaaatacgatacctgattaatgaggtttgtcacaagtatcaaatcccatgggtttatggtgcagctgttggtagtaaaggatcagtatatggaatagatcaccaaggaccatgtctaaaatgtttattgcaaacaattcctgacacaggggaaagttgcgctattaatggcgtaattccccctgttatatcaatgattgcaagctatgaagtagcagaggccgtacgttatctttcaggaaaaggattttcaaagcaattaatcactattgatgcatttaatatcaattataagtcaatgaatgtagatgcactcaaaaataaagattgcccagtgtgtgaaaaacatgaatatacgttactagaaagccaacaagaacgtactattgaggacttgtgtgggaatgcttatttatttagattcccacctaaagcttttaaacacgctgcccatttccctgggaatatggtgaaatctacttcctttgccaaattaattcaatatcaaacttatgaattcaccttgtttaaagatggtcgtatgaatgcatatggtatacacaatgatgaagaagcacatcacctatacaatacgttgttaaaatccatacgctaattaaagtaagattgttaccctttcaacctgtttcttgttaaaataacttatacttaacatcaagtttacgacaactggattaatttaaaaggagaaactaacgttgtatggaacaaattatcactgattttattagtaagtggggttatacagcgatattcattttaatcttattagagaacgtattacctgtcgttccatctgagattattttaacttttgcaggcttattatctgtgaaatcacacttatctatttggacattattaatcatagcaacaattgcttcattcattggtttactcattttgtattatatttgtagacttatctcagaagagaaattatatcgtttcgttgatcgacatggtaagtggatgaagttaaaaagtaaagatttgaaacgggcaaatgattggtttaaaaagtatggtgcgtgggctgtatttttatgtcgttttgtcccagtacttcgagtattaattacaatacctgctggcattaatcgaatgaacgttatacagtttacaactttatctttaataggtactacaatttggaattttgctttaatactgctcggtcgtttgctcagtgacagttttgacgctttgatgaatggtattcatacatattcacgtatcatgtatgtcattattattattgcagtcatatattttgttatacgttatttaatgaaacgtcgtcggagtgttaaataaatgttatgctaagttttccgtttcttaacggttaacttagcttttttattaattttaattttatgatacgcaattattgaaaattaattgatttttcaagataatctatgtaagcgcattattataaataatcgtatcgttaggtcggaaaatataattagaggtgactatgcatgacccatattacagaaagtgaaatgaaacaaaaatatctagatttactctcacaaaaatttgacagtgcagaaaaacttgctactgaaattattaacttagagtcaatcttagaattacctaaagggactgaacattttgttagtgaccttcatggtgaatacgaatctttccaacatgttttaagaaacggatctggaaatgtgcgtgctaaaattaatgatatcttcaaagataaattatcccagcaagaaatcaacgacttagcagcattagtatactatccggaagaaaaactaaaattagttaaaaataatttcgattcaatcggaacattaaatatttggtatattacaaccattcaacgattaattgatttaattacatattgctcatcaaaatatacacgttcaaaattacgcaaagcattacctgaacaatacgtttatattattgaagagctactttacaagagcaatgaatttcataataaaaagccttattatgaaacattagttaaccaaattattgaattagaacaatcagatgatttaatcattggcctttcctatactgtacaacgtctagtcgtagaccatcttcatgtcgtgggcgatatctatgaccgtggtcctaaacctgataagattatggatacattaataaattatcattctgtagatatccaatggggaaatcatgatgtattatggattggcgcctatgctggttcaaaagtatgtcttgctaaccttctacgtatctgtgcacgttatgataatttagatattattgaagatgcatatggcatcaatctacgccctttacttacgcttgctgaaaagtattacgatgctgaaaacccagcgtttaaacctaagaaacgaccagataaagacgtcagtcttacaaaacgcgagaaagtcaaatcacaaaaattcatcaagcaattgcgatgattcaatttaaacttgaaatgcctattattaagcgtcgtccttcttttgagatggaagaacgtttagttttagaaaaaatagattatgataacaatgaaatcactatatataataaaacatatccgcttaaagatacttgtttcca

SEQ ID NO: 3448 - DNA, 3285 bp, Artificial Sequence
  Description of Artificial Sequence: synthetic nucleic acid sequence
tgagttctaattggcaatgatttaaaacagattgaacaatgtgagacacatactgttcttgtatttctaagctttctgcatgatttgtaaaggccatttctggttcaatcatccagaattcaattaaatgacggcgtgttttagatttttctgcacgaaaagttgggccaaatgaaaaaacacgtccgtgagccattgcggctgcttccatatacaactgcccactttgtgataagaatgcatcttcatcgaaatattttgtatggaataactcacttgttccctctggtgcacttgctgttaaaataggtggatcaattttagtgaagccattttcattgaaaaactcatatgttgcacggataatttcatttcttattttcatgacagcatgttgtttttttgaacgtaaccataagtgacgatgatccattaaaaattctgttccatgattctttggtgtaataggataatcgtgtgcttcatgtacaatttcgattgatttaacttgcatttcgtagcctaaatcagaacgattatcttctgtaatcgttcctgtgatgtataaagatgattcttgagttatatcttttgctagttgaaatgtttcttcatctacttcagattttactactactccttgcataaatcctgtaccatcgcgtaattgtaaaaacgctattttaccacttgaacgtttattagttaaccaagcaccaattgttacttcttggttaagatgttttttcgcttgtttaatcgtagttttcataaccaaactcctatatttttctttttaaatacttatttattttaacaaaatatgtctttaacttctacaagttgagtaactggaatcattcgatattatttattatatatttctaaaacgttagcttttactctcattatcgatagacctctgtatttgattcagtaatttattaaactgtttaatattaccttttcgttgtttaaaatgttctagtgattgagcaaaaaagcttttatatgtgctatttactagtcgatcatcaaatgacacaataagtcctttgtcgtcttcgtgtcgaataagacgtccaagaccttgtctaaaccttgttacagcatcaggtaatacataatctttaaaagttgatgtgaattcagaatccataagccagtatttaatattatgtttattcataaatggtaatttagctatcattacacatttaaggccattggcttgaaaatcaaaaccttcaaaaaatgttgatgttccaagaagtatagatttatcaaagttattaaattgttgaacaattttataattttggttttgttgttgggttaaaatgacataatcttctaactcaggtaattcatttaacaaatcttgaaccatatgcatcattttatagcttgtaaataagacaagacatttcgactgtgtcactgtgatgtattcaacaatatagtctacaattgaagctacataatcgtctaaatttttataattgtacgtttcaacatcattgggcacaaaaacatttgtatggttggatgatgttaaaggtgttgaaatttcaaatgtattaaagtctatatcttcattaaaccaattttgaaatgctttaaatgagtgattgaaagttaatgtgccagatataaatgtaagagacttaaatttttcgagtacttgtttcgtcaagatatctttaacatcataatccttgactaagagtcggattgttgatttttgtgctaaatttttaattgaaataaagcttgtatgatgatcttttatactttgttcgataagtttaaatttgtcatgtaagtataataattgtttccgtacagacttgattgttttgtgattcattccgttaaaaatttctatcgttttatttaatttatctatgattgcacgtaaatcttttaaaatctcacccgtttcaaagtcataaacgtaatgatacttatgaatgtcatcatcataaacgtctgatgtttgaataatattataaattgtagtgaatagttgctcatttaaatcatgtaactcattgatatttattttcagtccaaaaacgtctataggtgcaatatctagtttctctaaaatacgttgttgctcaagtttgtctactgctttaagtagtttttcattttcatttttgccaataagtcctaattgatatttaacatctgaataatttaaatcattagtaacttgatttagcgcatagtcaggcaatctatgtgcttcatcgatgatgcaatcatcaaatagttgatatatagtgttttcactgtctgaatgaattaagtgcgcatgattagtgataccaatttgtatgttttgagcatttctttttatataattataataatggatatcatgacgaactggaacgtatgtttcaattttttggtcaacatacattttttgtccacctttaagatttaattcctgtatgtccccagtatttgtttcagttatccaaataagtaactgcattttaagaatacttacttcataattatttgtatcgtctttaagaatttggctgataagaccaagagatatataatcatttttacttttgattaatgacgcgttaattttaaaatctaaaacatcattgagtaatggtatgtctttctctaatagctgactttgtaataattttgtatttgttgaaatcattacatgacgaccggtctcaatattatacattgttgctgcaagcaggtaagcaagagactttccactacccaaaggagcttcaatcattgccttatcactatgcatcaactgatcaagtataatttcggctaggtataactgttgtggccgatatgtaagatttaatgattgagtgacatttttatataaatcttttaaggtaccatcaaaattgacagccggtttttttaaatcaatttgtttacggtaaataatttgttcaaattgttcaaattggttgttaggcggtttagtttgataatttctaaccatttcaaacaaaatatgataaagatcatacttgagatttttacttaaatagtacagttgtttttgtgtatctaaatgcaattgctcgaacttctcaaaagctttaatcatcaatttagcagttgttgttgcatcttcatctgctctatgtgcattatttaatggtatatgatgagattcagccaatgcacttaactggtagcttttgtctgtagggaatgcgattttaaacaattctaaagtatccattactcttttaggtttaaattgaatattac

SEQ ID NO: 3449 - DNA, 2971 bp, Artificial Sequence
  Description of Artificial Sequence: synthetic nucleic acid sequence
agcttcagcaatcaaaaatggttggaaaatgaatgactttgtaggacctgttgatcatggtgcatataaccgtattgaacagattaacgttgaagtcactgaggtttaaaatacgatatatataaatactagtacattttacccctcatctatagtctcatttaattcctacaaacattgtaattataattaaatcaatatctatatagatgtggaaagcctggaacaaaaagttccaaaataagtaaataaagacaatttctattgaaataatataggaattgtcttttttataatttttttgatgattttcagctcgttgagctattacttttcttatattaagccacgaggatgtctgaattcatcgaattcagtatcgtgaattgtttctacaatatcatgtacatatcgtgaaatatcattcgcggggataagtactgaagtttctattggtagagtatgttaagtcatattataatctttatacataagacacctcgttaatttagtttagtggtatttattaaattatacgaaagcaccttatttttcaaagtattttaatataaaattacatataaacacaaagtattttggcgagactcttgagggaacaggacaagctgaagactacaggctgaagctgtcacctaagaaagcgagccaacaatacgaattattttaaataaagatgccaataaatgaatttatgaaaatccatttactggctattttgctaggaattatgtctcagcgtctcttctctttcctttcaatccataataaatattgtatacatataaagtcttagaaagtaatcagtttatcgtcgtatgtaaatttgatactacagacccatgatttcttatgatttatcttttattatttaaagtgtagagaggcaagggaggtataaacaacatgattatctacagaagaaatatagaaaatggaacacccatttatgaaatcataactaaaactttcaagacaattactataaagtgtgatgaaacttttaataagtatgaaatctatcaattgctctctctactagagaatgacgttgacaacatgccgacaagttactcatatcgttaacgttattctagacaactagacattgcatcaaacctaattgagatttagcacttttgtctttccagtcccaaataaaatgagttttaaagcatttagtcccttaatacgtttagctttaaagacattctatcatccctaaattaacactcaccttaacaagtgagaaacgctaatgttagccaaaacttgtccccttttgtagctcggagagaacctttgagcattgctaacattggcgtttttaattatttaatttaaaaaaagattattatttttatcattctcaacttctagtaattgttagtttggtatcatcatatgttttaaaaactacaatttcatcattttcttttattaaaaattgtacttcttcatctatatttataggttttaagtacttaattttgtaattcatccaattcacattaagttcagaaaatactttttcacatatgagttgtcctggtacaatggaacgatggatcggattctcatcattaactatagttaaatattcattcaccatttctattgtaaatttcataatttatcttacctcgataaatatttgttttatatacatacaatgttttttatctttattgatttcgagtccatatgtatatttaatgatatttttaattaatttttgtgaaaccttatgcaatgtcgcttcatacgtacaatcgacttgaagttgatgttgtgtcttaatgtgtgtctcttttaatatgataggcttctttgaaaaagattgaaataactcaaattgtggccataacttggcacacataagagtaggaacataatggtcatactttatattaagcaattcgcaataattttgaacttcttcatttgtaaattgaacttctctaatttccataccatctttcaaataaagctgcatttcctatccctccacctattcccatagttgctatagttctaaattgatgtttcatataaaataaacgtgtgactaacgctgctccacttgcaccatatggatgccctgtagcaattgctcctccccaacaattcaacttattcaaaggaatgttaagctgttgttggctcgcaataacttgagagctaaatgcttcatttaattctactgcatttatatcatttatagttaatcgttcttgagctaataattgatttactgctggcactggacctactcctaaatactgtggttgaacacctacagttgcactattcacaaacttaatcccttctgtgaatcctaattgacgtgcccgattttcttccataacaatcagtaatactgcaccatcatttttcttacaactatttcctactgtgactgttccttcatttaaaagtggtttaagtctgccaagtgttctgagagtaagttgaggtttaatactttcatcttgattaaaatattcacctttcactttgaacggtaaaatttcttgggaaatattaccgttattcatattttttgatgccaactgatgactgcgatacgcaaagtcatcttgttcatttctactgatatgatatttcttcgctacattttcggctgcttcaatcattgaagggtcttctccttctcttgcaaaaggcgcccgttcaaaaaattgtggaaactcagattcataaactgactgcggacgtttgattttccaaggtgctctactggtactctcaacaccacctgcaatatatattgttccagcaccactttgtaccatcctacaggcttgtataacggcttcaagacctgagccacattgacgatcaattgttataccaggtattttaaaatctaatcccgcttcaagtaatgattttctagctaaattccccccattacctaccgtattaccta

SEQ ID NO: 3450 - DNA, 3093 bp, Artificial Sequence
  Description of Artificial Sequence: synthetic nucleic acid sequence
aatgctacggctcaacttcgtcaaaaccattcaaagagccaaagtgattggaatcatcaacaaaaccaacaacagaaagatgcttgggatcctgaacaagaaatcaacaaacaaaaaaaggacgatccatatatatattaataggtttagattgatgtttgactattaaatgttgaatgcagtccataaaaatacgccctatcagtaaaaataattgataaggcgtattttttataaagtaagaaagggactatacaacttgaagttaactatatgaataaatagtgatagaaaatgactttttaattcgtcatttcaaaatagaggatacattttctttgttattcatttaatcataattcttggaatgtttgaatgataagatatacgttaagtccacttaagacaattatgagtaacatatcaaaaatatgtacaccaaagtccttagcattttgttgtaaagttgtaatttgtttattagcaatttcatcttttatattaaaaatatcaattgtgggaacgttatgatctaaagttgcaaaggttagatcaggtcttctgagtttacgattttgtattctaagtccttcaaacgcttgaggagaagtgacttcatgaatgagatgtaaatcaatgtataataattgtggttcaccttcttttccatgaagcacatgttttttccatactttatcaaacagtgtttgacccataattttctcctcctcttatagatatttttctttaagcaatttaaaaatttctgaagttcgatattgtccacctaaatctgcagttgtcttattagattgaataaacgagtaaacaattgactcaagttcgttagcagcatcattttgatttaaactttctcttaagcaaagtgctaaagatagaaccataccaaatggattcgctttatcttcattagctatatctggtgctgaaccatgaattggttcataaagacgtgtacctgtttgaccaaaactagctgatggagaaagacctagagaccctggtataacagatgcttcatcacttaaaatatctccgaaaagattctctgttacaatcacatcaaattgcgtaggttgagtgatcagatgcatgctacaagcatcaactagcatatgattaacttctacttctggataatccttttttacatcgtttactatttgtcgccataacttactagaggatagaacgttttccttatcaacagaagttaattttttacgtctacgatttgcaagattaaaagcgattctcacaatacgttcaatttcttgacttgaatattttaatgagtctaaagcttcggtttttttaacatagcttggttcaccaaaataaatcccgctcgttaattctcttactataactaaatctgtgccttctacaatatcttgttttagtggtgaaagatgactagcccctttagttacaaatgtaggtcgaatattagcaaataaatttaaggatttcctcagttttaacaaaccgtgttctggacgattatttgggtctgtccatttaggccctccaatcgcgcctaataaaatagcatctgcatttttacatgattgtaatgtttcgttagttaaaggtgtaccataataatctattgaaacacctccaaaatgatgactttccaaatggtattcaaaatgatatttttcacttattaattttaaaagttctaatgtaccagatagaatctctggtcctataccatctccaggtaaggcaactattttataactcatgtacgtataccttctttcaactcatattctgaaatatatttagcatgagcatcgatatatgctttacatgaagcttttaatatatcgtggtctatacctatgcctgtcacttcaatatgattaataatgattcgtacatgtacttctgcttgagcatcagtaccttctgttacagaatcaatacgataatcaattaattctgcgtctttcttgaaaattcggtcaacagcattataaattgcaacaattgaacccgttccaatacttgaatcttgtttaacttgtccgtttctttcctttataactactactgcactttgtagacctttagatacgtattgaagttgtaagttatcaagttgaaaaatagcattgtgttcatgttcggagccatgtataatcgcatgaatatctctatcggatacattttttttcttatcggcaatttctttaaattgtttaaataatgtaacttgatcttccaatttaatttcatatcccagagctttaagcttttcggcaaatgcatgtttaccagacaatttacctagtggcaattctgttgtattcacacctacaagttgaggtgtcatgatttcataggtttcacgatgtttaaggacaccgtcttggtgaattccggattcatgactaaatgcattttgaccgactatagctttatttctaggtacacggataccagcatatcttgaaattaagtcagatgttttcttagtttcttcaaggttaatttgagattcaagaccatagtggtccttccttacatataaagccaaagcgacttcttcaagtgaggcatttcctgctctttcaccaataccgttcacggtaccttcaatacgtctagctccaccttcaatagctgctaaactattagcaactgccattccgagatcatcatgacaatgtgcactaaagataattttagaatttgacttaacggcctgtgttaattgtttaaaaatttcgccatactctgtaggataactaaatccaactgtatcagggatgttgataattgtggctcctgcgttaatcgcagtttgaacacattcaattaaaaatggaatttcagttcttgttgcatcctctggagagaattgtacgacttcaaaaaattgttttgcataagaaacgtgttcttttattgatgttaaaacttcatcttgagtcatttttaatttatgttctaaatgaataggggaggttgcaatgaatacatgtacttgaggttttacagcttctttagtggcttcatatacagcatcaatatcagattttttacatctagctaaac

SEQ ID NO: 3451 - DNA, 2958 bp, Artificial Sequence
  Description of Artificial Sequence: synthetic nucleic acid sequence
gagaagcaacagtaatatccacaacctttagtgttgtatctattacgttcgctattgtcattgccgaaacaattagaatgcaagatcaatttttctatttttatttaacagttgtcatttcatgcttaattgcagcaatgattatgccaagaatttggccacttaaaaatattcctgacgaatatgctaaagaagtaagtgaagaggctcgtaatgaacagctaccagaaggcaaaacagcattaaaatatggttttgatttagcaactgaagttggaattaaatcgccagggtttaaagaatttttaatttcaggttttaaaacagttgtagatatgtggtttgtaattttaccagttgttatgagtataggaacaatagctaccattattgctaactacacgcctgtttttgaaattataggaaaaccatttgttccagtactagaattgttacaaattccagaagcacatgaagcatcacaaacaattttaattgggtttgccgatatgttcttaccttcaattcttattgaaggggttcaaaatgatgtaacacgttttgtaattggagcattgagtatctcacaacttgtgtatttatctgaagtaggcggcgtgattcttggttctaaaattccagttagtataagtaaattatttatgatttttttaattcgtactatcattacgcttccaataattgctttattagcgcatttatttatcggataaaagatatactcatttttaatttagtgagagtggggggaagaaaatcataacaacagtaatataaattactaatggttgaaataaaaattctcatatatcaaacttgttctaatttttataattataaaaattagacaataaatcatatacgtattctagcccactccctttagataatttatcttctgttcaaagaagataaaacatttgatttaacaatttcgcttttaatgactggttatttaacatttatagtcctccaattatttacttagacatttatattatatagaaaatagcgcttttttactatgatagatgtacaatcaaaattattacaattttataaattcatttaaaactgcatatacgatagcaattcagggcaagaactatttttttaggtagccctctttatttacttgtcttgcacgcgctaatgctaaactatcttcagggatattatctgtaattgtggatccagctgcaataagagtatgattacctactgttacaggtgctataaggttcgtattacatcctataaaagcatctttacctactattgttttaaatttgttagcgccgtcatagtttacagtgatagaaccacatccgatatttgtacgctcacctatttcagcatctccaatgtagctcaagtgtgatactttagcaccatctttaatatctgctttcttcacttcaacaaagtttcctactttaacttcagaacctaaattagatcctgggcgtagttgagcgaaaggtccaactgttgtgttctctccaacaatagagtcattgataaccgattgttttatgttagcattcgaatgaattgtgctattattaatttcagagtattggcctatccacacatcttcttcaatcgttgtatgacctccgatgcgcacgcccggttcaatagttgtatctattccaattttcacatctgttccaataaatgttgaactaggatcaatgattgtcacaccattttccatatgatagcgattgatacgttgttgcaaagccttttcagcttcacttaacatcaaacgatcattaacaccaatgatttcatcaaaatcttcggtacaataaacttcagctttacctccgtcttttaaaattaaagacaaaacatcaggtaaataatattctccttgagcattatcatttttaacttgttctaacttctcaaatagtactcgattattaaaggcaaaaatacctgaactaatttctttaatcgcacgttctgagtcatttgcgtctttctcttcaacaatacgctctaatattccattatgatttctaataattcgtccataaccataaggattgatagtagaagcagataatacagtaacatgtgattgtgtactttcatgatgttcaataagtgattgtaaagtttggtatgtaataagtggtgtatctccacatactactagagtagttccttctttatctgctaaatgttcatgtgccattttcacagcatgagctgttccaagttgtttatcctgaaaactatataatgattgattacccaatgtatctttcacactctcagcgccatgaccaataatagttacaatttgatcaacgccagcttgttttacgttgttaagcacatgttcaaccattggtttgccagcaacctcatggagcactttatatttctttgatttcattcttgtgcccttacctgctgccagaataatcgcatgtctttgcatgaatgctaaccctccattaaaatttacacttcatagttattatagttgaataacaaagagagtttcaacttataaaaggttttgttaatcattcattaaaggtttgataattttagaaattcaaataagttgttatgctttaataaggaaaacgaggtcatcaaacccaacagttacattacatattcaacctctttattaatcattggtattttatttcagtgtctaaatcatcatattatcaatcataatttatgacgataaagttataatcatacagacatattaattacgtctatcataagtaaatttttatagatgaattgttgtcagagaaacatatcagtattttacttctataattcttatttatcgttaaatgtttatttcgttttcgtttatggaaatacaaagtacattaaaaataacggagggactacaacttcaataagaagtcgcagtccctcccgaacaat

SEQ ID NO: 3452 - DNA, 3005 bp, Artificial Sequence
  Description of Artificial Sequence: synthetic nucleic acid sequence
gtagcctaatggcacattataattatattcagaaattttgatttttccattcttatatactttttcaaccactgctacgtgcccataatagcctctcgttgattgcataacagcgtattttcgaggcttatgtccagttgcataaccagatcgacgtgcattgctataccaattcttagcattaccccatcgatttgatacaggtttacctaattgagcacgacgtttaaatgcccaccaagtgcattgttttttaccataataattatgtgcagcatgggaaatatgcgtttgttcaatagcttgatatgagagtgttccagtaaatgtaatcattgtagcgataataatacgagataataattttttgaatttcatttctttctcccaaaaaatgtatttatttaatgacagtaataataatagtatttaaaaatgcgctatacaatataagaaatgaattatcaaagtaaatgtaacattaatgaaatatacatatttttatcgtaataatcgtttgagtaaaaaaagagtgagactacattcaaataaaatgtaatctcactcaggtacgagatgattaactccatgtatataagtatgcgtaaatgttaaagtcatgtcataacatcaatttatactttagtgaattggttgaaaacagctagtgcccgtttgatactcgtcactggtatgttttccggacatggatgatttcgaaaatatgtcaagatttctttttggctcgtcacgtctttagggaaattgatatcttgattaatccaatcaaccaattcacctaatggcgtgtcatcacctaggaaattttgcataaattcgtaaaagctcaatatctcacctcataatatattttatgagccgacttttattttaacatattttcgttttttaaaatacttgaaaaactaaataaaatgttttgaattatagtttttaaatatattaatcgctagaaaggtcaattttgttgtataattaaacttactattgaattatatcaaaactagggggatatgcatggatataaaacacatgaaatactttgttgaagttgtcaaacaaggtggtatgacaaacgcttcaaaatccttgtatattgcgcaaccaactatcagtaaagcaattaaggatattgaagcagagatggctgtccctttatttgaccggagtaaaagaagtttagtacttactgatgcaggtaaaatttttttcaagaaatgtcaagaaatcatcgcactatatgataatttgcccactgaaattaatagtttgtatggtttagaaacaggtcatatcactattagtatgtctgcagtgatgagcatgcgtaaatttattggcgtattaggagactttcatcaactttatccgaatattacgtacaacttaatcgaaagtggtggtaagacgactgaaaaccttatacttaatgatgaagtggatattggtgtgacaacattgccagtagatcatcaaaaatttgaatgtatatctttaaacaaagaagaactgactgtagttttaaataaagaacatcctttagcacaaaaatcttctattaaaatggaagaattagctgatgagaacttcattttatttaatgaagatttctatctcaacgataaaattattgaaaatgcgaagaatgctggattcgtgccgaacatggcctcacaaatctcacaatggaatgtgattgaaaatcttgtcattaatcaattaggtatttccatattgccagccactatagcacaattacttaatgatgacgtcaaaattgtacatttggaaaatgcacatacaacttgggagcttggtgtcgtttggaaaaaagataaacgtttaagtcatgctacaaataaatggatagaatttttgaaagaaagattatccgaagaataatataaatataataacaaacaatgcatttaataaaagagcgaagttgttaaagatgtgaaataatatgtttttacaaagtcatattacaacgaaaacgtagggttttgaattataaattaattctgccctacgtttttttactatcaattagttctcagcactattaatttgctagcgttttcatagatttaaggaatataaaatatcatgaataaatatttttaatatataatagcaaacactataatagaaaatgtcactaaaaaaatacagtaacaatttggacacatttttagaaaggggtgttgttgatggaaaaagcaaaatttgtcattaagttaatacttcaacttgcccttatcatgcttattacttttataggcacagaagttcaaaaattacttcatatacctctagcaggtagtatcgtagggcttatgctttttttcctattgttacaatttaaaattgtacctgaatcatggattaatgtaggagcagactttttacttaaaacaatggttttcttctttatcccatcagtggtaggaattatggatgttgcatctaatatcacgatgaattatatattattctttattgttattataattggtacatgccttgtagcactatcatcaggttatatcgctgaaaaaatgctagaaaaaagcaatacacgtaaaggaactgatcactcatgaatgaatacttacaagcagttctaatgattttgttaactattgttctgtactatgtttccaaaaagattcaagataaatacaataatccactattaaatccagctcttattgcatcaattgcaataattattgttttattggtttgcggagtaagctataaggggtatatgaaaggtggtacctggattaaccatgttttaaacgctacagttgtatgtcttgcatacccactttatcaaaataaaaagaaaataaaaaaatatttaacaattattttcacaagcgtgttgactggtgtagttctcaattttgtgttagtatttacaacgttgaaaatctttggttattctaaagacacaattgttaccctgttaccta

SEQ ID NO: 3453 - DNA, 3350 bp, Artificial Sequence
  Description of Artificial Sequence: synthetic nucleic acid sequence
gttatcctcttgttaaaaaacattttcaatttctaatatttttaaaaattcactagctgcatattttaatgaagattcatcaatgtcaaaatgaggattatgatgaggtgcagtaatgcctttgtctttattaccacaaccagttaagaagaatgcaccaggtcgtactttaaggtaatgtgaaaagtcctcaccaatcatcattaagtctgactcattaaatcttaaatgtaaatcattagctgcttgtttgactacatcatatgattgttgatgattgtgtactggtaaataacctttaatatattccaattcatatgtaatatcgtttgataaagataaaccttgtaagagcttatccattttattttgaacatgactttgtaattttgtgtcaaaagtacgtacagtacctttacaaaaagctgtatctggaataacactatctgttgatcctgcttgaatcattccgaaagtaagaacagcttcctttactggatcaattgttcgagaaattattttttgggcacttaaaataaactcagccataatgacaatagggtctattgtttcgtgtggttttgcaccgtgaccaccttttccatatatagtcacactaaattcatctggtgaagccattattgctccaggtctagaatagattgtcccagatggataaccactccataagtgtgtgccatatattttatcgacattctgtagacagccatcatcaatcatctcttgagaaccacctggcataatttcctcaccatattggaatataaaaacaacattacctttcaataaatgacgatgctcatgaacaatttcagctactccaagcaaaatagctgtatgtccgtcatgtccacaagcatgcatgcaccctttattttttgaacgatagggtacatcatttaattcttgaacaggtagtgcatcgaaatctgctcgtaatgcaatcgttggtccatttgaatcagatcctttaaaagttgcttttataccattacgtccaactggtgtttctatggtgcatgctaattggctcaattgatttacaataaaatcatgcgtacgtttttcctcaaaagaaagttctgggtattgatgcaaatatcgtcgtaattgcaccattctcttttctttattacttgctaattgaaaccaatcaaacacatgtatcacttcttccatcttaattattgatattagtatatcattattgttttagcttaaatagactttgttttgttattaagatatcacacgttttttacactatctattaagatttggaaacattaaaatgattaaatataaatgaatagccccataaaaatacaacacaaatcataatacctcacttaaaattaataagaaaaaatcgtccataaaatttttgttattaactgttattatagaagataaagtttatgtaaaagtattcaaaaatatgtagaatactaaaatactaggtagtgatgtgaattaggcgtatttctaagaatttaattggtatacgacattttaatattatatgaagttctggctaaaggaatattagaattagtaattatagtttattagaagtggaaaaaattaaaaagtaagaaaattattataaaataataccttaacttatatgtagaaatataaaattattatgatatagtttgttataatttttgatgttcacagttaatcacattaaaatagagttatcaataatataagttatggggtatttaagtggaggaaataagaccaataacctatcaagataaagaggcatactattattatattcaagagtggtatgaaaatgaggaaaaagtggtaccagggaatacagatattgccaattatagttcatttaacaatatggttgatcggcttaattgtagtgaagttgatgagggttttgtaccgactacaacactattttattttaaagattcaattattataggtgctgttgatatcagacatcaattaaatgataaactatctaatattggtggtcatgtgggatacggtgtagctaaatcttatagagggaaaggttacgctactatccttctagaaaaggctttagatgaacttaagacattaaatgtagaggtcgtacttatgacttgtaatccacttaattttgcttctcaaacagtgatgaagaaatgtggtggatatcaaattgaatcctatattaaaaaaaatggtaaacctgttcatcgatatcatatacctaatacaaaataatcatgattattaagaatatattgtgataaagcaaatatatgatttttatttttaaaatgattagaagaaaagagctttttaaagtcaatattatttgagataggagcttagacttttaagtttatttaagcaaaagaattttaatggagacttacgatttaacacatcttgttatattaaactttgtgaaaaacttaaccatctaaataatcctatataatacattaaacgcgtgggggggattcataataatgaaatatatagatgagcaaacacaagctcaattattagacatgaatgaagtcattttagaagtagaaaaagctttgcaagctttttcagagaataagacgataacgccattaagatatgttttgccatttaatgagcaaaatcgttatttagtgatgccagcattatcagatgaattaaatatcgttggacttaaaacagtctcatttgcacctgaaaattcaaaaaaagggaaagcgactattactggatcagttattttaagtgactatgaaacaggagaaacattgtctatattagatggtggttttcttactaaagtaagaactggtgcaatttcaggtgtagctactaaatatctagcaaaagaaaacgctaaaacacttagtgtaataggggcaggtgtacaagctgaaggtttaattgaagcgatacttgctgttagagatattgaaaaaattcacatcgcaagtagaacgttcgaaaaagcagaaaaatttgctcaaaatatacgaaatcgatttaatattaaagtgagtgtatttagatcggcagatgaagcgatagacagtgcagatattgtagttacagcaacaaatgcaaatcagcccgtttatactcattctttacatccaggcgtgcatttaaatgcagtcggatcctttaaaccagatatgcaagaaataccttcagaaacaatgcttgttgctaataaaattgttgttgaatctatggaagcagctttagaagaaacaggtgatttaaaaattcctcaagcagaaggaatattaactaaaaatatgctacatagtgaattaggcgacattatttct

SEQ ID NO: 3454 - DNA, 3196 bp, Artificial Sequence
  Description of Artificial Sequence: synthetic nucleic acid sequence
gtgagggtgcttctggtaaagatgctatcactaaagcgcatgagctaaaaccagatttaatattaatggatttacttatggacgatatggatggtgtagaagcaactactgaaataaaaaaagatttacctcaaattaaagtagtcatgttaacaagctttatagaggataaagaagtttatcgtgcacttgattctggagtagatagttatattttaaagacaacaagtgcaagtgatatagctgacgctgtgcgtaaaacgtatgaaggtgaatcagtatttgaaccagaagtgttagtaaaaatgcgcaatcgtatgaaaaaacgtgccgagctttatgaaatgttgacagaaagagaaatggagatcctattacttatagctaaaggatactctaaccaagagattgcaagcgcctctcatatcaccatcaaaacagtaaaaactcatgtaagtaacatactaagtaaattagaagtacaagatcgaacacaagcagtaatatatgcgttccagcataatttaattcaataaattattaaaggcgaaagtaaagatacatctatcgatactttcgcctttcaatattatcagtcgcttgtgtgatgttcttctttagattgatgattgatattatacgtgtcatcttcattagagatatctacatctttgctatcttcatagtattcataagtcgtattttcgttatagtgattttcattgttatcatcatgtttaatagcggcttcttcaggcgtgtgaccagctatgacttttctttggtgaataattgcattgatttcagcaccgataataataataaagcttgtgatatacaaccataagaataaaatgataataccagctaaacttccgtatgttttcgaatagttactaaagtttgaaatatagtaaccgaatgcaaaggaccctagtaaccaaataatggaagtgaaaatagcgccaggaataacagaacgtaattttgttttaacattaggtgcaactgaataaagtacagtaaatatgatgaaaataataatcaatggaataacaattcgtactaaattaaaaatccattcaatttgattatcaatacctagtggtccaaataaaaatttattaatgactggacctagtgttataagtactacagcaacaacaaatactgcacctaaaacaagtgtatatagaatacttaataatttaactactacaccgtttcgagaatcctcaacgtcataagcaacattaaatgagttaataatagcggacattccatttgatgctgaccaaatagctaaaattaacccaactgacaaaatacctccactggcagtgtcagagatatctttaacaattccaccaacgatgctagctgtttcttgatcagggacatattgacttactttttgattaatctgattagcatcaatcgtgataaattgaccaagtagcgtaagtaaaaaaattagcattgggaaaagtgctaatacaaaatgatatgtcatctgtgctgctaaacctgcagcgtcatctttacctatcctataaatcaggtaagaaaagaaattagagttttcggtgtattttgctggtttattcagccgggaaacaaaaaatacttgattcttttttttaggtttcttagattggaattcttgaggttctatatatgtacggtcaacttctatttttttattctttttatgctctttatcttctattgaattaagatatttagaagttgttttctctttttttgacataacaatctcctttgctttttatgttttacttttaaaattgatattcccgtatttgcggtatagtaaaacaaatatggttttatttatatatgataaatccaataccctttaaaaagtaatgtatttttaacactcaatgattattttggcctaaattaaatagaaaggcaatagtttttaaatattgatttatagtttttaacatgagttaaagtattaaacaagtgcgagtcaaaatttaacaattattgtaaagtttataatcaataaagataaaaagagtggagcagaatccatctaaaatgaattccgttccacttcatagttattaaatatcataaacttatatgcgtacattttccaattgatgtcctactttctctgaaaatgctacgcatttgaaagtttatttacctaagcgttgatttttacgatttacaaaagtttctttggcatctttaatagaacgttctaattcaggattattacgacgtatttcatctaatgtatctttccaatacattacttcatctttgatgctacttatttttgaaggtttacgtgtacgatttccttctttgatgtctttgaatgattgttttaaagaatgacgtgtagatttatcagcaagagcagccgcgccaccaattacggcaccaattaaaataccaggtactaatttattttccatagttgaattacctctctttcaaatttgcatcttttacgatgtagtctattaaattatcacaagatgattgcaccatctcgaaaacaccttcaaaattatttgtgtagtatggatctggtacatcactctcttccatgttactaaattctagcaatttgaacaattgtccttgtaaatttggattgatttgtttgatattgtctacgttactttggtccatagcaataatatagtcaaaatcatcatcaggttcgaaaagttcactcaccataccatcataaggaatatggtacttctgtagaattttttgtgttccgttatgtggaggttcgcctaaattccaacgtcctgttcctctagaatgaacttttatatctgaaatacctctttcttgtagtctttgtctcatgatagcctcagccattggagaacgacatatattaccgagacatacaaatgctacatgtatcattagtatcactccaaactatgtatttatatacaaatagctcatattattacaaagttcaaacttttatacctaaaaattatattgaagatttcaaagacagtttaaacgaacttggattagctaaagaaggtaattacgaatattgtttctttgaaagtgaaggtaaagggcaatttaaaccagtaggtgatgcaagtccttatatagggaagttagatagtatcgaatatgttgatgaaataaaacttgagtttatgataaa

SEQ ID NO: 3455 - DNA, 3132 bp, Artificial Sequence
  Description of Artificial Sequence: synthetic nucleic acid sequence
gtatctaagcctaaagctaatgaagcagtagtgacgaacgagtcaactaaaccaaaaacaacagaagcaccaactgttaatgaggaatcaatagctgaaacacccaaaacctcaactacacaacaagattcgactgagaagaataatccatctttaaaagataatttaaattcatcctcaacgacatctaaagaaagtaaaacagacgaacattctactaagcaagctcaaatgtctactaataaatcaaatttagacacaaatgactctccaactcaaagtgagaaaacttcatcacaagcaaataacgacagtacagacaatcagtcagcaccttctaaacaattagattcaaaaccatcagaacaaaaagtatataaaacaaaatttaatgatgaacctactcaagatgttgaacacacgacaactaaattaaaaacaccttctatttcaacagatagttcagtcaatgataagcaagattacacacgaagtgctgtagctagtttaggtgttgattctaatgaaacagaagcaattacaaatgcagttagagataatttagatttaaaagctgcatctagagaacaaatcaatgaagcaatcattgctgaagcactaaaaaaagacttttctaaccctgattatggtgtcgatacgccattagctctgaacacatctcaatcaaaaaattcaccacataagagtgcaagtccacgcatgaatttaatgagtttagctgctgagcctaatagtggtaaaaatgtgaatgataaagttaaaatcacaaaccctacgctttcacttaataagagtaataatcacgctaataacgtaatatggccaacaagtaacgaacaatttaatttaaaagcaaattatgaattagatgacagcataaaagagggagatacttttactattaagtatggtcagtatattagaccgggtggtttagaacttcctgcaataaaaactcaactacgtagtaaggatggctctattgtagctaatggtgtatatgataaaactacaaatacgacgacttatacatttactaactatgttgatcaatatcaaaatattacaggtagttttgatttaattgcgacgcctaagagggaaacagcaattaaggataatcagaattatcctatggaagtgacgattgctaacgaagtagtcaaaaaagacttcattgtggattatggtaataaaaaggacaatacaactacagcagcggtagcaaatgtggataatgtaaataataaacataacgaagttgtttatctaaaccaaaataaccaaaatcctaaatatgctaaatatttctcaacagtaaaaaatggtaaatttataccaggtgaagtgaaagtttacgaagtgacggataccaatgcgatggtagatagcttcaatcctgatttaaatagttctaatgtaaaagatgtgacaagtcaatttacacctaaagtaagtgcagatggtactagagttgatatcaattttgctagaagtatggcaaatggtaaaaagtatattgtaactcaagcagtgagaccaacgggaactggaaatgtttataccgaatattggttaacaagagatggtactaccaatacaaatgatttttatcgtggaacgaagtctacaacggtgacttatctcaatggttcttcaacagcacagggggataatcctacatatagtctaggtgactatgtatggttagataaaaataaaaacggtgttcaagatgatgatgagaaaggtttagcaggtgtttatgttactcttaaagacagtaacaatagagaattacaacgtgtaactactgatcaatctggacattatcaatttgataatttacaaaatggaacgtacacagtcgagtttgcgattcctgataattatacgccatctcccgcaaataattctacaaatgatgcaatagattcagatggtgaacgtgatggtacacgtaaagtagttgttgccaaaggaacaattaataatgctgataatatgactgtagatactggcttttatttaactcctaaatacaatgtcggagattatgtatgggaagatacaaataaagatggtatccaagatgacaatgaaaagggaatttcaaatgtcaaagtgacgttaaaaaataaaaatggagataccattgggacaacgacaacagattcaaatggtaaatatgaattcacaggtttagagaacggggattacacaatagaatttgagacgccggaaggctacacaccgactaaacaaaactcgggaagtgacgaaggtaaagattcaaatggtacgaaaacaacagtcacagtcaaagatgcagataataaaacaatagactcaggtttctacaagccaatatataacttaggtgactatgtatgggaagatacaaataaagatggtattcaagacgacagtgaaaaagggatttctggtgttaaagtgacgttaaaagataaaaatggaaatgccattgggacaacgacaacagacgcaagtggtcattatcaatttaaaggattagaaaatggaagctacacagttgagtttgagacaccatcaggttatacaccgacaaaagcgaattcaggtcaagatataactgtagattccaacggtataacaacaacaggtatcattaacggagctgataatctcacaattgatagtggtttctacaaaacaccaaaatatagtgtcggagattatgtatgggaagatacaaataaagatggtatccaagatgacaatgaaaaaggaatttctggtgttaaagtaacgttaaaggatgaaaaaggaaatataattagcactacaacaactgatgaaaatgggaagtatcaatttgataatttagatagtggtaattacattattcattttgagaaaccggaaggcatgactcaaactacagcaaattctggaaatgatgatgaaaaagatgctgatggggaagatgttcgtgtaacgattactgatcatgatgactttagtatagataatggttattttgacgatgattcagacagtgactcagacgcagatagtgattcagactccgacagtgactcggacgcagacagcgattctgacgcagac

SEQ ID NO: 3456 - DNA, 3330 bp, Artificial Sequence
  Description of Artificial Sequence: synthetic nucleic acid sequence
gcatttgctaagggacttgtttcatcgtttgggccatttccttcagcaacaatacaacatataggctatggcgccggcagtaaggattttgatttccctaatatattaagggttattcaatttgaatctgaattcgagcaacaagatagcgtccaagtaatagagtgtcaaatagatgatatgacacctgaagcattaggttattttatgaataatgcgttagagcaaggtgctttagatgcttactatacgcctatatttatgaaaaaaagtcgcccaagcacgcagttaacgttaatatgtaaattacatgataagacatatttcgaacaacttatcttacaagaaacaagttctttaggcgtcagaagtacttctgttaatagaaagaccttgaaccgcgcattcaaaattctttctacacaacacggcactgtttccattaaatttggcctacaaaatggaaaaattatgaaaatgaaacccgagtatgaagatttgaagaaaatagctaaaactacaaaacaaccgtttcaagtaattcataacgaggtattacaacaactctatcaaacatatcatataggaaatatacttcaataaattagttttattcatttaaattttgcacatcaaaaaaggatagggacagtcattctacataaaacagtcacctatccttttattctattcaaatgctcgatatagttcttcactagaattattccacatttcaacgttatgattttgtagaaattcttttaaaatttgtttgttatcatcaccgatttggtcgatgataaattgatgtttcatagacttatccatcatattaacatgttctggcatgctcttataaccacgtctaatacttttgttaactaataaatagcatgcagtcacacccgcataatatggcccttcttcactacgttcggtcgtcacccaacatagccagtatgctttagcctcctcaccttcaacttgtgatttgtcagtaatccacttgacacccttttcaacttcagcacgtgcgtgcataccaccaatatcaacaaatgccttctgattttcaacatctataaaaaccggggcaatattatctaaactaatcgaaccaatattggttcctttatgaccatctagtggatcattttttataatattgaaattgaaaccttttttctcagacaaacgagatacctcctaataagtcatcaaataaagactatatatcttattcttaactgttaatttaattcattaagtaagttaataatagaacctttaatttgataatctttaatttttaaaatcatctctttaggataatataatttatggtcttctctattaatccctgtaatactattaatcaccaatgattgattacttatttctgtaattccaccattactttttaataaatgaatcggtttgcgatttgagcctgggcgatcataatcataaggtaaatctgaaaatgcttcacttacaaagtaataatcaggattaataccacccgcttcaaataattcttgcaattccgaaatggtaataattgaaccgtcgaaaggaatatatttaaataaatctcgattgataaaccgtcttgataaatcacttaatattgtatcattttcatgaatccatttcttcaagtaatacaatacaactgcttcatcaagttctacatattgttcaatcgtcattgttccttcaaagaatggtataaagtcttttggatacattttaaattcatatccttcattataaagctgcttagctcgttttaaacaattgtttaataaaacttccccaccacggcttactggatgaaaatatatttgccaatacatttgataacgactcataataaaattttcgacagcatgcataccactatctttaattaacacttcttctttagatggtctcatcaaccttaaaatacgctccatatcaaatgagccatacgttacgcctgtaaaatatgcatctctttgtaaatagtccattcgatcagcatcaatttgtgaggaaatcatagaaataacaagcttattatcgtgcgttttattaattacatcagctacttgtttaggaaagttatcagagactcgacttagtacaccattaacctcagtgtctcctgtgataatagcttgtgtaaatgcttcatggtctgtattaaatattttttcaaaactatgagagaaaggaccatgacctaaatcatgtaacaacgcagcacacaacgcaagtggccgatcagtattatcccacgcgtcttgtcctataaatgtctcatcaatcattcggcgcacaatttcataaacacccaaagagtgtccaaaacgactatgttcggctgtatgaaatgataaatacaaagtacctagttgtttaatacgtctcaagcgttggaattcttttgttttaattaagtcccaaatcaattgatcctgtacgtggataaatcgatgaattggatctttaaataccttttcttctgttaatttactcgttgcatatgatgatagcgtcatactttccctcctatcctatatattccaaaaaacatttattttttgttcctcatattactagacgaaacaatgttaattattcatatgtttgttaaaatgatttcttcattaaagctaaatccatgatttcaccatacatttcaggttgatatgagcgaataatctcgaatccatgattttgataatattcgatgccattactattattgttatcaacttctaaataaactgtttcatactggtctttaaaccttttcaaccccgcttctagcaaacgagttccataacctctatgttgagattcaggtctaacatagtgtgcagataaataaagctcttcaccataaatgaaatttgcaaaaccaacaatctcactatcttcttctgccactaaaaataattgctcatttagtctcttttttaaatgcgtttcattatatgaagcggccaacagttcattaactgttgaagcagcataaatatttaaatatgtgttataccaagcttttgtcgcaacatctcttatcgctacaacatctttttcagttgcttgtctgacactatacatgtgacttctcccctaactatttacttcactattaatcgatgggtggattggtaacttgtgcaaataattgtttaaaataattaaatagtgactcaggcttatcattaagaactgcaataggtgcatcatatcccatcgctccgatgggatcttttttattgatgactaaatctgtcatatatttattctttagagcacagtggcgatgatatc

SEQ ID NO: 3457 - DNA, 3546 bp, Artificial Sequence
  Description of Artificial Sequence: synthetic nucleic acid sequence
atttttcaatcatcgataaacttaaactaattcattctcatattgggagatcttaatattttaattcatatataaatagtaattttagacactgatcaatcttttaagttggttattttaaatatcaggttccaattttttcttttacaacttaacaattctacttacctcatataccttctaaaacaggtttcataattaatgataaatgacgtttgtatcacatcaaaggcatttgcctatatttttcaaaaaatgtgtccttttttttcaatctatttcgatatatatagtgaaaggaggttttattatgaatgaagtcaatcaagtgacgattatctttactcaaatcaaacataattctgaaggtaaagtagtcgaacataagcgtcgtttttctaacattaatccgcttgtttctaatgatcaaatcaaatcttttcgttccatcattgaacgtatcagtggcgaagagtatgacaaagtcgagatcgttaaaacagaatctttaatttaaggaggatacatcagtatgtcaaaaactttggaactcgtatttaaatcaaatcttaataaacccgtcaaattactattacccgattttaacgctattactacagaacaattaattaaagaaagtatgaaccaacttttagaattagacattttaagatttagtttgggaaagcctgtcaaaatttatgctgcacaacttattgataaaagtacaactgttatatttgaagataaaaattaattcataaaacattatttttgacgctttatttaaagtactaaaatcataaaaaagacttatcgaagaacaaattttttaaaattgttcaagtctaaaaaagaacttaatttacattgttcttttattaatatgaagtgagatatcaaattcaaaatgatgtctcgctttttttaattctaaaacttgtttaatgtgcattttattataatgattcatcaaaatagtatcggctgtatgacacctcggaacattcacaacttatttctatactttgcttatggctcaatcattttagaaacatgattatgaatggtatgataatcatattaaattgagaaagttggtttttatcattgttttttctatatcttttaggaatttttgttggcatgttacttcctattcaaacttcaatcaactcaaggctaagccaatttacccgttcatctttttatgcttcaaccatatcttttgctgtcggaacaatatgcttacttgtgcttaatatcattattcatccacaagtattaacaccagaattcttttctaagcaaacacttaactatacttgggtcctaggaggactattaggtgttatctatttaactggaaacttattattattaccaagattaggcgcagcacttactgttgttattacggttacagggcaaattattatgggtgtaatcattgatacatttggattattgggcgcccatcaacaatcttttacattatttaaaggtgttggaattatatttttaattactggaattatatttatgaattatgttcgtagacatcctgttaatagacataagaatacaccaatagtattctggttgcttattggattcgtatttggtttcgctccgccaatccaaacaacaatcaacagcacactggctcaacacacacactcatccatatttgcttcactcatatcatttagcgttggtacaatagcgttatttatattaacattagtatttaatcgtagtctgaaaatatcatctactcataaaacactaggtaagattaaatctatttattttattggagggatactaggaatggcattcgtaacatctaatattattttaatgcctttcttaggagcagctttaactactataattgctatgatgggccaaatgattatgggtattattatcgatcatttcggtttgttgggttcacctaaaaacaaaataacatcacgtaagttaggtggattattatgtatagctataggtattattttattacgattattttaaattccttattctgaataaaaattatccgcttatattaatgtagattcctcatacaaataaatgtctatttcgaactgccaacaaagattttgtctttgttggcagtttttatgagtgattcttcttatagtaacatttatgtagaatcatatattttaaaattaaagatagccttctatttttcaatttattaaattgatttactttattttttgaaataaaacaatagtaattgtgcaccatattgttccgtctcttctcctgtagtagctaataaacgtatcgtaccttgctttaatgcgtttgattgttttaattcaatcatcgcgatgaccatcgccataagaccacctttcatgtcagtggtacctctgccgaataacttgccatctttatctgtgagttcaaatggaggaaaagtccaatcatcatggtcaccagcatctacaacatccatgtgtccactgattgctaagactggagcgccactaccaatttcagcaactaaattagcgcgtgaatcattaactttaacaatcttagaatcaatatcatattgacttaacaggtcttttaagtactcacatactttaatttcatgatcattctcagtttgaatcttgacgatatcagctaataatcttattttgtcttgctcactcaatacagtcatttcacagtcctcctcatttttagtaatgattttcactttttaataaaaaataaaaatccttgtacacttaatattatcaaaaacttttattaattaaaaattatatgctaaaataaatggatttttaataaaaaataaatattaacttaacatttcttataaaaaacaacaatgtatagaaatattaaaaatttttcattatttatagtttgaatcgtgttataaaatgaaaagctatgagattaagatgtaataatacacacatatataaatataacttcgtgccacgcagacggttaaaatcatgtataatagctaataatacatattaggagatacataattaatgatgaaaaataaattaacattaaaagagaatctatttatcggctcaatgctgtttggtcttttttttggtgctggaaatctcatttttccaattcacttaggtcaaactgcgggggcaaatgtatggaccgccaatttaggatttcttatcacggctatcggactaccttttttaggaattatagcgataggtgtatctaaaacaaacggggtctttgaaatttcctcaaggataagtaaaatatatggttatttgttcacaattggcttgtatcttgttataggtccgttttttgcgttgccaagacttgcgacgacgtcatttgaaatagcattttcaccatttatttcatctggtacggcccaagcgttgttgcctatttttagtattttattcttcggagtagcgtggttattttcgcgtaaaccttctaaaatattagactatattggaaaattcctttagagcacagtggcgatgatat

SEQ ID NO: 3458 - DNA, 3945 bp, Artificial Sequence
  Description of Artificial Sequence: synthetic nucleic acid sequence
gtctcgcagtcaagctcccttatgcctttacactctatgaatgatttccaaccattctgagggaacctttgagcgcctccgttaccttttaggaggcgaccgccccagtcaaactgcccgcctgacactgtctcccaccacgataagtggtgcgggttagaaagccaacacagctagggtagtatcccaccaacgcctccacgtaagctagcgctcacgtttcaaaggctcctacctatcctgtacaagctgtgccgaatttcaatatcaggctacagtaaagctccacggggtctttccgtcctgtcgcgggtaacctgcatcttcacaggtactatgatttcaccgagtctctcgttgagacagtgcccaaatcgttacgcctttcgtgcgggtcggaacttacccgacaaggaatttcgctaccttaggaccgttatagttacggccgccgtttactggggcttcgattcgtagcttcgcagaagctaaccactcctcttaaccttccagcaccgggcaggcgtcagcccctatacatcaccttacggtttagcagagacctgtgtttttgataaacagtcgcttgggcctattcactgcggctcttctgggcgtgaaccctaaagagcaccccttctcccgaagttacggggtcattttgccgagttccttaacgagagttcgctcgctcaccttagaattctcatcttgactacctgtgtcggtttgcggtacgggcacctgttatctatctagaggcttttctcggcagtgtgaaatcaacgactcgaggaaacaatttcctctccccatcacagctcagccttatgagtgccggatttgcctaacactcagccttactgcttggacgtgcactccaacagcacgcttcgcctatcctactgcgtccccccatcgattaaaacgatactaggtggtacaggaatatcaacctgttatccatcgcctacgcctgtcggcctcagcttaggacccgactaacccagagcggacgagccttcctctggaaaccttagtcaatcggtggacgggattctcacccgtctttcgctactcacaccggcattctcacttctaagcgctccacatgtccttgcgatcatgcttcgacgcccttagaacgctctcctaccattgtccaaaggacaatccacagcttcggtaatatgtttagccccggtacattttcggcgcagtgtcactcgactagtgagctattacgcactctttaaatgatggctgcttctaagccaacatcctagttgtctgggcaacgccacatccttttccacttaacatatattttgggaccttagctggtggtctgggctgtttccctttcgaacacggaccttatcacccatgttctgactcccaagttaaattaattggcattcggagtttgtctgaattcggtaacccgagaggggcccctcgtccaaacagtgctctacctccaataatcatcacttgaggctagccctaaagctatttcggagagaaccagctatctccaagttcgattggaatttctccgctaccctcagttcatccgctcacttttcaacgtaagtcggttcggtcctccattcagtgttacctgaacttcaacctgaccaagggtagatcacctggtttcgggtctacgaccaaatactcaacgccctattcagactcgctttcgctgcggctccgcatttgctgcttaaccttgcatcagatcgtaactcgccggttcattctacaaaaggcacgccatcacccattaacgggctctgactacttgtaagcacacggtttcaagttctctttcactccccttccggggtacttttcacctttccctcacggtactggttcactatcggtcactagagagtatttagccttaggagatggtcctcccagattccgacggaatttcacgtgctccgtcgtactcaggatccactcaagagagaatatgttttcgactacaggattattaccttctttgattcatctttccagatgattcgtctaacatgttcttttgtaactccgtatagagtgtcctacaaccccaacaagcaagcttgttggtttgggctcttcccgtttcgctcgccgctactcagggaatcgatttttctttctcttcctccgggtactaagatgtttcagttctccgggtctgccttctgacatgctataaattcacatatcgataacatgacataactcatgctgggttcccccattcggaaatctctggatcaacgcttacttacagctacccaaagcatatcgtcgttagtaacgtccttcatcggcttctagtgccaaggcatccaccgtgcgcccttaataacttaatctatgtttccaccatattttgaattgttattcaaaataaatagctaaaactagttattaatcttgtgagtgttctttcgaacactagcgattatttatgaattcaagcttatttaaaactctattcactcggttttgcttggtaaaatcttacttacttatctagttttcaatgtacaaatgaatgttaataaacattcaaaactgaatacaatatgtcacgttattccctcatcttcgtagaagatgttccgaatatatccttagaaaggagatgacaagttcatataatcattgtctaaatttctgatatttggaattttgtcatgatttaaagtctcaagcagtttagctttttttaatttttgaacagtatattcacttggaaaagctacatcatagtgtgtgcctccatttcgaattttcgcttccattgcttcatttgaatcaaaggtttcatatacgacttgtatacctgtttcttttttaaacttcttaattaagctaggatcaatatattctccccaattgtaaacatataacttctcatttgagtgggtattatcttttgatttaaaccaatgactaatcattaaacataaaataccaataactatagcagaaatgataagttgaaaaaatcgcttcattcattaacacctcgcttcatctttttctgacgattaacgatatgttgaataaagtaatatccaaatactccaaacataatagcaataaatattattgtagaaatggcattaatctccatacttataccttttcgagccatagcataaacttctacagacaatacactaaatccgtttccagtaacaaagaagcttaccgtaaaatcatctagagaatatgttaatgccataaagaatcctcctataatcgagggcataatattaggtataataatgctagttaataattgtgattcattagcacctaaatctcttgctgcatttaacatgttatcattcatttcatataattggggtaagacgatgataacaacaattggaatacagaacgctatatgagatgctagcactgttgaaaatcctaaacctaaacctgtgaaatgtcctattgcagtgaacataattaaaaaagaagcaccaatgactacgtctgaagataccattaatacattattcatcgttaatagcgtaaccttaaaccgtttgttgcgtaagtaatataaagcgatcgcaccaaatgtacctataactgtagcaatcgatgcagataaaagtgccactgcaactgtattaaaaatcaccgacatcaaccgatcattatgaaaaagggagtggtaatgttctaaagtaaaatgttcgaagtgactcatattacccgcagaattaaaagaataaatcattaaaaagaaaatgggaatataaagcacacttattaatagagctatatataattttccgtaccatttcacactaatcaccccttcccattagatgattttgattttgtaataatgagtaaaaaggccataaaaataatgagaaaaagtgctatagtggaacctaatccataattttg

SEQ ID NO: 3459 - DNA, 3246 bp, Artificial Sequence
  Description of Artificial Sequence: synthetic nucleic acid sequence
tttttgtaattttactgcttcaatcattttcacaataagttgtttaaattcattgatattaaggtgtaattgagtgtcatctttagcgtggttaatagttaataaagctttttcaaaagattttaatgcgccttttaaattcccacgacgatagtgataattagctgttgcaaacaaaatgagacttactactgcatcatgttttgaaaaagtattttgtgatttccaagcatcttctaaaatatcatgacataggaagtaatgttgatgcttatgaaattgataataataatccattaatgattgatccattagatttcacccataatttaaaagttgtatgtattcatgctataataatttagtgaaatatgcattaacgatgcaatttgatatagaggtagatgtaatgtatgaagtaaaactcgatgcatttaatggtccattagacttattattgcatctaattcaaaaatatgaaattgatatttatgatatccctatgaaagccttaactgaacagtacatgcaatatgttcatgcgatgaatcagctagaaattaatgttgctagtgaatatttagttatggcatcagaattactaatgattaaaagtaaattcaacgatgaatataaccaaaaatccaacactaaaaacatgctgtgcggcttctgcactatgaactgttgtttcaccattaactgttgtagtaaaattagcatccatcgctccagtaattgaaaataccaagaaaactaaaaacaatagactagaaaaactttgtaaaatgattcctatcaatgatgttatattaattgctttattcatcataattctcctttcattttctacgtatatccttacaatcaggtttatgttctttaatataatctttaggatttatatctcgtttatagtagactttctttccctttatttcatatgcaacataaaatagttgctctttatttttgaataatttataactaataataatcaattttccatataaagaagtagatttttccgcttcaccagaaataattaaaggtgttcttgcttcgtcgatcaatatggaatcgacctcatcaataattgcaaaatgtagaggacgcattactctctcttcagcatagttcaccatattatctctaagataatcaaacccaagttcattattcgtactataagtgatatcttgtgcgtaagcctcacgtttttcttcagttgacttactatttaagttcaaacctacagttaagccaagatagttatatagttcagccatttcttcactttgtgaacttgatagatattcattgactgtaataacatgtacacctctaccagctaaagcattcaaatacgtcggcatggttgcagtcaatgttttcccttcacctgttctcatttctgcaatatcacctttatgtatagcaataccacccattacttgtactttataaggaatcatattaaatactctctttgacccctcacgtacaagtgcataagcttcaggtaaaattttatctaaataatcattttgtttttttacatcttgatgatttagtgatcaccacaatccttttatcatgtaactaacctagtaaatttaagtttcaacttttacttatagtgtttgactttaattataaatcaaaattcgtcataataagacgtgctaaatttacaatagctaaaacatgatagaggtgacttttatgtctacgaataatgagattgaatttaaacaaatactagatcaagatacttactcaaaaatctatgaacactatttcaaaaatcaatcaccttttaagcaaactaatttctatatcgacacagagaattttaaattaaaacagcatcatgctgctttgcgtataagggtaaaagattatatgtttgaaatgactttaaaagtccctgctgaagttggattgacagaatataatcactcagtaaatatagaacctgaacttgatatgtcacttcaactttctcaattacccaacgatattagaaatattttagaacaggactttaatattttagaaaatgagcttaaagtactaggaaacttaactacctatcgtttagaaaccgattatcaaaatgaattactagtattagataagagtgaatatctcggcaaaactgattatgaattagagtttgaagttcattcttatgatgaaggatattcaaaatttaaaactttacttcaacattttaatcttcaacatcaaaaacccttgaataaagtgcaacgtttttttcaagaaaaacaaaatgcaagtgataaagagtaacagttgtcgataaggcaaattacttttaaatgtaaaaattcatgttatattagatatatattaatggaacacggtgatattatgtctaaaacaccatatgagttgattggtcaaaaagccttgtatcaaatgattgatcatttctatcaacttgtcgagaaagattctcgtatcaatcatttattcccaggcgatttcaaggaaaccagtcgaaagcagaagcaatttttgacacagtttcttggaggtcctgacttatatacccaagaacatggtcatcccatgttaaaacgaagacatatggaatttacaattagcgagtatgaacgtgatgcatggcttgagaacatgcatactgctattcaacacgccaaacttcctgcgggtgtaggcgattacttgtttgagcgattaagacttactgcaaatcacatggtaaattcctaaatttaattgtaggtgaaaatacatggctgaagaattaagaatcatggagaataagagtcgtgaagatactaatctatcacctgttagcaaaatagaaatctattctttttttgatccttttagcaaagattgttttaaattatctgcaatcttatcaaaattaagaattgaatataataaatatataaaggtaagacatattttaaacccttctttaaaggtattaactaagtgtcaagctcaaagtacttcagattttgacaatattgcacttgcctataaagccgctgaacttcaaggtcgtatcagagcagaaagatttatacatttaatgcaaaatgaaatcattccaaaacgtgatattattaccgaagatatgatttctgattgtattaataatgccggcattgactatcaagtttttaaagaagacttgcaaaaggacaagttgactgacagcttgaaagttgatcttcacattgc

SEQ ID NO: 3460 - DNA, 3382 bp, Artificial Sequence
  Description of Artificial Sequence: synthetic nucleic acid sequence
tatatcggcactgaaaagcctatgctaaaaaataaaaatatcgcgcttctttttgaaaaagattccactagaacacgttgcgcattcgaagttgccgcacatgatcaaggtgcacacgtcacttatcttggacctacaggttctcaaatgggtaaaaaagaaactgctaaagatacagcacgtgtacttggtggtatgtatgatggtattgagtaccgaggtttctctcaacgtactgtagaaacattagcgcaatattcaggtgttccggtatggaatggattaaccgatgaagatcaccctacacaagtgcttgctgactttttaactgctaaagaagtattgaaaaaagagtatgctgatatcaactttacttatgttggcgatggacgtaacaatgttgctaacgcattaatgcaaggtgctgccattatgggtatgaatttccatcttgtttgtcctaaagaactcaatccgacagaagaattattaaatcgttgcgaacgtattgcgacggaaaatggcggtaacattttaataacagatgatattgataaaggcgtgaaagattctgatgttatttatacagatgtttgggtatcaatgggcgaacctgatgaagtatggcaagaacgccttaaacttttaaaaccatatcaagttaaccaagcattattagaaaaaacaggcaatccaaatgttatttttgaacattgtttaccttctttccacaatgcagaaactaaaattggtcaacaaatttatgaaaaatatggcattagtgaaatggaagtcactgatgatgtcttcgaaagcaaagcttctgtagtattccaagaagctgagaatagaatgcatacaattaaagcggtcatggtagcaactttaggagaattctaaattatagaaggaagtgagtgaaatggctaaaattgtagtagctttaggtggaaacgctttaggaaaatcaccacaagaacaacttgaattagtaaaaaatacagctaaatccctagtaggattaattactaaaggtcacgaaattgtgattagtcacggtaatggaccacaagtaggaagtattaaccttggtctgaattatgcagctgaacacgatcaaggtcctgcttttccatttgctgaatgtggcgctatgagtcaagcctacatcggctatcaacttcaagaaagtttacaaaatgaacttcattcaatgggcatagataagcaagttgtcacactagttacccaagtagaagttgatgaaggcgatccagcttttaatagtccaagtaaacccatcggtctgttctacactaaagaagaagcaaatcgtattcaacaggaaaaaggttatcaatttgtagaagatgctggtcgaggttaccgtcgcgttgtaccatcaccacaaccaatatctattatcgaactggaaagtattaaaactctagtagaaaatgacacactcgtcatcgctgcaggtggaggtggtataccagtcattcgcgaacagcatgatagctttaaaggtatagatgccgtcatcgataaagacaaaacaagtgcattattaggtgctgatattcactgtgatcaactcattattttaacagcgattgattatgtttatatcaactatcatactgaccaacaacaagcacttaaaacaacaaatatagatacgcttaaaacatatattgaagaagaacaatttgccaaaggcagcatgctacctaaaatcgaatctgccatctcctttattgaaaataatcctaacggtagcgtgctcatcacatcattaaatcaattagatgcagcactagaaggtaaaattggcacactcattacaaagtaacgttttaacgtataagtagaaattaatttaatcatattcatacagtgcatcctgttattccactcctctccatttcatacagggtgcacttccttaatcaatcatgtaaaatactaaccaaattcaattgataggcttttattttaggttaactgtcgaaggagatgaaaccgttggaacaagcgatcaatgataataaaaagaaaaaacgttttaactttagaatgccaggtgcatttatgattctctttatcctaacagttgtcgcagttatagcaacttggataatccccgcgggtgcatactcaaaactttcatatgaaccttcatcccaagaattaaaaattgtcaatcctcatcatcaagtaaaaaaagttcctggaacacaaaaggagcttgatcgattaggagttaaaatcaaaatagaacaatttaaatctggtgcaattaataaacccgtttcaattcctaatacttacgaacgtctaaaacaacatccagctggtcttgatcaaattactagtagcatggttaaaggaaccatcgaagccgtcgatattatggtctttatacttgttctaggtggactgattggtattgttcaagcgagcgggtcctttgaatcaggattgttagcacttactcaaaaaacgaaaggccacgaatttatgttgattatgttcgtagcaattttaatgattctgggtggaacactatgtggcattgaagaggaagctgtagcgttctatcctgtactcgttccaatatttattgcgcttggatatgattctattgtctcagtcggtgcaattttcttagcaagctctgtgggtagtacattctcaacaatcaacccattctcagtcgtcattgcttctaatgcagcaggaacaacttttactgatggtctttattggagaataggcgcttgtatcatcggtgccatatttgttattagttatttattctggtattgtaaaaaaattaaaaaagatcctaaatcctcttattcttatgaagacaaagcagcatttgaaaaacagtggtctgtgctccatgatgacggttcttctgagtttacattacgtaaaaagattattcttacgcttttcgtcctaccattccctattatggtttggggcgtcatgacacaaggatggtggttcccagtcatggcatctgcattcttgatctttaccattgtcatcatgtttattgctggaacaggacaatatggtttaggcgaaaaaggcactgtagatgcattcgttaatggcgcttcaagtttagtaggtgtatctttaatcattggtttagctcgaggaatcaacttagtattgaataaaggaatgatttctgacacaatcttgcacttttcatcatctatcgtgcaacatatgagtgggcctttatttatcattgttctgctctttatctttttctgtttaggatttatcgtgccgtcctcatcaggattagcagtactatctatgcctatctttgcgccattagctgatacagtaggta

SEQ ID NO: 3461 - DNA, 3511 bp, Artificial Sequence
  Description of Artificial Sequence: synthetic nucleic acid sequence
ctatttcatgatgatctgtcactataacatctacacctaattcttgtatggtacttatttcatgatgtccctgtataccattatctacagttattattaaggaaatcccttcgtcataagcatttttaaatgctaattcattaggtccatatccttctgtaaatctattgggaatataccaccccacctgagcgccaagtagacgtaaagtagacactagaattgtagtagatgtaacaccatctgcatcatagtcaccatatactagtattcgttcattttgatcgatagctaatttaatacgatcaatggctttttgcatatcacttaataacatataatcatgactaatgttagtgccttcaaatagattttgaatctcctgattatccacaatatttttactctctaataccttttttactataggtgaaagtttaaattgatcactgctactctcacttataaaggtattcggttgagttatatcccaattatattttgatttaatcattataatcgtcctcatttccacaggtcattataccgaaattttattgaaataaaaagtacttgcattttttaaaagaatatatcatttcaattcttcacaaaacttttatcattcaatttgttcattaactgctatctttatgattaaacgctaatatataaaatcaagaggcaggggcataattcctagcaaaatagacagtaaatgagtttttataaattcatttactggcttctttatttacaatacctcgtattgttggctcgctttcttaggggacagcttcagcctgtagtcttcaacttgtcctgctccctcaatagtctcgccaaaatactttgtgtttatatgtaatttcacattgaaatactttaaaaaataaggtctttcgtataatttaataaatagcaataaactaaattaacgaggtgccttatgtataaagattataatatgacttaacttactctaccaatggaaatttcagttcttatccccacacatgatatttcacgacatgtaaatgatattgtagaaataattccagatacagaattcgatgaattcagacatcatcgtggcttaatataaaaaataatagctcaacgagctgaaaataatcaaaaaattataaaaaagacaatttctatattatttcaatagaaattgtctttaattacttatcttggacctttttgttccagcctcttgtaaatttttaaaattattaaaatgtgaagaagttaaactaagattttttcatcgttagatttcttctctttgtgtactactaatttattattttttgtctttttaaactgtcgtttcttaagcatgccccataatggtacagcaatgaaaattgacgagaatacaccagataataatccaattagtaatgctaaagagaaattaaatattgttggtgcacctaatattaatattgcaactacaactacaactacagtcaacactgtattaatagaacgtgtcatagtttgtctaatagagcggttgactatatcatcaatttgatcagtatgcgtaattactttaactttatgcagattttctcgaacacggtcgaaagttacgattgtatcattgattgaataaccaacgatagttaatactgctgcaataaatgttaaatctacttctaatctaaacaaactaaagattgcaatgatgataaatacgtcatgtaataatgcaagtacagaagatagacccatacgccattcaaatcttagtgaaacatagataataatgcctatagaagcaagtattaatgcagttacagcatttttagctagctcttggcctatgagaggtgaaacggtattaatttgtggattatctccaaattcagatttcaccttagcacttaatttattgtcttcctcacgtgataaatcttttttaaactgaactgtggcatttttatttccactaccattaatctgtatttgatctggttccaatccaactgattttacagttttctcaacctgtgcttgtgttatagcatttttagattgaatatctgctcttgttccggatgagaaatcaatacctaagtttaatttaaatattgaaatgataatcaaaccaataattacaattaaaatactaagtgaaataagtggcttagctaatttaacaaagtttaacctttcatatgatgtttttaaatcatgtacatctttaccttcattaatatcatgtctatccttcttcttaacaccaaataaccagtattgttttttaaagaagtttgaagataccagtaatgataacaaccctcttgataagaatactgcggttacaaatatcattaaaatacctaagagtaacatggttgcgaagcctttgactgaactttctccaaagaagaaaagcacagctgcagcgatgacagttgttaagttggaatcaaatatagttaagaatgaacttttatttgcttttgaatacgcttgtttaagcgtgcgtccaattcttagttcatctttaatacgttcatacattatgatattggcatcgacagccatacctacacctaaaactaatgccgccaatccaggtagagttaatacacctgatatgaaattgaatgcgactaaagttaaataaatataagtggttaaggcaatgattgcaactaaaccaggcaaacgatagaaaccaagcataaataaataaattaatgctatacctacaattgatgcaaacatggtcttatcaagagcatcttgaccaaattgtgcaccaacagagttagagtaaatttcttttaaatcaactggtaatgagccggcatttaataactcagctatttgtttcgcttcttcaacaccttttttcccattgaagccacctgaaatttcaacactactagaattaataggttggtctacactcgctgcagatataaatttaggctttttaccttcttgttgctttttagcttctttcttgtaactatcgcctttttcgaaatctaaccaaactaccatgacattgtcacgttttttagaaatcttttcagttactttcttaaatttatctttactttttactttaaatgtaactgttggttgattagtttcttgtttaaattcttgtttagcagagccttgtttaatgtctgaaccagacattaaaacatgatcttcagcatctctaattgttaaattagcttgtgtcgataataatttacgcgcttgtgcttgatccttgatacctgctaattgtacacgaattcgatttggatcttcgatttgtattttcggttctgatacacctagaacatttacacgattttctaatgtttgagatgtagcttgaagtgcttttttatcaattttatctcctttatttaaaggatctacttggaagaggacttcaaaaccaccttgcaaatctagacctaaattaacatttttaactacattcttatacgtcataccctttagagcacagtggcgatgatat

SEQ ID NO: 3462 - DNA, 3103 bp, Artificial Sequence
  Description of Artificial Sequence: synthetic nucleic acid sequence
atttcttaaaatgttgtaagtcttatgtttgcttttatttcacgaatctttttatttatttcaaacaattgtttacatgtgattttaaatcatctcttctaaatacaattaagaatactatacctgtatctgacattcgtcaatagttaaatgaaactcttttcacatcgtcatgtatcattcattattttagtagactgatagcataatgtagcagttttatttatttaattaaaaatattaaatggaaatagaacgtaaggtgacattacaagcagttaattataataatgttgaaattctctcgcctctcatccgagaaaaattgtatgtatatcgtcacaatgtatctactattacacagaacaaaatatttagtttcaacaagttgtagaagcgggacactaattatttaaaaagtgttgcatataagcacatctaaatatgacgtaattgttgcaaatttaaaataacttgaaatgtgataatgactttgctatattaaaattaagttaataaagtattgttcgtaggacaagtaacatagatagttcgatttcagagagcttgtggtaagtgagaacaagtaatcgacattcatgtgaatctacctactatatgtgaacaatcggtaataaccgttattttagttaagcgcaatttgaggtaaatgtttttaatttacttgaaattgttaaatagggtggcaacgcgtagaccacgtcccttgtctgggatgtggtctttttttattgttttatcacacgaagtcatccataaaattgaatatattttatttgggaaaggatgaaggttacatgttagacattcgtttatttagaaatgaacctgagaaagtgaagagcaaaattgaattaagaggcgacgatcctaaagttgtcgaccaagttttagaattagatgaacaacgccgtgaattaatcagtaaaactgaagagatgaaggcgaaaagaaataaagtgagcgaagaaatagctcaaaagaaacgtaataaagaagacgctgatgatgtcattgctgagatgcgtcatttaggtgatgaaattaaagatatcgataatcaacttaatgaagtagataataaaattagagatatcttaattcgtattcctaacttaattaatgaagatgtacctcaaggtgattctgatgaagaaaacgttgaagttaaaaaatggggtacgccacgtgattttgaatttgaacctaaagcgcactgggatttagttgaagaattaaaaatggctgactttgaacgtgctgctaaagtatctggtgctcgtttcgtatacttaactaaagatggcgcattacttgaacgtgctttaatgaattacatgttgacaaaacatacaacgcaacatggttatactgaaatgatgacacctcaattagtgaatgctgatacgatgtttggaacaggtcaattacctaaatttgaagaagatttatttaaagttgaaaaagaaggcttatatacgattccaactgcagaagtacctttaacaaacttctatagagatgaaattattcaaccaggtgtactacctgaattatttacagctcaaactgcatgtttccgtagtgaagcaggatcagctggtagagatactagagggttaattcgtttacatcaatttgataaagttgaaatggttcgtattgtacaacctgaagattcttgggatgctttagaagaaatgacacaaaatgctgaagctattcttgaagaattaggtttaccataccgtcgtgttatcttatgtactggcgatattggtttcagtgctagtaaaacatatgatttagaagtttggttaccaagttacaatgattataaagaaatcagttcttgctctaactgtactgatttccaagcacgtcgcgcaaatatcagattcaaacgtgatgctgcttctaaaccagaattagtacacacattaaatggtagtggtttagcagtaggtcgtacatttgcagccatcgttgaaaactatcaaaacgaagatggtacattaacaattcctgaagcattagtaccatttatgggtggcaaaactaaaattgaaaaaccaatcaaataatcatataaacttaactagatgattacaatattaaaaagttatttaactgtcgataagattctataaacttatcgacagttttttaatatataaaggcgaaattggtatttttatattcaattagggatggatgtctaaaatagtttaaaatgattttcacgatttaaaatactggtataaaagcgattttatagatacggttgtctgacgtcacacaaacgaatgtctaaaaaatagtgaatatttattgtcatagattgagttataaaatcatgaaaatagtacatgaagtagcaagtatttatcttttagataacgcctgtaaaaatataaaatagtggaaattgattttttaaacgttatcattcatattcaaaatatttaacttagtttgtcaaacaacgtttatttttatataaccataaaataatatcataaagaagctatatgaaattcgaagtataatgccaatgtttcatatagctcctattctaaatattaaaatttaataattaaatgtatcaatcgtcctattcatttgatgcatagcctgagagtgggtaatgatctgagtaatcattgtatttgtatgtttttccccaagatttcacggaccattctggtgacttcactctatgtgtatcattatgccatgagcttggttgtgcatggtcatgatctaataaaatataatctaagtgttgaggttctaatttaggataattatatttcgcaatactattactgctagtatcccaactatatgcattaccatcgaattgagtaggtaatgaaacatttaagttatttgccatttgttgatattcatctgaatctttaatgacatttaagtcaccaccgatatagacgggttcatttttagggatattcttgtctttgataaactgtttaatttcactcatttgactctgtctaatgtctttatcttttcctttaaagcatgttggatcttcagcttgtagatgtgttccgataat

SEQ ID NO: 3463 - DNA, 2088 bp, Artificial Sequence
  Description of Artificial Sequence: synthetic nucleic acid sequence
atgcgtttatcaaacgtctcattaaacaatttggtaaacctcaaaaggtaattacagatcaggcaccttcaacgaaggtagcaatggctaaagtaattaaagcttttaaacttaaacctgactgttattgtacatcgaaatatctgaataacctcattgagcaagatcactgtcatattaaaataagaaagacaaggtatcaaaatatcaatacagcaaagaatactttaaaaggtattgaatgtatttacgctctatataaaaagaaccgcaggtctcttcagatctacggattttcgccatgccacgaaattagcatcatgctagcaagttaagcgaacactgacatgataaattagtggttagctatatttttttactttgcaacagaacctataaaaaacatgggcttaaagggttaatttatatagtattactgcaaacattgatttgggtcaaaaattaggggtattaaaaaaatgaatgaatcataattttatcaagctgattggagaggttaaaatgcattatataaaactttagagtatcattaatatcttcacctcagatatacaaaaaactactagcatataaaagatatatcttttatatgctagtagtttaaaagcttaaacaatcaatcgtccattttattaatatattctttttctttatagtataatttttctcgtctttcttctcgtagttttgcacgtttttttaattcttctggcgtattaaactctttttggcttaataagatagtagattgtctagatgcatcgtctttcctgtacatatatgcaccattacggtaggccgctctacttatcaaatgcattccaaccggagatgtaagattgataaaaactagtgataataataatctgacactgaaaaaacctgaattcacaataaaatagatcagtacaccaactacagttagtaatactgacaatgtagaacttttcgttgaggcgtgacttcttagaaagacatcttgaaattttacaatccctattgcactaattaatgcaataatacttcctaagaaaataagtatcgaagcaataagactaacgatgtcttttatgatttccattgaagacacgtccttccccgatgaatcttgaaattgagaccgaactgacaaacgaaataattgcaattaacatgattgaatctaaataagacactgagttaaaaataacgctcatcacaccaacaatagacataacaacagcactcgaggcatcaaatgatacaactctatcagcagtagtgggacctttaattaatctgactagacaaacaagtagtgccataccaaaaatcactaatgcacttataataaatatttgagtgaacatttcaatcatcgtgtcacctccaaaattaaatcctcatactgcttaatactttttagaagattttctttatctttttctgacacatcaatactgtgaataaaaaatttattagtatttttagaaattcgaataactgtcgatcctggagtaataataattaaaatcgttaaaaaagtaatagcccaattactttttaatgaagtttcatatgtgagtaaacctggattaacttcattcgtcttaaataagatgtaatttatggtacttatactagaagtaataagctggtataggtatacagctaaaaatttaatagccacccatatctttttcaaataaaattcttcaccaaaaaagcgatgcagaatataaatcacaattaaaccaattaaaaatccagcaaagaaggttgtaaatttaaattcatcttcatcttgaaagagtacccaaaggaacgcgataacaatatttaatacaacttgcttcacttatgattaacctccttcaaatgtgtatttacattcttttgaaagacatcttctttcatattaagatttgttgcatcctctgttactttcagaacaacaggggctgcaatacccatcgctaataccactacaactaaaacactaagtaaacctttacgataaataggtagtggtctaaattgtacttgttctccgtcagcatcaccaaaatacattataaacatcactct

SEQ ID NO: 3464 - DNA, 2913 bp, Artificial Sequence
  Description of Artificial Sequence: synthetic nucleic acid sequence
gatattgaaaaataggcaataaagttattaaaaacataataactaacgtagcactatgtttagacattatttttaaaaccaacacccctcctttcatataaaaattttgctccgtttttcatattagacattatcactcatcttaacaataactattctaattttttcgaattagacacaaatataaaaatagaaattttatctagtaaattaaatacaagtatatataaatcataaagttaataaatcaattaagtatgtagcaaaatggcaatttgtaatataaaataaagtttattcattttagaatcaccttactaagtgatcaacaaaatttcgaagattgaataagttgtataaagtttattataattaaccatactattaaatcataagtaatctgcatatgccttaaagataaattatatatttaatgattaatgtacaatctaaagttattagtagctggattgataatatagcaaaattcatctactttttcttatacctaactatacaataggaatgtgattcaactttatatatcatatttaggccaagagagtatgatatttaaaaattatgtccgaagtttaagaagcttgatgccacaaatttagaagtttaaaatttatttaattaactttagtatcatccttattctagtggacgctgaaaggaactattaattatgattacagcttataaacacgcacttcatcatccttcacaaattattgaaactgaaatcaatcatagtgcttcatggataaatgtagtagaaccagatagagaagaaattgaaggtttgatggaattttacaatatacctgaggattttattcgagatccgttagactctgaagagagtgcacgtattgaatatgacgaagatacgggatactcgctaattattattgacttacctatcgtcaattctaccaatcggcgtgtcttgtcgtttgtgaccatcccattaggcattattattggaaatggtatcgttatgactgtttgcgatgctgaaaatgaatttttagaaaactttgctaaacaagaagatattaacttgaaatttcacagtcgatttgcacttgaaatactaacaacaatagcaaatcactacaatagaaatttaagattgcttaataaatctaggattcgtattgaaagagaactcaaaaataacattactaacaagcagctttttaaactaatggaagtagaaaaaagtttagtatacttcttagctgcactaaaaggtaacgacacaattattaaaaaactctttcgtcttcctgcaatcaaacgttttgaagaggatgaagagctacttgaagacttggtgatagaaaacaaccaagctattgaaacgactgaattacatcaacgaatacttgagagtatcacttcttcgtatgcttcattattatctaatgatatgaataacatcatgaaaacattaacgttgtttacggttcttttgacccttcctacactcgtctttagtttctttggtatgaatgtacccttaccaattgatgatcatagttacgtgtcttggattattgttgtgggaatttcacttattctagtagctatcgttagtatctttttatggaaaaaacaaaaattataacaacaaatacccttagttatagattagcactcaatctaactaagggtattattatatgtttaaaattgtgtcaaaattttaagtctctactatgattcaacagctgtcttatttgtttttcttcgagaaagtactaaagtgacgacaactgaaacaacaaatgcaattagcattcctattaagtaatgtaaccaaccagcgtgtgtaggatttatagatataaatccaggtaatccagctgtaccaagcgctatcgcttttactttgaagaatgaaatataagccgcacctatacctgatcctgcaacagcacctataaatggatatctcaatttaagattgacaccaaacattgctggttctgtaattcctagtaaagctgaaatacccgccgcggaagcaacaccttttaattttttattttgcttaatgataaagaatgcagctaaagctgcaccaccttgtgcaatatttgacatcgttgcgattgggaagataaatgaaccacctgttttagtcgcatcagcaattaatgtcgtttcaactgcaataaagctatggtgcattcctgtaatgacgattggcgcatataataaaccaaatataagtccaccaatagctccaccaaattcatataaccaagtcaatccatcagataaccaataacctaattgacgagtgacaggccctacaaataaaaatgttataaatgctgtaataaaaattgataataatggcgtcaataaattatctaacacagttggaataactttacgtaaccatttttcaatcgtagctaaaatatatgttgctacgagcataggtaatacttgtccctgataacctacttcattaatatgtagcccaaagacatcccagtgtggaatagcttttccttcttctaaagcttttggaaaatcatatgcactcatcaatccaggatgaacaagtatcatacctagagctgcacctaaataaggattaccaccaaatcgcttagctgcactaaaaccaataagtattggtaataatgtaaaaggtgcatttgcaaatatattaatcatatcagccaagccagaaaattgactatgtacatctatgatagatttaccatcataaaacaaatctttagctgtgaaaatattatttaatcccattaacaaaccaccagctacaatagccggaataataggaacaaagatatcagataacattttcacaaatttttggaatggattcatatgcttagatgatttatctttaacttctgaagt

SEQ ID NO: 3465 - DNA, 3312 bp, Artificial Sequence
  Description of Artificial Sequence: synthetic nucleic acid sequence
ctgatgcaaagctcattgaacactcacccttcctaacccttttttctattcttatttatagtatcgccaatgaggtgtaaagttattttctaattctaaacacacacttaagctatcatatcataactacgaattcgcttataattatttctttttatcactaggagtaaagcgaattgtacttgttaattctaaggcaagttcataaatcatttttgataatacttttgtgttatgtctgacatagtgttcattagatatttcaactaaattagatgccgttaaaactctaattccactatcttttaattgttctttatgtactgctactggtttcgaattcttttcttcatatcgttgtaaaacatctttactataggattctgagctacatatgacaaaatcaataaatggttcaccaacttgtcgagtaagtgcatcaatatgctctttgacatcataattatcagtctcgcctggttgtgtcataacattagatacataaagttttggagcagatgtacgtaataatgcttctgaaatacctttgacacataaatttgatataacacttgtatataatgaacctggtcctaagacaattaaatctgcttgttctaaagcttctatcgcttcattcattggttcaacatcacttggttctaaaaacacacgatctatttttttatgtgttttaggtatattagtttctccatgtacaatttcaccgtcttccatcaccgcgttgagttgcacacttgcgtttgttgaagggatgacttggcctttaatatttaaaactttgcttaactctttaatagcgtgtccaaaatcattagtaatgttagtcattccagcaataactaaattacctaatgaatgcccatctacttgattttcaccaaaacggtactggaacaattgagttaatatcgattctgagtcacttaaagcagcaatgacattacgaatatcaccaggcgctggaatatccatgacatctctaattttccccgtgctcccaccattgtccgctacagtaacaatggcagtaatgtctattggaaattctctaaggcctctagcaaggacagaaagtccagtgccaccaccaataagtactacattcatttgtttcattatctctctccactttcaatatgcgcatctctatgatgcacataaacattatattcaaaaatctcgttaagatattcagctaaacgtttagctaatgcgactgatcgatgttgtccacccgtacaacctatagcaataaccaattgcgatttaccttcttttttgtagccaggaatcataaattttaataaatctgttaatttatcaaaaaatatttgggtttctttccacttcataacgtaattgtacactggctcatctaaaccagtaaatggacgcaattcctctacatagtagggattaggtagaaatctgacatcaaaaactaaatcagcatccatttgtataccatgcttgaaaccgaaacttgtcacgttgattgtaaatgtttcaaagttttcatctaaataaaactttgaaatgcgttgctttaattctttaggttttaattttgttgtatcaatcacgtaattagcgatacttcggatttctgatagatgttcacgttcctcatttattgcatctattaatgatctttgtccttgttcatttagtgggtgcgctcttcttgattctttataacgtgaaataattttttcagttttagcttctaaaaacataacatctaaaatcacgtcattacgacttttaataatatcaatttctttaactagagatttaaataattccttacctcttaaatctattgcaattgctactttttgcaatgaaggtcaatgtgtattactggtatgcaatttggcaatgaggtagctatgcatgtgagcagaggtgcagtcttcggtatgataggagttttatgtagtatactagcaacctggggattactacaagctacacatatgtggctattgagtattattggtggttttgtagcttggtttgtaagtgcattgattatttttgaaattgtggaattcatagcacataaaagaagggataaacatggctggaagaccaaaagatccaacaatcaataaaaaaatttatactgagattcaacgtttattggaaacgactcattttagagatattactatagatcaaatttctgagaatactggtatttctaaagcaactatttatagacgttggaaggataaatcttcaattatcatgtccgcgtttattgaacaatctcaatatattgcgattcataatcaagataatttatatgatgatttattccagtttttagtaaaaataaaagatatctataaaacaaaactaggtagtgctgtgattgaaatattaattagtcatcaacaaatggaagctagagaaacttttatgactaattactttaatcataatcgcaaagttttaaaagagattgttcgtaagcacatacaagaggaagaacaagatttgtttattgatttaatcttctcacccatctattttaatatattaattaaacctgaaactctggatgaaaattacattaaaaagatgttgaatcaagttttacgtatatatcattgatatgaaaaacgctcctttcgaggagcgttttttgtttttcatgtaacaggttagcctaaggtcagtctattaaaacctttaaccatactatgtcaaagcattttgacaatgataaaggtgacatcgcaaaaactatttgatagcttttatagagaaaacctgatttgatttaataataatattaaatgatttcaaatcataattaaggagtttaacgtaatgaatgttagcaatcaaatcaaaaaatttagagaaagagatgggtattcacaagaatttttggctgagaaaatgtttgtttcaagacaaaccatttcaaattgggaaaatgataaaagttatccggatattcataatttacttattatgtgtcaactcttcaaggtatctctagacgaactagtggaggatgatttgaaaaacgtgcaaatcaaaaatattaaaaaagaattagacttttggacatggatgatgataattccaatggtattaggaagtgttctcataggtcctatgattcattactttcattggttaggaataggaataacatatttagtatttttaataggtatcattgcttctacaaaattagaaaaaattaaaatcaaaaatgatattgaaacatacgacaggatatctttagagcacagtggcgatgatatc

SEQ ID NO: 3466 - DNA, 2967 bp, Artificial Sequence
  Description of Artificial Sequence: synthetic nucleic acid sequence
tataaatttaaatgtacattagcaaatgcatcgttatcaagtccgtctacagggtcacctactacgacaagtcctgttgcggtattatctgatattaaatctgataaagtaaaatttggaaaccaatttttatatcttgcatctggaatttcaatgcctggcgcgatacgggtatgatatctaattgtttctaaatcagcatcataaggtaagtcttcctgcactataaagataatttctggttctagtaatggtgaaaataattctgaaagagagactgaggcaccatcattaacaatttggttagataagagtgttccatatgcaggttcgttagtgttagcaattgcttgcgttgccttgctagtcatactaactttataccctgtaacagtcgaacggtctttgaaagttaattggtcaattagttcttcttgtacatgatatgcttcttcttcgtttaattgatagttctcactaatgaaatcgatgggttttttatatctataagctttaaataaaactttagcaacttctttatttgttagtgtcatattgtacccctcccctaaattatctgaaaatttatactattatgataacttttaaatgtgaagtgtgcaaattgatttaaatatacttcatttagggtataaaataattaataatgtaaattttgataggagtgggtatagtgtcagattatgtttatgagttgatgaaacaacatcattcagttagaaaatttaagaatcaaccacttggttctgaaacggtagaaaaattagtagaggcgggacagagtgcttctacatccagttatcttcaaacttattctattattggtgttgaagatccaagcattaaagcgcgtttaaaggaagtgtcaggtcagccttatgttttagataatggttatttatttgtatttgttttagattattatcgtcatcatttagtagatgaagttgcggcgtcaaatatggagacatcatatggttctgcagaaggactattagtaggtacaatagatgttgcattagttgcgcaaaacatggcagttgctgccgaagatatggggtatggaattgtttatttagggtcattgcgtaatgatgttgcgcgagtgcgtgaaattttaaatttacctgattatacgtttccgttatttggtatggcagtaggtgaaccttctgatgaagaaaatgggtcacctaaaccgcgcttgccatttaaacatatttttcataaagaccagtatgatgcgaatcagcatcaacaacgtaaagaattggaagcatacgaccaagtagtgagtgaatattataaagaacgtactcacggtgtgcgtacagaaaattggtcacaacaaatagaaacatttctaggacgtaaaacacgtttagatatgttagatgaattgaaaaaagcaggatttattcaaagataaaaagaacctgagacagaaatacatgtctcaggctagggtggggcgatattttcaacacgaatgttgccccgctctttttataattgtatgtcgtaatgatcaatgaccacttttcttacatttaatttgcagataaatcgccgtaatcatttgagtcaaatgtttttttgtcccaatgattcgttaagcgtgcggtacctgttccagctagcattgagtcattaacgttaagtgctgtacgacccatatcgatgagaggttcgatagatatcagtacccctgcgagagcaactggtagattaagtgtagataatacgagtattgatgcgaatgttgccccgccacctacacctgcaacgccaaatgaacttataataacaacagcaataagtgtaacaacaaattggaagtcaatttctacatttgctactggtgccaccataactgctagcatagcaggatagattcctgcacagccattttgccctatggataaaccaaaagttgcagagaagtttgcaattccctcaggtacacctaaacgttttgtttgcgtttgaacatttaacggtaatgcacctgcacttgaacgtgaagtaaatgcaaagattagtacttctattgtctttttcacgtatttaacgggattgatacctaagacactcagtataattaaatggataatatacattgtgattagagctgcgtatgaagcaattaagaatttacctaacgtccaaattgcagaaaaatcacttgtcgcaagagtagaagccataatagctaaaatgccataaggcgttaatcgtaaaacaaaagttacgatagccataacgatagaatagattgcttctataccacgtttaagtaagcttccatgttccggctgttttcttgcaactctaagataagcaaagcccacaaacgttgcaaaaataacaactgcaattgtcgaagttgtacgttgtcctgtgaaatctaaaaatggattgcttgggaatacttcgagaatttgttgtggtaaagtgtttgcagttaaatctttggcttgttttgaaatttctgtaccacgtgaatgttctgcactacctaaatcaatagacgatgcatctaaaccaaagatcaaagcgtaaaaaattccaacgatagctgcaatggctacagtaccaattaaaaacataaaaatataagaaccgatcttagcgaatttttcaccaatttgtattttgctaaaagcggcaacaattgaaatgaatattagtggcatgacaatcatttgtaatagtgcaacataaccatctccaacaatactaaaccagtctgttgattgttcgagagttttagactctgcaccatatatgaggtgtaatacaatgccaaatacgatacctattgctaaagcggtaaagacacgtttagggaatgagacgtgttttcttgccataatatttaacattattaggaaaacaagtaacacgatgacattaattactgtaaaaagtatttccatatcgata

SEQ ID NO: 3467 - DNA, 3042 bp, Artificial Sequence
  Description of Artificial Sequence: synthetic nucleic acid sequence
tataagataatataaactaagcctgagacaccgatgagtaatctcaggcttttttacgtattgaaagtgattgagtaattaaatagggtggatatcaaaaatgatgttggtcgatatgttaggttctttaagagaatgcaatgccaggctcaatatcgacgtagttatgaagcggtgtgtattttaaatggccgttagtatcatgtataaacggactattggaactcaacttttaaaattgatatagtataatataaaggaaatttagaggacgtgacgtttcgatatttgaataactgtattaaggaatatcgaaactttaaaatatctacgcaatttaggataaaaaatcaacattgagtgaaagccaacttagtcgaagcatctcaataaagcgtaagacactcgagttcccccacacccctataaacaaaataactatggtacatatgagaaaggatgagtcgcttgatacgtatgagtgtattagcaagtggtagtacaggtaacgccacttacgtagaaagtgagaaaggtagcctactcgtcgatgtaggtttaactggcaagaagatggaagaacttttcagccaaatcgacagaaacattaaggatttaaacggaattttagtgacacatgaacacatcgaccatattaaaggtcttggtgttttagcacgtaaatataaacttccgatttacgcgaatgagaatacatggaaagcgatagagaagaaagatagccgcattccaatggatcagaaatttatctttaatccatatgaaacgaaatctcttgcaggatttgatatagaatcatttaacgtgtcacatgacgcgattgatccacaattctacatcttccacaataactataagaaatttacgatgataactgacactggttacgtttcagatcgtatgaaaggtatgattcaaggtagtgatgtctttatgtttgaaagtaatcacgatgtcgatatgttacgcatgtgtcgctatccatggaagacgaaacaacgtattttaagtgatatgggtcacgtatccaatgaagacgcgggtcttgcgatgagtgatgtcattacaggtaatacgaaacgtatatacctctctcatttgtcacaagacaataatatgaaagacctcgcacgcatgagtgttggacaagtgctcaacgaacacgatatcgatacagagaaagaagtattgctttgcgataccgataaagcacaagccacaccgatttatacactataattgaatagaggtaagacaaacgacctacttaagtattacgcttaagtaggttatttttttggaaaagtgatcaggagaattgcagggaatgattatgtgttagtttaaacaggcttgcgcatgaacgattgattaaggaatttttttgaaatgaaagcgcatcatggaagggggagaacgatgtcttacacgctttgtgatttatatataataacattcttttacttttaaactgcttaaataccgttccttctgcgacatttgcacgctgcgcaatttctttagtactcgttttatcaaatccttgttcactgaataatgcaatagcactttctatgacacgtctttgtttatcgcttaaatattcaagttgaggcacaatggtttcaactaatgacttaatatcttggttcatattgacctcctaaacttttctatatcttttcatgcctataatatttaaaatcaataagaaaatgaaaaatgcgaataacacaattaaataaatgtaaatatcgttgaatccataacccttgatcataatattttgcatcgtttggccggtatagaataacggcatgatatgtgaaaagtattgtaatcctttattcattgattcaattggtataatgcctgcaaatagtacttgtggcactatgactaatggtataaattgaatcatttggaattctgaggaagcaaaggtagataataatataccgaatgtcacagcgacaagcgctgttaatattgccgttaatagtacgaaccatatcgaacctactaagtctatatgcagaatataaattgcatataatacgacaactattgtttggataacgctaaaactaccataaccgaaaacataaccaaaaataatttcacttctttttattggagaggcaagtaaacgttctaatgtgccagaagtacgctcttttaataagccaatgccagaaattaaaaacgtaaagaaaaagacaaaaaatccaattaaaataggatttatcatatcaaaatacgtagaatctgatgaaccatataaatagtgcgttgttagtttatatggtttagccatatcttgatgaggcgtgtctcccccatccccgggcattttttgttgtattttagttaacgcttgatgcaatttattagtattatctttcatggcattcatgttatgactcattaaccatttttgatttgcacctgttagttctcctgcttgtgtaggattatcgttagcataagtcactgatactttttgaccatcactgtgcaaaaatcctgttaatttgtcgtctttaattttatcacttatatcattgtcatttttataatgtttaacgtgaatatctttatcatgtaattcagtcattaatgaatctggtacatcgtgaaccccaactgttacgccattcgtattatcggcaactgtaaaaatgtaatatagtagcgacaatagtaatataggtgcaataagtaacagtgccaatgttcttacatctcgaatcgtctgtttgaaaatacgtcctgctatgtgcaacgaattcattttatccctccatattcagaaatacgccttcaatcgtatctgtgtgatattgttttttcacttcatctggtgtacccgttgccaatatctttccttgattcattaatacgagcttatcacagcgtgtagcttcatctaatacatgcgttgtcactataatgcatttatcttcagcctttgctttagttaaatccttccaaatctttagagcacagtggcgatgatat

SEQ ID NO: 3468 - DNA, 3218 bp, Artificial Sequence
  Description of Artificial Sequence: synthetic nucleic acid sequence
tacagaaaataagacctctaaaatgctaactagttagtattttagaaggcttttttataaaaaagagaaacatcgaagggaagattcattcgacatttctccataatgatattaattaagcttttatgcttagttgtattgttaattatttaccttctccgtagatgtcattccattgctctcttttatctaaaaatgcttgagcaattgttttagcaccttctaaagaatgacttgcagcccaaccacattgaacctcattacaagctgggacttcgctagcatttaacacatcatgcaatgtttgatcgataatatttaatacgtcatcgtagtcgtcatgattaataaatgaaacatagaatccagtttgacaacccataggacttaaatctactactttatcagtatgatttctaatgttttctgccattaaatgctctaaggaatgtagaccaggcatatccatatgttccttattgggctgtttgaaacgaatgtcatatttgtgtatgacatcaccattaagaccttccatagtcccggctagacgaataaaaggtgcaacaaccttagtatggtctaaattaaagctttctacattcattttagtcatgcatttatcctccttattgctctacagcaattttttgtttaattcaataaatagattgtaacaatactctaatacatttacaatttttctaaactaatagactgttgtcttttaaattgtaagaaaattgtgtaaaaattaatgacaaccaatattcaatccgataaaataagtaataattaaaaaagaatgattgatacgcaaagtttcaaagggagttagatacaatgcataataaacaaaagatattagattttatagaaaataataaatatgattatgttgaaataagtcatcgtattcatgaacgccctgaattaggcaatgaagaaatttttgcatcgagaacattaattgaccaattaagagcaaatcgattcgaaatcgaaacggatattgcaggacatgcaacaggatttatagcaacgtatgattctgatatgactggaccggttataggatttctagctgaatatgatgctttacctggtcttggtcacgcatgcgggcataatattattggtactgctagcgtacttgctgcagtagcactaaaagaagtcgtcgatgaaattggtggtaaagtagtcgttttgggatgtcctgctgaagaaggtggggaaaatggctccgcaaaagcttcttatgttaaagcaggtgtcattgatgaaattgatgtagcattgatgattcatcctggaaatgaaacttatcgtacaattaatactttagctgtggatgttctagatattaaattctatggacgtagtgcgcatgcatctgaaaatgcagatgaagcattaaacgctttagatgcaatgatttcatatattaatggtatagcacagttaaggcaacacattaaaaaaggacaacgagttcacggggttattttagacggtggtaaagcggctaatattatacctgattttacacatgcgagattttacactcgagctacttcgcggagagaacttgatgttttaactgaaaaagtaaaccaaattgcaagaggtgctgctattcaaactgggtgtgattttgaatttggtcctatccagaatggtgtaaacgaatttatcaaagcacctaaacttgatgatttatttgaaaaatatgcaactgaattaggagaagaagtgattgatgatgattttggctatggatctacagatacaggtaatgtaagtcatgttgtaccaacaatacatccacatattaaaattggttctcgaaatcttgttaggacatacccaccgctttagagaagcggctgcaagtttacaaggtgatcaggcactcattcgaggtgcaaaaattttagcattaatgggactagaattaatcgaaaataaaccgttgttagacgaaataattgaagagcatacgcatataaaggggcatgttaagtaatgaataataaagtaaatggtccgtttctcacacttagtgatttgtataatgatgacattgtttacacatctcgaccttcatatgtgtcgaacccatggttgaaaccagatgaacaccaatcaaatttcttaactggaagagaattacttatagctaatcgttttcctgtcattgttcatgaggcaagtgttacaaacaaattagaacaactttttaatatagtgggtagggaaattccaccacatacttataaatttaaagatcaagaaacatatgaaagcttgataaggaatttagctcttcatcaaggtaaaaaaatctactttcaatatattcatgatgaagatattttacctaaagaatattatgcacttgataaagatgtttttgttgctcttaataataaagcacgaattccagaatggactaataacaaatatctaccacaaagagaaattgtctcaattaaagattttgaatctcatattcaagcatggtcgtatccatttgtcataaaaccaggcgatgatttacctacagcaggaggatatggtgttatgatttgttataatgatacagatttagctaaagctatcacacgcatcaacaatgcatcagcagagactgaaaatttaatcattgaacaaaaaattaatgcagtgaataactattgtgtacaatttgcttattcagatgatattggtatcaaatacttaggaacagcgcaacagttaactaatgactatggattttacaacggaaatgaaaatgttaatgatgtgcctcagaatgtaatagacgctggtagagagattatggaaataggcgtaagcaaaggtttttttggtgtagcaggttttgacttactagtagatgataataatgatgtttatgcgattgatttaaactttaggcaaaacggatcaacgagtatgctacttttagcaaaagatttaactcatggatatcataaattttacagttacttttctaatggagataatacaaaattctataatgctattttaaaatacgtagaattaggtgtactttatccactttcctattacgatggagattggtatggaaagaatcaagttaattctagatttggctgcatttggcatggggaaaataaagaattaattaatcgatatgaacaacaatttatattggaagctggattata

SEQ ID NO: 3469 - DNA, 2489 bp, Artificial Sequence
  Description of Artificial Sequence: synthetic nucleic acid sequence
atgaagcagccgctggatcaagattttcgggaactttaactgcataattcgcatcaacaatgacttcttcagccattgccccatcaacagtatatccggcattaaggacatccctgcataatgtttctctaccagttgtgcaatactcacaattaccacatgctgcatacatccatgctatagatacacgatcccctacctttaatgaatctacgttatcagcaattttaatgacacgtccaattccttcatgtcctaatgttacacctgttacgtcaccgaaatctgcatttttaacatgtaaatcagtatgacatacaccacaatattcagtctttactaatgcttctccaggtcttaattctcttaaacgtttttcttcaatacttactctatgatctttggttactacagctgctttcataaaaagccctccctagtattaaagtgtaattctattacttccacccttattttacactcttttgaaatcgttttccaaaagtcctttcatttatactgaattttttgtaaattgtatatagagcgacataatatcgtcacttttatagcatattttatgatttattcatatattttattttttaactatatatatatatcatgtcagtgaaaagtcatcgctcttaatcacaccttataattttggggatgaaggtgtttattttaaaaatcttaattggaggggataaaagtgaagacgcaagttttgtacggaaaatctgaaattgaaatcaatgtgcctgatgatagcacaatcatagagcctcaaaacatcgacgctattcaagattatgaatcaacaattaaaaatgtattaagaaaccccacaaattctaaacctttaaaagaaatggtaaacagtaatgatattgtttctattgttattagtgatattacacgtccaacgcccaaccatattcttgtacctttactaattgaggaattaaatcatgttcctcgtgagaatttcgtaattattaatggtacagggactcatcgagatcaaacgcgagatgaattgattcaaatgttaggtgaagatattgtaaattcagtaaaaatcgttcacaatcattgctcagaaaaagaaagtctagctaaagtgggacacagtcaatatggatgtgatgtttatttaaacaaagcatatgtagaatccgattttaaaattgtaacaggttttattgaaccacactttttcgccggattttcaggtggacctaaagggataatgcctggaattgcaggtttagaaacaattcaaacatttcataatgcaaaaatgattggcgatccgagatcaacgtggggaaatttagaagacaatccagttcaagatatggcacgggaagttaaccgtatgtgtaaacctgactttttacttaatgttgcattgaataaaagtaaagaaattactgcagcatttgctggtgaaatcttagatacacacaaagaaggatgcgcatatgtaaaagatcatgcaatgtttaaatgtgagcaacgctttgatattgttatcgcatcaaattctggctatcctttagatcaaaatttatatcaaacagttaaagggatgagtgcagcgagtaaagttgttaaaaaagacggtcatattattatggtatctgagtgtgcagatggctttcctgatcatggtaagtttgccgaaattttcaaaatggcagacacacctcaaggtattttagaacttattcacaatccaaactttaaggaagttgaccaatggcaagtacaaaaacaagcaagtattcaaacttttgccaatgtgcatgtttattcagaacttactgaccaacaacttaaagactcgatgttaatcccaacctctaacattgaacatacaatacaagaattagaacatcgatatggccgtaaattaaccattggtgttatgccacaaggtcctttaacaataccgtacgtagaagataaagaataataaatggaggatggaaactatgactgaattaaatactaaagaaatgaaattagacgcactattgaaagacatgcagagtgtagtaattgccttctcaggtggagtagatagtagcttgttactgaaaaaagcgattgatattttaggtgttaactatgttaaacctgttgtagtaaaatcagaattatttagaaatgaagagtttgaactagcgcttaaacttggacaaagtctaggtgttgaagtattagaaactgaaatgtctgaacttcaagatgcgaatatcgttaaaaatacgcctgaaagttggtactatagcaagcgcttgatgtatagtcaacttgagaatattaagaataaactaggatttaattatgtgctagatggtatgattatggatgacttagatgattttcgtcccggattaaaagcaagagacgactttggtgttcgtagcgttttacaagaagcaaaactatctttagagcacagtggcgatgatatc

SEQ ID NO: 3470 - DNA, 3967 bp, Artificial Sequence
  Description of Artificial Sequence: synthetic nucleic acid sequence
aggtgaagatgtattcttaggatttgactgtgcttcttctgaattctatgaaaatggtgtttatgattacactaaattcgaaggtgaacacggtgctaaacgtagtgcagcagagcaagttgactacttagaagaattaattggtaaatatccaatcatcactattgaagatggtatggatgaaaacgattgggaaggttggaaacaattaactgatcgtatcggtgataaagttcaattagttggtgatgatttattcgtaactaacactgaaattttatctaaaggtatcgaacaaggtattggtaactcaatcttaatcaaagtaaaccaaatcggtacattaactgaaacattcgatgctattgaaatggctcaaaaagctggatatactgcggttgtatctcaccgttctggtgaaactgaagatactacaattgctgatatcgcagttgctacaaatgcaggccaaattaaaacaggttcattatctagaactgaccgtattgctaaatacaatcaattattacgtattgaagatgaattatacgaaacagctaaatttgaaggaattaaatctttctacaatttagataaataatatctctttaatttttataagagttcacgcttattatttaatatcttaattgaattgtccgttgcagagttgaagctgcaacgggcttttttagttaagtacattttaaattattaatgtaaactgatataatgatgtgagtaattttgtaaaaggagtacaattatgacagactcaaatgctaaagaaataagaactggacgtttaattgcgataagttcattagtgttttgtattttacttatcatacaccactttattgtattagatgaatcaacagctaaatcaattttatctttagctggtcaaaaaacatcagatacagcagtgaaaaacattttaaatagtgaccgatacactggaattatgtatattttagcttacttagcaggtactgttgctttctggaatcgccatccatatttatggtggtttatgtttgccgtatatatttctaatgcactatttacactcgtaaatctttacttatttattcaaggtattttagatgtaaaaaatgtacttgcagttttaccaattttaattgtagtgattggatctataattctagcaatttatatgctagttgtttctattacacgtaaaagtactttcaatagatagaagtttgattacatcaataaagatgtgttataatttctttcgtatataatgaacggaggacaatttttatgcatacattaatcatcgttttattaattatagattgtattgcattagtgactgttgtattactccaagaaggtaaaagtaatggactttcaggtgctattagtggtggcgctgaacaattgtttggtaaacaaaaacaacgtggcgtcgatttattcttgcatagattaacaataattttagctattttattctttgtacttatgttttgtattagttacttaggtatgtagagaatattatatttgttttaatgaagtaaatgaatcttaaccaagactgataaatgatagggcaaattaatcacatttgctattaaggtgatgctgccaacttactgatttagtgtatgatggtgtttttgaggtgctccagtggcttctgtttctatcagctgtccctcctgttcagctactgacggggtggtgcgtaacggcaaaagcaccgccggacatcagcgctatctctgctctcactgccgtaaaacatggcaactgcagttcacttacaccgcttctcaacccggtacgcaccagaaaatcattgatatggccatgaatggcgttggatgccgggcaacagcccgcattatgggcgttggcctcaacacgattttacgtcacttaaaaaactcaggccgcagtcggtaacctcgcgcatacagccgggcagtgacgtcatcgtctgcgcggaaatggacgaacagtggggctatgtcggggctaaatcgcgccagcgctggctgttttacgcgtatgacagtctccggaagacggttgttgcgcacgtattcggtgaacgcactatggcgacgctggggcgtcttatgagcctgctgtcaccctttgacgtggtgatatggatgacggatggctggccgctgtatgaatcccgcctgaagggaaagctgcacgtaatcagcaagcgatatacgcagcgaattgagcggcataacctgaatctgaggcagcacctggcacggctgggacggaagtcgctgtcgttctcaaaatcggtggagctgcatgacaaagtcatcgggcattatctgaacataaaacactatcaataagttggagtcattacctgctattaagtattatcagcctgagtccgacgatgtacttgtcggacttttttattttataattgagacaatcatgtttttaaatcatatgttaaagggaataatgatttatcaagtcaatttgataataatgaagagatttttaaatatatgaaataaattgaaatacttaacttatttaggataaattgagtacttactataagggagagggattttaatcatgcaaattaaactaccaaaaccattcttttttgaagaagggaaacgtgcagtgttacttcttcacggctttacaggtaactctgctgatgtaagacaacttgggcgttatcttcaaaaaaagggctatacatcttatgctccacaatatgaaggacatgcagcgcccccagaagaaatattaaaatctagcccttttgtttggtttaaagatgttttagatggttatgattatttagtagatcaaggttacgaagaaatagcagtagctggtttatcattaggtggcgccttcgcattaaaactaagtttaaatcgtgatgtgaaggggattataactatgtgtgcacctatggagaataaaacagaaggttcgatttatgaaggctttcttgaatatgcacgtaactttaaaaaatatgaaggcaaagatcaacaaacgattgatcaagaaatggaacaatttcatccaactgaaaccctgagagaactgagtgacactctaaatggagttaaagaacatgtcgatgaagtaattgatccaatacttgtcgtacaagcagaacaagatacaatgattgatcctcaatcagcaaattatatatataatcatgtcgattctgatgaaaaagaaatcaaatggtatcaacattcaggtcatgtgattaccattgataaagaaaaagagaaagtctttgaagatgtatatcaatttttagaatcattggaatggacagagtaaaaaataaagatgtaggagagaaaggaggggcataatgaatttaaagcaatccatcgaagaaatgataaaacaacctgactatgaacccatgtcagtatctgactttcaagatgcgttaggtttaaacagtgccgactcatttagagatttaattaaaatactcgttgaattagaacagtctggtttaattgaacgtacaagaacagacagatatcaacgtaaacaatccaacaaaacaaattcaaaactaatcaaaggaacgttaagtcaaaataaaaaaggctttgctttcttaagacctgaagatgacgagatggatgatatttttattccaccaactaaaatcaatagagcattagatggagatactgtcatcgtggaaattcaaaaatctcgtggagaacataaaggtaaaattgaaggtgaagtaaaatctattgaaaagcattcagttacacaagttgttggaacgtatagcgaagcaaagcattttggtttcgtattaccggatgacaaacgtattatgcaagatatctttatacctaaaggacaaaatttaggtgctgtagatggtcataaagtattagtacaaattacgaagtatgccgatagtactgacaat

SEQ ID NO: 3471 - DNA, 3472 bp, Artificial Sequence
  Description of Artificial Sequence: synthetic nucleic acid sequence
taagcaataaagttcttcaattttatgtaaaatatggaggagaattccaattaaaacaaggatttagtccagcgttcaccgtagaaaataaagatgctattgatataggttttgaacaaacattctatgaaataaatgtcgttattgcggaaaaagatttatggtattttcaagatgaaaaactaactgtagatgcaatcgatcatgaagatgagatcatctacaaacgaaattaatataattatacatataaaaaaagaagcgataaaaactacttcgcttctttttataaatgattaatgccaaacgtaacctcagcatctttaccttctttatttaactggttaactttactataagtctcatgccactcaggaaaatatctatccaagcgtatgggtttaaatgtatctgctttaatacagataagttctgttgaaccagtagtagctaactctccattttcattataaacctcataacaataagttgaacgtaatctagaatatttttccacccatgtttttactgtcaccttttcaggatagtaaattgattttttatattgcacttttaaatctacaactggtgaaataacaccttgttcttccatagaggcataactgaagccaagctttcttatatagtctgttctcgcaacttcaaaccatgttgcgtagttaccgtgatagataacccccattttatcggtttcttgatatcttgcttcaatttcagtcaaactgtatatcattggaataatccttctttcaactttaacttattctttcaattaaggataacataaagcagtcatgccaacacaatagttagcatgactgcttgtactcaatagtgagtcaaaatcatattaaattactgcgcaagtttatttcttagtaccatttgtaaaataccaccatgacgataataatctaattctactagtgaatcaaaacgtacaatagctttgaaattaatgatttcaccattttctttttttgcagtcacatttacaagatcatgtggctgtacatcttcattaatatctacagatatttcttcttttccatcaagacccagtgcttctgcagattctccttgttggaattgaagcggtagtacacccatcataactaagttagagcgatgaatacgttcatagctttgtgcaatgacagttttaactcctaataaattggtaccttttgcagcccagtcacgagaagatcccattccatagtcattaccagctaagacaactaagccagttccatcttctttatatttcattgctgcatcatatataggcattatttctccggtaggccaatatgttgtaaatccgccttcagtacctggagcaagttggtttttgatacgaatattggcaaatgtaccacgtaccataacttcgtggttaccgcgacgggaaccataagagttaaagttgcgaattgcaacatcatgatctaataagtattttcctgctggtgtatctttaccgatagcacctgctggagaaatatggtctgttgtaacagaatcaccaaatttacccataactctcaaacttttaagtggttcaattttacccggctctttagataatccttggaaaaatgttggattttgaatatatgttgaattaggatcgaaatcatataatggttcatcggttacatctatttcattccacatttcattgttatgatatacatttttatattcttctaagaatagttcaggtgtaacaactttatctacagtatcagaaacttcttgtattgaaggccaaatgtcttgtaaatatacatctttaccatctttacctttaccaattggttcattttgtaaatcaatatctactgtaccagcaagcgcataagctacaacaagttgtggtgaggctaaatagtttgctttcactaatggatggattcgcccctcaaaattacgattacctgataaaactgaagttactaataaatcttcatccgcaactgccttttcaatttcaggtaatagtggccctgagttaccaatacatgtagtacaaccataaccaacaagattgaaacctaaatcatctaaatactgttgtaatccagaatctcttaaatatcctgtaacaacttttgaacctggagcaagtgacgtcttaacaaactctggtactttcaatcctttttctacagcttttttagcaactaaaccagcacctaacataacatatggattagaagtgttagtacatgaggtaatagcagcaattgctatatctcctgttttcattgttgctttagatccatcattaaaattaatttctgcttttttatcaaattcactttgatcaagtccatgtccttgattaccagcaggagcagttactgatttttcaaattcttttttcatatcacttaagaaaattaagtcttgtggacgctttggaccagaaagtgatgcctctactgtagataagtctaaatcaataacatctgtatattcaggatcctctttttctacatcaaagaacatatggttttgttgtaaatattctttaaccaattcaatatgttcttcgtcacggcctgtaagtttcatatatttcaatgattcttcatctactgggaagaaaccacacgttgcaccatattctggagccatgttagcaattgtagctctgtctgctaatggtaaatgttgaacacctggaccgaagaattcaacaaattttccaactacaccttttttacgtaattcttcagtcacacgtaaagctaaatccgtagctgttgagccttgtggtaaagagtgagttaaacgcactccgataacttcaggaattgggaaatatgatggttgtcctaacatacctgcttcggcttcgataccaccaacgccccaacctagaacaccaataccattaatcattgtagtatgtgaatcagtacctactaaagtgtcaggaaatgctgttttttcaccatcaacatctcttacatgtactacatttgctaaatactctaagtttacttgatggacaatacctgtagcaggaggtactgcattatagttatcaaaagcttttgttgcccagtttaaaaattgataacgttcatagttacgttcaaattctaatttcatattacgttctaatgcttctggattagcgtaactatcaacttgaactgaatggtcgataactaaatccacaggtacttctgggttgattttattaatatctccaccaacatcattcatagctttacgtaaagaagccaaatctactactgctggcacacctgtaaagtcttgtaaaataactctagaaggtttgaatggaacttcaccttcgttacctgcatttccgaatttacttaatgctttgatatgatcatctgttataacaaaatcatcctcttgtcgtaacacagattctaacaatacgcgaattgagtatggtaattta

SEQ ID NO: 3472 - DNA, 2657 bp, Artificial Sequence
  Description of Artificial Sequence: synthetic nucleic acid sequence
agccactgaccgtatttacggccagtggcttattaaatataatataaaaaaccgagcgtataaacgctcggatataatgatttattttaattgtaaatcaacttcatttatttcttttaaaatttcagctgtatcatagcaatttgtagcgatatttgcatatttctctgctaaacgataagcattaatgtataaaattaaactttctttagcgatatcttcagcgtcatcagatttggctggatttgaagttacaactaattcagcaaatttttcaggatcaatattaatagacatgaatgaataaacaactcctatatttttattagtttcatattaacacaatacttaaatacaaaaaagtaaagtcttttaattttcagaataattaatttgttaatgagacttttattatagtacggtatccattaaacttaatttatgagaggatgaacagagaatgagaatattgtttataggtgacatcgttggtaaagtgggcaggaaaatgattactacttatttacctaaaattaaacaaacttatcacccaacagtttctatagtaaacgctgaaaatgccgcacacggtaaaggattaacagaaaaaatttacaaacaacttttgagagaaggcgtggatttcatgactatgggtaatcatacatatggtcaaagagaaatttacgattttattgatgatgctcatcgaatggtgagacctgcaaattttcctgatgaagctccaggaacaggtatgagaataataaaaattaacgatattaaattggctattattaatttacaaggccgttcatttatgcaagacattgatgatccatttaaaaaggctgaccagctaatcgaagaagctcaaaaatctacaccatatatatttgtagattttcatgctgaaactacatctgaaaaaaatgctatgggttggtatttagatggtagagtgagcgctgttgttggtactcacacacatattcaaacttctgatgatcgtatattacctcatggcacaggatatatcacagatgtcgggatgacaggttattacgatggtattttaggtatcaatagagatgaagttattcaacgttttattactagtttgccacaaaggcatgttgttccagatgatgggcgaggcgtattatcaggagttatcatagatttagataaagaaggtaaaacgactcaaataaaaagactgttaataaatgaggaccatcctttccaaatttaaagggatatagtccattagtatgaatttaaacttgtaccactgttgaaatagtaaaacggtggtttattttgttatcatagagtatgaattaataccacaggaggcatgtgatatgaaatcacaaatatcatggaaagtgggcggtcagcaaggcgaaggtattgaatctaccggtgaaatctttgctactgcgatgaatagaaaaggttattttttgtatggatatagacacttttctagtcgtataaaaggtggccatactaataataagataagagtttcaaaatcgcctgtgcatgcgattagtgatgatttggatatactcattgcttttgaccaggaaacgattgaattaaatcatcatgaaatgagagaagatagtattataattgcggatgctaaagcaaaaccccaaaagccagagaactgtgtggctcaattaattgagttaccattcactagcacggcaaaggaacttggaacagcattaatgaagaatatggtggcaattggtgcgacatctgcactgatggatttaaatacatcaacttttgaaactttaatcgataacatgttttcaaaaaaaggtaataaagtcgttgatatgaatatacaagcccttaatatgggttatgatttaatgaagcaacaagttaccaacgttaatggagactttacattagagaatggtagcggtcatcctcatttatatatgataggtaatgacgcaatcggattaggagcaatagcagctggatcaagatttatgtccgcttatccaattacgccagcttctgaaattatggaatacatgattgccaatctacctaaagttgatggtactgttgttcaaactgaagatgaaatagcagcagcaacgatggcgattggagctaactatgctggcgtacgaggctttacagcgagtgcgggtccaggtctttctttaatgatggaatctattggattgtctggtatgactgaaacgccattagtcattattaatactcaaagaggtggtccttctactggcttaccaacaaagcaagaacaatcagatttaatgcaaatgatttatggtacccatggtgatattccgaaaattgtcgttgctcctacagatgctgaagatgcgttttatcttactatggaagcatttaatttagctgaagaataccaatgtccagtcattctgttaagtgatttacaattatcattaggaaaacaaactgttaaaacactcgattataataaaatcgatattcgtcgtggagaaataatacagtcagatatcgagagagctgaagatgataaagcatactttaaaagatatgcattaacagctagtggcgtatcaccacgaccaataccaggtgttaaaggtggtatacatcatgtaaca

SEQ ID NO: 3473 - DNA, 3197 bp, Artificial Sequence
  Description of Artificial Sequence: synthetic nucleic acid sequence
atggtacgtatgaaatggcaaataccctagctgaaaacaataatccctatgcatatgttgtcagtgcattaagaaaaacgttaaaagcgtgtatcgtgcctttgaaagaggtggaaaatcatgcttaatcaatttgtatgggttatttatccatatttatgtttagcaatatttgttattggacatatcgcaagatataaatatgatcaattttcatggacagcaaagtcgagtgaaatgattgaaaagaaacgattaaaatggggaagtttactttttcatttaggtattattccggtattctttggtcatgttgtgggattattgattcccgctaattggttagaggcgataggagtaaataatcatatctatcatataggtgcagtttatataggtagtgtttttggtataataacattaataggaatgttgttgctaactttaagacgactatccatcaaaaacgttagacgattaagttcattttcagatatatttgtgaatatcgttttgttgattattttaataatgggttgttattctacgcttgtaaccaatgcgattcaacctgaatttgattatcgtcaaaccattgcgatatggtttagacatttattcatgttttctccaaatgctgacttaatgttaaacgtgccttggtcgtttaaactgcacatattattagggtttacagtgtttgcgtgttggccatttactcgtttagtacatgtttggagtgtaccactgtcttatatgaacagaagatatattgtttatcgcaaaaacaaaatttaatttattatgaggtgaaagtgtggaaccagaatctttaaaacataatcaacatttacaaatgaatttagataagttgagagcacaagagggttatgattttggtggtatcgctttatatgattatcatcacacttcatcaccaattaaatggcaatatgtttcaggtaacacaaatgatagatataaacttatcattttgagaaagggtagagggcttgctggaatggtgatgaaaaccggtaagcgtatggttattgctgatgtagatacagctttatctccagaagagaaagttaaatttccaatcattcttagtgagtcattgacagctgtagttgcagtccctttatggttagaaaattcaatgtatggcgttttattattaggtcaaagaaatcatcagccgttacctcagtcattggaccaacttaatattgaaaaacaaatcggtatttttacagaaataaactaggtggtaaatatgttggagcaaactgatttaagtttagagcaattacttaagaattattatgaaaccacgaacgagaaaattgtatttgttaatagacaaggcaaaattattgctatgaatgacgcagcaaaagatattttaactgaggaagataattataatgctatgacaaatgcgatttgtcatcgatgcgaaggatactctaatgaatatgatgtacaatcgtgtaaagattgttttttagagacaacgcaattacaacattccaatttccaagtatttatgaagacaaaagataatgaaattaagccttttacagctatgtatcaaaatattgatgaacaaagaggtattagtgcatttaccttacagaatgtggcgcctcagattgaaaggcaagaaaaaatgtatcaacaaaaaatgttacatcgttcaattcaagcacaagaaaatgaacgaaagcgtatttctagagaattacatgatagtgtaatacaggatatgctcaatatagatgttgaactaaggcttttgaagtataagcacagggataaggtgttagctgaaacatctcaacgtatagaaggcttattatcacagcttattgatgatattagaaatatgtctgttgaattaagaccttcttctctcgacgatttaggcattgaagcagcttttaaatcatattttaaacagtttgaagaaaattatggtatgcatattaaatatgattcgaacattaaaggcatgcgttttgataatgaaattgaaacagttgtgtatcgtgtagttcaagagggtgtatttaatgctctaaaatatgctgaggttaatgaaattgaggtaagtacgcatagtgatggcaagcagcttgtagcagaggttgtggatcgaggtaaagggtttagtttagatcatcaccctaaaggctctggacttggattgtacggaatgagagaacgtgcagaattagttaacggtcatgttaatatagagacacatattaatagaggtactataattacattagatataccgatttaagttgatgatgtaagttgggggaattgaagtgaaaatagttatagcggatgaccatgcagttgttaggacaggattttcaatgatattaaattatcaagaagatatggaagttgttgcaactgcagctgacggggttgaagcttatcaaaaagtgttagaacatcgaccagatgttttaattttagatttgagcatgccgccaggagagtcaggcttaatcgcaaccagtaaaatttctgaaagttttcctgatactaaaattttaatacttacgatgtttgatgacgaagaatatttatttcatgtgttaaaaagtggtgctaaaggatacattttaaaaaattcacctgatgagcaattaatattggccgtacgtacagtatatcaaggtgaaacttatgttgatatgaaattgacgacgtctttagtcaatgagtttgtcaatcaatcacaaacggatgaagtgtcatcatcttcagatccatttaaaattttatcgaaacgagagttagaaatattacctcttatagcaaaaggctatggcaataaagatattgcagaaaagttgtttgtatcggtgaaaacggtagaggcacataaaacgcatattatgacgaaactaaatttaaagagtaaacctgaattagttgaatatgccttaaagaaaaaattattagaattttaaatgtatatcatgattgattattagggcttacttagtctatgactaagtagtcctttttttgtacctttatatagggaaaaataaaagtaaaatcagggtatgtccttatgttcatattttcacaaacatattaaaatgaatttgtgattggtactttgtttataattttgttttatattattaattttgacctcttat

SEQ ID NO: 3474 - DNA, 3423 bp, Artificial Sequence
  Description of Artificial Sequence: synthetic nucleic acid sequence
ttcgtcattgttcgactttatttgttaataaaatagataagatagaggtggaagaaaccgcccgcttgctacgtcaactcgagcgtctcaatagcgatgccaatattcaagttggtcaatttggagaattaaatttaaaatcactgctagagccaacacatataaattcaaatgcatgtggcactttgcatagtaatataaatcatcaattcatcgaaaatcctaggctacaaacaaaagaagaaatgattagtgcgttagataacttgcctcaagatgtttaccgtgtcaaagggtttgttcgtttttcagatcagcaacacgtttatttagtacagtatgcacaaggaaatatagaattatctcccattcaacttaaaaacgatgtaccattgtacctcattgttataggaaaacatttaaaacaaatacaatttgatttataaaaacacatctctcaattatcatcagttaaactttatacataaacaaacctctaaatgacttttgttcatttagaggtttttggtacttatttctattgttcgtcttttattaatgtttgcgcttttgaactgattccatgcttacttctactcattatttacctcacttggattaaattccaaactatccgcaaagtagacgctttcttctttattgtcgacaaaagaaaactcgatatctttataacctatagatgaacctttaaggtcaccgtccccttttaatattagtttaggagctctcttaatcggaatatcatacctctttctgagttgcttcacattgtcatcttcattacttaattggtactctgccgaatagcttggtacgtttgggttataagacacatttccattcttgtagtcttttaaatttttaaaattcccatattgagagaaaaactgaaagtttttaatttcattttttaatttttcatcggcgataggtttagtcggttcaattttattgtttttaaggcgaaccggatattctttatctttactgtgcactctcccttttttatcttctgtaattatatttgtataaaaatgaccagtcgtctttctagtatttctattcatatacaaaaccatacctctagatttcatcgcttgatcttttttctgaatattcatttctgaattaataatccatgtccctttgtcctctttttcaaattcttcatcacgatagccttctttatcgtataaatcttctaaatttttaattggatacatacttaatgttttattaaaattttctttaatttccgcttctttattattttctttattcataaatccacatccgccaataaaaaacgttaatattaaaatgcttatgtaagaaatgcacttcccataatatttcatcttttcacatctctctattattgtatacatttattaaatatacattttattgatataaatatcagtttataaaaattcaattttatatcatcaaattattcatacacattcaatttaatttatttatatgtttttttcggcgaaacaatcaaaaaacctcattaaatgtaccgcaatcatacatctaatgaggctattatcgttcttttaatcgctacttacgtgtaataccatctaactcttcgactttcaacatattatttatcatactcatatagaattgacctaattcttctccagttcgcttataatcagtagtatctaagccgactaaatctagatgatcccaatcatattgtacgggtctcacttgccaaatacccttgtcagttgctaggttcatcatacctaccttcttaaatgcttcatcacttggatgtagtgaagaagacacaggtactatgccatcatttactctgacatttttattatcatctccacctatcacacgacttgttaaatcgaatagtgggaattgtctaatattcggcacttcattgcctaatggtccagtatgtgttgcagcacctgtatatgatgtatagacgatattaggattcaatgtcgtcatttggtttaacttttctgctccaacagttgttaaatcatttacagcctgatcttcagtctcccaaactttactattcgctatacgttttgcatattcagcatatgattcattaggtttctgtttgaagccccattgagaaaaacctagttctaaatcgagcgctttagttccaccaatttttccaattctattaattgtatctttgataaatttagtcgaccctagtttatctgcagcaggtgtgccattatgaggtgttcctaatgtagtaatcgtagacaccatgttatcttgtccacctttaaacaaatcagataccgtaccaccatattgacgttgataatctatttcttcttgatttccatttcttaaaaaatgttccatcaagcgtatcgtttggccacccatactatgtccaacaagatgtatctttttacctggttcccaatcaggcatgatgccttcatatgttctgccataacgcttgtgaccatattttgcagcatgtgctgcaccataatctactcttccacctttaatataataatacagttcaacagcacggtcataattgctgctaaatgctcctacattggcttcgtgaactcggtaacctaattttgtaagttcttgtttcacgttatatttagtaccaccccaataatttgggtacatgctgaatgaatcttcaccgactaaacctacaaatccatgtacaaacacgactggatattgatttttatattgagcttgcgcagtaagttgattgatatgtttagtttgttttgatttcacaacgcgtggtgaagttaatgatgtttgctttttttgatttgttttaactgttttatcagtttttgtattacctattttgtgtactttagaagatggttgttttactgttttatctctatctcctatagactgtgattgtttaggttgtgttccttttgaagatggggcttgagtttgatcagatgggtgttgctttttatctgatgaatcttgatcattattttggttttgagtattaggttgatgttctgtttgtgagtgttgattatctttaaactgttgtttgcctttatcatcttgattttggccttttggatatgtatcctgacgtgaatttggggtaacatgattgtcttttgattgttgcccctttaaagtttgttcttggtcatttaatggtgacgtttgtgttgaatcttgttgagtttgattattctttttttgtacattttcatcagattggttctcttgattagtctttgattggctagctgtgtcaccctcttgattcaattcgtatgataaatgagttgtatcttctttgtgttcaacttgttctgtttgttgtgactgttcgttaaaatctgatgatgattgtgtcatttcagcagcttgagc

SEQ ID NO: 3475 - DNA, 2996 bp, Artificial Sequence
  Description of Artificial Sequence: synthetic nucleic acid sequence
aacgaaatacaagaaaatgtgactgaaaagacgaaaggtcataaattaaaaaaaagtgcagctaaaacaacagccctagttggtggagcatttacatttaatatgttgaataatcatcaagcattagctgcctcagaaacaccaatcacctctgaaatttcatccaatagcgagacagtagccaatcaaaattcaactacgattaaaaactcacaaaaagaaacagtcaattctacaagtttggaatctaaccattctaatagtacaaataagcaaatgtcttcagaagttacaaatacagctcaatcaagtgaaaaagctggaattagtcaacaaagtagtgaaacatcaaatcaatcatctaagttaaatacatatgcctccacagaccatgtagagagtacaactactaacaatgataatactgcacaacaagatcaaaataagtcttcgaatgtaacctctaagtcaacacaatcaaacacgtcatcctcagaaaagagcattagctccaatttaacccagtcaatcgaaacaaaagcaaccgattcattagcgaccagtgaagtacgtactagtacaaatcaaatatctaatctgacatcaacatctacttcaaatcaatcgagtcctacttcttttgcaaatttaagaacatttagtagatttaccgttttgaatacgatggcagcaccgacaacaacgtccacgacaacaacttcaagtctgacatctaattctgttgtggtgaacaaagataactttaatgaacatatgaatctatctggatctgcgacgtatgatccaaaaacaggtattgctaccttaacgccagatgcatatagtcaaaagggtgccatatctttaaacactcgattagattcaaaccgtagcttccgttttacaggtaaagttaaccttggtaatagatatgaaggttattctcctgatggtgtagtaggtggagatggcattggctttgcattttcaccaggtcctttaggacagataggtaaagagggggctgccgttggaataggtggtttgaataatgcctttggatttaaattggatacgtatcataacacatcacctcctaaatctgatgctaaagcaaaagcagacccacgtaatgttggtggtggtggcgcttttggtgccttcgtaagtacagatagaaatggtatggctaccactgaggcatcatctgcggctaaattaaatgtacaacctactgacaattcattccaagattttgtcattgactataatggtgatacaaaagtgatgacagtgacgtacgctggacaaacttttacgagaaatcttacagattggattaaaaacagtggtggtacgacgttttctctatctatgactgcctcaactggtggcgcaaaaaacttacaacaagttcaatttggaacattcgagtatacagaatcagctgttgctaaagtacgctatgtagatgcaaatactggtaaggatattattccacctaaaaccattgcaggtgaagttgatgcgactgtgaatatagataaacaattaaacaacttgaaaaattcaggttacagttatgttagtacagacgctttacaaaactccaattattcagaaacatcaggtacacctacacttaaattaactaactcaagccaaacggtgatttataaattcaaagatgttcaaggtcctcaaattagtgttgatagtcaaactagagaagttggaaagaccattaatccaattacaattactacaactgacaatagtaaagacgtattaactacaactgtgacaggtctaccttcagggttatcttttgatcaaacgacaaatacaattactggcacgccaagtgaagtaggaactacaactgtgacagttaatactactgatgctactgggaacgtaacatctaagcaatttacaataacgattcaagatacaatcagccctgttgtaaatgtgacgccaagtcaagcatcagaggtcaacgacaacagctataaagaaccataaaatattacttattccacctagtacagcgacaataggacctccatgagcaactttatcaccgacacctccaaccgccgctattactgaagcaatcatcgcgccaatcatattggctggaatgattcttagaggatcttgtgcagcaaaagggattgccccttcagtaataccaaataatcccatcgtaaatgatgccttacccatttcttgttctgctttattgaattggtgtttacgaacaaatgtagctaaacctaaaccaatcggtggtgtacatactgctacagcaaccattcccatcacagtgtagttgccttcagcaattaatgcagaaccgaataagaatgctactttgtttactggacctcccatatcaaaagcaatcatcgcgccaataataagagcaagaataatgatgttagcaccttgcattccttttaaccatgatgttaatgcaccaaatatatttgaaattggtgcgcctattacaaatataaaaatgagaccaactattaaagaagatagaataggtataataataataggcataataggagccatagctttaggaactttaatctgtttaatccattttgcaatatagcccgctaagaaacctgcgacgataccaccaaggaaaccggctcctgcttcacttccatataaactaccatcagcagcaatggcaccaccaatcatacctggaacaagaccaggcttatcagcaatactcaccgcgatataaccagcaaggatgggaaccatgaatttaaacgataaactaccaatattttcaatagatttccaaaatgaatcttcggggataactaatccttttggagtggtgtgtcctccaagagttaaggcaatagctatgagtaaaccgccaacgacgataaatggaaccatgaaggaaacaccattcattaaatgctgatataccatttgaatattacttttatgagatt

SEQ ID NO: 3476 - DNA, 3151 bp, Artificial Sequence
  Description of Artificial Sequence: synthetic nucleic acid sequence
cgccaaaactgatattgaatggacatgttgatgtagcttctgtagatgacgatcaatattggcagtatccaccttttaaacttaccaacaaagaagaatggttatacggtcgtggcgttagcgatatgaaaggtggtatgtcttcattattctacgtcttggagcaattacatcaagaggggcaacgtccagaaggtgatattattgttcaatcagtagtcggtgaagaagtaggtgaagcaggaactaaacgtgcatgtgaaataggacctaaaggtgacttagcccttgtcttagatacgagtgagaatcaagcacttgggcaaggtggcgtgattaccggatggattacagttaaaagtaaaaatacaatacatgatggtgcgcgtagtcaaacgatacatgctggtgggggcttgtttggtgcaagtgccattgaaaaaatgacaaaggtgattcaatcgcttaatgaacttgaaaggcattgggctgtcatgaagaagagccctggaatgcctccaggtgcgaatacaattaacccagctgtcatagaaggtggacgtcaccctgcatttattgcagatgaatgtcgattatggattactgttcattacttaccgaacgaaagttatgaatctgtagttaatgaaatagagcaatatttaaataaggttgcagaagcagatgtatggctcagagagaatccacttgaatttgaatggggtggtacatccatgattgaggataaaggagaaatcttcccaagtttcactgttccgacacatcatccaggttttaagcaattagaagaagcacatgaacatattcataataaaaagcttgaacatggtatgagtacaactgtaactgatggaggttggacagcacattttggcattcccacgatattatatggcccaggtagtttagaagaggcacatagtgtagatgagaaaataaaagcaaaggaattagctcaatatagtgatgttttatatacatttttaaaagagtggtatgcacacccacaatcctataaatcatcatagataaaaaagaggtacaagcacgaccttttatactcacaaaatgttgagttaaagtgatgtgttctgtacctcttaattattataaagaataacaagttgtatatttataaaaagatatttattaatttcgtgttcatttcatataaaatacaattgtcaaggtgagtttatcttttaaatgtactttttaattttcgtatccaactaccaccacgtctagaatgaacgggttgtccagaaggttgtaccgattgtttttttagttcttctccatacttaattgcttcttgcatcaagtaagattgagagtttaaaggagatgaattgttttcgacataatgataaacgccttgtgcatcttggtaacgacctttttggttgtcagataattgtaaattcatatagttaactaatcgttgtcctattgatttatcttcaacagggaataatatttcgacacgtttaatcatattacgtgtcataacgtcagctgaagataaataaatatgcgcctcaccattattatggaagtagtaaatacgtgaatgttcaagcaaacgacccacaatactaacaacctctatattttcgctaatacctggaatgcctggtttaagacaacatataccacgaatgatgagttgtattttaacgcctgcttgggatgcttcgaagagcttttcgataatcgttttatcggttaaagagttcattttcatcataattttaccgttaccatgttgtaaatgactacgtatttctttatcgatacgatcaatgaagacgtctcgaatatcgtatggtgctacaatcaatttattgtattctggttttgttgagtaaccactcaagtaattaaagaagttaattgcatcctcagcgatatctttatttgtcgtgatgatacccatatctgtgtataatttagcagttttatcgttatagttacctgtgcctaaatgaacaaatgacgtaagtttattgttgatgcgtttaacgactagcgcaattttactatgcgtttttagatgtgtcataccataaataacgtgacagccagcatcttctaacatacgtgcccaatgtacgttattttcttcatcaaagcgtgcttttaattctacgagcaccgttacttgcttgccgttttcagcggcttcttttaagctgttaataatcggcgaatccttactcactcgatacaaggtttgtttgatagcgattgtatttgggtcatctgctgcttgtcgaataaagtcaactattggttcaaatgattcatacggatggtggaagaatatatctctttctaatgataattgatagatattcttgttgcctaatgatctaggtggttgaggggtatatttctcatacgttaaatatttgagcttatgagatagatgatcaaccaatccaaataagaatgttaaatcaagtggaccatctaaataataaatatcattatcttcaatttctaattgatcgattaaccattctacattctctttttcagaagtgcgacaatctaattctaaacgtacagccgaaccactcttacgttctttcaagaaacgttcaatttctataagcaagtcctcagcgccatcttcatgaatggttaaatctgcattacgtgttattcggaaagtaaaagtatttagtacttcgtatcctgtaaatagataattgatgaaatacgtaattacatcttctaccatgacaacgtattgttttgtaccctcatttaaagttaaaaagcgtggaattaatgaaggaatttgaacgatagctgaattaatggcatcttccgtatcgatatcaacaaaaatatttaaacttttattatttaactttggaaatggatgatacgcatcaatacctaacggagtgagtgtcggcaagacacttaacttgaactctttttctaatttttctatcaatgcatctgataagtcttcaggttttaccatctcaatatcgtaattggctaattctttaattaattcgttataacgttgatattgagtgttcacatagtcagtatttttaattttaatagcatcaagttgttcttgaggcgtcatctgtgctttattttc

SEQ ID NO: 3477 - DNA, 3603 bp, Artificial Sequence
  Description of Artificial Sequence: synthetic nucleic acid sequence
tgatgatcgaatgttccaataactaaagcactgatactagagataagcattgacggtactgtagagattctaaatattaaacataaaactatgataataagtgggatccatacccaaaaattcaagttataaattgttgttaattcttttaatagattttgaatttgttgtgtatttgcgtctcccttatattgtaatccaacaataaaccatatagccaatcctattattgaagcagggattgttgtccacatcatcgatttaatgtgagcaaaaatattaactttagttacaagagctgccaaatttgtagtatcagataatggagacattttatcaccaaaaaccgcccctgcaataatggcaccagcagccatacctgctggcacacctaattgattagcaattgatatgagtgcaatgcctgctgtagatgccgatccccaagccgttcctgtagcgattgaagtcattgcactgattataaatgcagatactaataaataacttgggtttaaaaatttaagtccatagtaaattaacgctggaactgttccagaatacatccaacttcctacaatgattccaacagctaaaataataaagatagctggcatcgccgtgctcaatcgatgagtaatcccctcttctaaatccttccattttaatcccactctatgtgcaatcaatgctgcataagctgaagaaattaataataatatttgtatcgggacattaaagaaaacaaaaccaattactacaacgacaaccataactaaaatagtagaaatagattctaaaaaagtaggatatctatacttttgagtcatacttttgctcccttcagtatgatttgaaacaaaacctcttttcttaaattttaattgctaaaaattactctaatcctaatttatctaagcctaattcctcgatagtgaggccctcttcaaagaaatcgcgttcaagaatagttgaagctatcataataacagcatcgatattaggtgtcgggacatcaatgacacgtcctaaactagaccataatactaatccatatgcgatatcttcagttaaataacggttttcaacgtgattcggtcctggaatttgagaaaacacaggactagtattaaaaagacgatttaacggttcatcctcgtctttccgttctaaataacccctttgaatacgtgattctttggcagtcgataattcaaaacctaattttctccctaaatttaaacgttctatctcaatagcatgtaataatctcacagtatgttttgttatgccttctttatataaagaaaactcttctgaataatcaatacgtccaacgttcaataatgttggtccaggatgtacttctgggttaccattttcaagattagttttaagtaaactttcttcttttacaagataatcgtaaattttagataccttttcataactttcatttaactcactacgatcaaatgttgaaaagaacacccgacgaacatttaaagataaatctactttagcattgttaaagtcaacacgtgtaccatatgttaatgtatttgcttctgcaaagtgtggatggacatcaatatgacgatcttctaatacattcataaatcgtattgaacccattgaagcagcaatgttaaagaaaatgagatggtcgttcgtcacaaattttgacatcactttagcataatattcaatgaatgatgaaggaataattacctgaacaatgtctgcaccatctaaaacatactccatatcatcactaatatcagtaaactctataaacttctcttctccctcattattaaaatcaaagccacctttttctagggcgacatcaaatttactaatagattcgttacgacaatataatcgtacatcatgacctttatctaccatatccactgcagcagttactgcaccattacctgaacctacaatagctattttcatttttttacctcttttcactaaatttttatgcttatactacaataaatcactaatatattttgtattcttgccataaaaaaggagtggttctcaattcaaacataatttgattgaacgatgtgcctctccacatgtatgtaatgattaaaatatttactagatctgcattataatataaaattttaccatttacattactattatatataacgcttaaaattttattaataacaacagtactatataaccaaattatctatatttcaaactacttcgtcaatcgatataaaaattaaatttaacatttaattaataattaattattgatacaattatagttgcattaagtgattttttttacaaatggaggtaaaacctattatggataaacacacgaattacaatgaattaaaatctaagaatgtgtctgatcaaacttcatcagataatttatcgaatgacagtacagtacaccaccaatcaactattcaaaatgaggaaagtcaagataatcgtttaatggcaatgttaatttatttattaagtttatttactggtatcattggtcctttgattatttggttactcaagcgtaaagagtcccgacttattgatgtatctgggaaaacgtatctgaactattttatttcttatactatctattcaacagtaggcgtgatatgtatgtttatgattgttcctttaatgaatataagtgaaagtttagccatcttattattaattttgctgctggtggtagtcttcatcttattggcattgttaataatgtcatttgtgtgtacaattattgcttgcgtaaaatatatgtctggcaaaacttacactatcccactcacgataccttttataaaataagttacattattacagaatcattgtaataaaacacttgaacttatttacattatgaccctccaaatcttgatttgaagcacattaacaatataaattgagttcgtaatcttggttatcttttattacatagataatcaagtttttttattttgtttacgaataagtaacaatccccatattttcaattaaatctgttaaagtattcagtgttgttaagaacaactacatgcacacacataaatgagtaaacatgttaataattttcaaatcaatttgcagtacatctaataaatattacaatttttggaggcgttaaatattatgaaaaaaatcaaaacaatctcgacattggtagctggacttggtatagcatttctaggtcacacaacacatgcagatgcggctgaaaataacaatcaacaacaaagtacatataactatagtacaactgaagtatcattttctaattcaggaaatttatatacttctggccaatgtacttggtatgtttatgataaaactggtggaaaaatcggatcaacatgggggaatgcaaatagctgggcaactgcagctcaagcagcaggattcactgtaaataatacacctgaagaaggtgcaattatgcaatcatctgaaggtgctttcggacatgttgctttcgttgaaagtgtcaataatgatggttctattactgtatcagaaatgaactatgatggtggtccattcgctataagcacacgaacaatctctgccagtgaa

SEQ ID NO: 3478 - DNA, 3043 bp, Artificial Sequence
  Description of Artificial Sequence: synthetic nucleic acid sequence
tgacagttgattctaaacgagtcaatctctgttcagttggttgatattctagtaattccgttacgagctcagcagttgagctagcgtaaggttccatatacacaagtaatggatttgaaataaagctttcgccacgtctatgatgatcaatgactactttgcggtttgctttatttaagacattttcatctaagaccatttcaggtttatgtgtatctacaacaacgacagtcgtcttagaagtcatcatatcccaagcctcatccgatgttacaaagcgttcttttagttccggtttcttatcaatctcgtccataacacgacgtaatgtcggatcaatatcagaatcattaagaacgataaatgcctctaaattattcattgatgcaaagcgcgaaactccgatagctgcacctatagcatctaaatctggtcgcttatgtcccataacgataactttatcgccttcagtaagaatatctttgagggcatgtgaaatcacacgcgcacgtacacgcgtacgtttttccatagggtcagtcttaccaccatagaatcttacattgccgttcatattcttaattgcaacttggtcaccaccacgacctaacgcgaggtctaaaccagattgtgataattcacctaaatcaataaggttctcagtaccttcacctacaccaatacttaatgttagttgtgcgcggtaacccacactcttttctcttaattggcttaagatttcaaaattagaatcttctaattcagccaatattttttggttaaagtaagctacaaattgatctgagttgtaacgtttgaagtaaatattgtaatcctgtgcccaacgactaatcacacgtgtcaccatagagttaatttcagaacgttgtgtatcgttcatgttttgagtgatttcatcgtaattatctaaaaatattgttgcaataatcggttttgaatcttcatatagttcgtttgtacgttcagtttcagtcatatcaaagaagtataaacaatgctcgttttctgaatatcgtacatgatagtaataattgttgttttctatttctacttcttgaactttttccagttgttttaatatgttagggaagacttcattgacattttcagaaatcacattcgtttcaatgtgatctgtcataaattggttcatccactcaatgtgattatcttcatctaacacaatcatccctataggcaagtgcttaatcgccttgttactacttgccgagatgtgaccacttaaatcatccacataattatccatttttagaaatgcttttctcaataacacgccactaataataatcatcacaataagtatagctgtagcaatacctgccactagttggttaaaaataaaccacacggcgacaagtgctatagcagtgagcaccattaaaataaacggtatgagcaaagcttttttagtggattgacggttcattcttccacctctaatcactttttaatcatcatttttttattattttctttaaattaatacataaatcaattaccccaagtaatccaacaatatgcgttgccggtgtaagaagcgtccctactaccataacaagaattgttgcaaagttcggccatcttttagctttaccaaagaagtgaatgacacttaatccttggatgtacatcactaatgataacacaacatcaaagtttaacacgatgctttggaacgtacttggttcactcgcaatcatgacacaaataagtactataagataaaaccatagtaaattacggctcatttgccatgcgaataaaggtttaaaaataggtgttgctactttaaatttgcgtaaaattggaaatgtaataatcagattaattaagacaaaaatgaaaataactataattagaaaactagggagttggaccgtcatttgtcggaaactttcctcaagaatctgtctatagtttgaatcgattccactttttaagaaagcctcatgcattgcattttttaaaggcttaattaatacagctgccgtcggaattttatcgaatgtttgtaataacatccatccaataagtgtaactaaacttaatgaagctgttgaaatataaagaattcgttctttagatgttctttccttaagtaattgtccgataatcgcacttaataataagattaagaccatcatacttaagacaaatgtattacctaataatgttgtaagtacaactgttactaatgcactaattccgaatgattgtatggaacgattccacaaaacaataccgggaatcgttgcaaataaacataaaatcaagccgagaacaggtaatacatgtgttactaaagcgactactaataatgaaataattgctaaaatagttgctttaggttgtatttttgaaaacacatacgccactcccatactttttgactataagtcctattttaacctctttgctaaaatttaacaataaagtaaagtcatactacttagtgacaggtttatgcataagtacgacatatgaaatagggttcgcttatataatcctctgtatgactatttttatgctaaagaaaaatttacctattctgcactgtttagtatttcttatgtgtgctcatggagattgtgttctattataaaactttcctatttacgtcggaattgtttcaaatttaagaaatgatataaattaggcgcccaatcattaaaatttagaagaaaaccatcatgtcccacattatctggtacgaagaaatgacgatgatatttaaaacgttctcctaaggctctcacttgatcatcaggataaagcaaatcgtcaataaaacccattgttagtactttcgtttccaacgactgaaagacttcatcaacatcatctcttcctctatctaaatggtgactatctaagacgtctagcagtgttaaataacaatttaaatcgaaatattctttgaacttatcaccttgatgttgttgatagctcactacttcatctggtgtaaaacgttgatcataacttttagacgatcgatacg

SEQ ID NO: 3479 - DNA, 4105 bp, Artificial Sequence
  Description of Artificial Sequence: synthetic nucleic acid sequence
tataagaaagcttggcttcagttatgcctctatggaagaacaaggtgttatttcaccagttgtagatttaaaagtgcaatataaaaaatcaatttactatcctgaaaaggtgacagtaaaaacatgggtggaaaaatattctagattacgttcaacttattgttatgaggtttataatgaaaatggagagttagctactactggttcaacagaacttatctgtattaaagcagatacatttaaacccatacgcttggatagatattttcctgagtggcatgagacttatagtaaagttaaccagttaaataaagaaggtaaagatgctgaggttacgtttggcattaatcatttataaaaagaagcgaagtagtttttatcgcttctttttttatatgtataattatattaatttcgtttgtagatgatctcatcttcatgatcgattgcatctacagttagtttttcatcttgaaaataccataaatctttttccgcaataacgacatttatttcatagaatgtttgttcaaaacctatatcaatagcatctttattttctacggtgaacgctggactaaatccttgttttaattggaattctcctccatattttacataaaattgaagaactttattgcttataggtaaatccaattcgtttttaaaccattctactgccttttgagttaattttatattcatagtgttatcaccttacttttttaaatttttatttatctaaattttaaaggcatgatagcataatacattggatatgctcttttattgtaatcgagtaaatataaattcatggaaaataatgaatcttttcaaaattttaagtctttattttattttggcaattaagttattaatcgctaatatattaataatgcctggaacattgatttgaagtcccaggctctaagcaattagaaatttgagttacatccatttaattttaggttcttctcctttaaaaattctaactatattagatttgtgtcgaattattaatatgattgaaacaattccgctaacagcaagtaaaatataatcatgaatgatgattgaaccaatcacacaactaattgctgcaatgatacttgataaagaaacatatttaaagatttttaatacactaaaaaagataattgccaagataagaagtaaaataggattgacacctaatacaactcctgcactggtagctactgcttttccgccattaaatttcagatatattggatacacgtgaccgagtattgcaaacaatcctactattaaaccatttgtaaagaaggtgcttataacaccatccgcatgaactgggaaccatagtggaaaaaagactgtaataaatcccttgaaaatatctaaaaacgtaactataaatccagctggtcttccaagaacacgaaaactgttagttgctccagtatttccactaccgtattgtcttatatcttttttaaaaaataatttaccaataattaacccgcttgggaatgcaccaatcagataactcaagattaacatgacgatgatcatcataaaaacttacacatcctttagaaacttagcttcattctaccacactcaatattaattagaacattgttaatttaatttaattcaataaagttactcaaacaacttagtaatttaaatgacacttgcaatttaggtgaatttatataagaataactattgtatagttttaataacgaacgtacgtttgtaggagggcgaaatcattggcaatgaataaacaaaataattattcagatgattcaattcaggtacttgaaggactagaagcagttaggaagagacctggtatgtacattggatcaactgataaacgaggattacatcatcttgtatatgaagttgtcgataactccgtcgatgaagtattaaatggttatggtgatgcgattacagtaacaattaatcaggatggtagtatttctatagaagataatggtcgaggtatgccaacaggtatacatgcgtctggcaaacctactgcagaagttatatttactgttttacatgctggaggtaaatttggacaaggaggttataaaacatctggaggtctccatggggtgggtgcttctgtagtaaatgcccttagtgaatggcttgaagttgaaattcatagagatggtaatatctacacacaaaatttcaaaaatggtggtattccagcgacaggtttagtaaaaactggaaaaacaaaaaaaactggtactaaagttacatttaaaccagactcagaaatatttaagtcaacgacgacttttaattttgatattttaagtgagcgtttacaagaatctgcatttttacttaaagatttaaaaattacacttactgatttacgtagtggaaaagaacgagaagaaatttaccattacgaagaaggaattaaagaatttgttagttatgtcaatgaaggtaaagaagtattacatgatgttactacatttgcagggcattccaatggaatagaggtagacgtagcattccaatataatgttcagtactctgagagcatattaagttttgtaaataatgttcgtacaaaggacggaggtactcatgaagttggtttcaaaacggcgatgactcgtgtttttaatgaatatgcacgtcgtataaacgaactgaaagataaagataaaaatttagacggtaatgatatacgcgaaggtttaacagcgataatttcagtacgtataccagaagaacttcttcaatttgaagggcaaacgaaatcaaaacttggcacttcagaagcaaggagtgctgtagactctgttgtttcagaaaaattaccatattacttagaagaaaagggccaattatctaaatcattagttaaaaaagcaattaaagctcaacaagcacgcgaggctgctcgtaaagctagagaagatgcacgctccggaaagaaaaataaacgtaaagatacattgttatcaggtaagttaactcctgcgcaaagtaaaaatactgataaaaacgagttatatctagttgagggtgattcagcgggaggttctgcaaaattgggacgcgaccgtaaattccaagctattttacctcttcgtggaaaggttattaatacagaaaaggcacgtttagaggatatttttaaaaatgaagaaattaatacgattattcatactattggtgctggtgttggtactgactttaaaattgaggatagtaattacaacagaattattatcatgacagatgctgatacggatggtgcacatattcaagtattattgcttacatttttctttaaatatatgaaaccacttgttcaagctggacgtgtctttattgcgttaccgcctttatacaaattagaaaaaggcaaaggtaagaataaaaaagttgagtacgcttggactgatgaagaattagaaaatttacaaaagcaattaggaaaaggtttcatattacagcgttataaaggtcttggtgaaatgaatccagaacaattatgggaaactaccatgaatccagaaactcggacattaattagagttcaagttgaagatgaagttcgttcatcaaaacgtgtcactactttgatgggggataaggttgccccacgaagagagtggattgaaaaacacgttgaatttggtatgcaagaagatcaaagcattttggataataaagaagtccaaatactagagaatgaaaaatatattgaggaggaaacgaattgagtgagataattcaagatttgtcacttgaagatgttattggtgaccgatttggacgttatagtaaatatatcattcaagaacgtgcattacctgatgtacgtgatggtttaaaaccagtacaacgacgtatactattcgcaatgtattcaagtgggaatacgtatgataaaaatttccgtaaaagtgcgaaaactgtcggtgatgtaataggtcaatatcatcctcatggagactcttcagtatatgatgctatggtgcgcttaagtcaagattggaagttacgtcatgttctaattgaaatgcatggtaataatggtagtatcgataacgatcctccagctgct

SEQ ID NO: 3480 - DNA, 3857 bp, Artificial Sequence
  Description of Artificial Sequence: synthetic nucleic acid sequence
tatcataattatcccacccttttgtattatcattattacgaataattaaatcacatttgtgtactaatgtataatgtagcatcttaaataaatatgctaacatagttgtcaaaaattttatttttttaattataagttatataataaaattcgttgagagtttacaaatataatcatgccaaatgtatttatatttactacataattacatttttaaatatctcaaataattcatatttagagaggatttcatttatgaaaaaattgattactcttattgtcatgatatcttttgttttagcgagctgtgggggcacatcaagtacagacaaagacaccctcaatgttgaaatacctttgaaaactaaatcaattgcaccttacgaaactgatatcccagttaaaacaggtgccttggaatcgctttttaaaatgtcgaagaatggtaaagtaaaacctttattagtcaaaaattatcatcaagtatctgacaatcaactagaactcactttaaaagataatattaaatttcaaaacggtcatcatttaacaggcgaagctgtaaaacgtagtctcgaagaaggaatgaaaaaaagtgatttgttaaaaggatcacttcctattaaatcaatcaatgctcatggacaaaaagtcacaatcactactaaagaaccttatccagaattaatgtctgaactcgcaagcccatttgctgctatttacgacacaaaagctaaaaacaaagtaactgatcaacctgttggtacgggtccttataaaattgatcagtataaacgttcgcaaaaaatcgtactaaaacaattcaaagactactggcaaggtacgccaaaattaaaaagaattaatgtcacttatcatgaagatggtaatactcgtgttgatcacttattatcaggcaaatcagatttgactactgatgttccaattgaacgcgttgatgatgtaaaaaaatctaacaaagcaaacattcaaagtacatcaggctttagaacgcatttaatgttatacaatcatgatagtaaaaaagttaataaaaaagtaagagaagcactagatatgattattaatcgaaaagacattgctaaaaatgtttctaaaaattatgctgagccagcatcaggtccttttaaccatcgattaaaatcattagaaaaagaggaaattcaatcacaagacatcaagcgtgcaaaagaacttttagctcaagaaggttattccaaatcgcatcctcttaaattaaacatggtcacatacgatggcagaccagaattgcctaaaattggacaggtgatacaatctgaagctaaaaaggcaaatgttgatatacaattacgcaatgtagatgatatcgaaggatatctcaaaaacaaacagagttgggatgtttcaatgtatagttatttaagtgtgccacgtggtgatacaggttatttctttaacactgcatacttacctgatggagcattaaataaaggtaattatagtaatactaaagtcactcagttaattaaagaattaaatactactttcggtgacaagcaacgtggtcaagtgactaatgaaatactaaatgaatctaaaaaagatattcctaacagctatatcacatacaactctcaaatagatggtgtgaataataaagtaagacattttaatgttacaccagaatctatctatttaattgattataaattaagtaaaaaagaataataattgatacgggaagctgggacataattcctaacaaaatagccagtaaatgagtttttataaattcatttactggcttctttatttacaatactacgtattgttggctcgctttcttaggggacagcttcagcctgtagtcttcaacttgtcctgttccctcaagagtctcgccaaaatactttgtgtttatatgtcattttacattaaaatactttgaaaataaggcctttccgtaaaatttaataaataccaataaacaaaattaacgaggtgccttatgtataaagactataacatgactcaacatactctactaatggaaacttcagttcttatctccacaaatgatatttcacgacatgtaaatgatattgcagaaacaattcactatactgaattcgatgagttcagacatcctcgtggcttaatataagaaaagtaacagctcaacgagctgaaaatcatcaaaaaaattataaaaaagacaatttctatattatttcaatagaaattgtctttatttacttatcttggacctttttgtcccagcctctttcttacagtatgctcagtcaatgactgaaataaaaatgtaattattcatttttgaactctagtatagaattcaaaatatagattgttatcaaatattttacaaattatagaattggggtcattaaggactaagaattctatctcactaaattatcattctagaacacaaaaatatttctaaaatggcggtcggcccaaaatgtcatcattaaattgttctggtattaaaattttacgcattatgactcctaaatcaccatcatcattttcatgtttagcgtatatttcataaccccgcttttcgtaaatgtttaataaccaagggtgcaaacgtgctgatgttcctaaggttaccgcagcagcttttaaagtatcgcgtaaaaatgtctcctctacatattttaaaagttgactcccatacccttgtccatcataagttggtcgtgttgcaaaccaccaaacgaacggataacctgaaatgggttttacactactccatgcatagcaaaccgtaatcgttgaaataatttctttttcattttcaagtacaaatgtagtattttgtcttaaattatcctttaccatttcaagatcagcgtgaactgatggccaatcaatacctagttctcttaaaggtgtaaaagcaatttgcatgatgctatgtaattcttcagcatcttgttcatgtgccactctaatattaatattcgacatatttttcactccttaagtactgaacatccacatgaactatagattaaattttttataagtgctcgtcaataaatgtttattatcatttttataaagtgtcaagattctattactgataaacaaaacctaggatatctgtaaatatcccaggttttattaacgtatagaagcataagacagaattctaaatatactaactttattttttaaattctaaaatggatttcgagtttgaagtaaggcaacgtaactacaggactaaagccccactcatcttctctatttcatgatttcatctctttaatctatatatcatttcaatgatgcaataatactttgtaatttaaacactttcaacatgaagcaagacatccatttctagcacatgaagatgtcaatatgataaagactagtgattaaatctcaattacttaatagtcctctatggttggaggctgtcacgtttaccgttcaaatatgcatacactaatccaataaagatacctccaccgatatagtttccaaggaatgcaaaaacaatattttttagcacacccaaccaagataatccatccatattaaagaacatcatacctgcatataatccagcgttaaaaacaacgtgttcgtaacccataaatacaaagacaatcactccacaagctataaagaatgctttggctagtccctctttaaactgcattgaaataaaaataccgatattaataaagaaattacaaaatatacctttaatcaaaatatttaaccaagtcgattctactgtttttttatgtactaatgctgttaaactatctgtcatttctggcgtcataacatgtgcatatttcatgagg

SEQ ID NO: 3481 - DNA, 3353 bp, Artificial Sequence
  Description of Artificial Sequence: synthetic nucleic acid sequence
gactaaacgacgaactaaaatttcattagattcaacatgctcaacgcgtcctctatgcttagcagtaattgcagcaccagagtctcttgcggatacgtgttccatacctgtacccacaaatggagcttccggattcattaaaggcaccgcttgacgttgcatgtttgctcccattaacgcacggttagagtcgtcattttctaagaatggaatacatgctgttgctgctgaaacaacttgttttggtgatacgtccatgtaatccattttttctttagccataacagtgttattaccacggaaacgacaaacaacttcatcatctaagaaacgaccattttcatcaagtctagaattagcctgtgcaacaacgtaactatcctcttcatcagctgtcaaataatctatttgatcagtgattgagtttgtatctaaatccactttacgatatggcgtttcaataaaaccaaattcattcactctagcataacttgacaatgagtttattaaaccaatattaggaccctcaggtgtttcaattggacacatacgcccatagtgagagtagtgaacgtcacgcacttccatttgagcacgttcacgtgttaatccaccaggccctagagcagataaacgacgtttgtgcgttaactctgctaacgggttagcttggtccatgaattgagataattgtgaactaccaaagaattctttgattgatgcaataactggtctgatattaatgagttgttgtggcgtaatagaatctgtatcttgtattgacattctttcacgaacaacacgttccattctggataaaccgatacggaattgattttgtaatagctcaccgacagaacgtaaacgacgattacctagatgatcaatatcatctgtataaccaatgccattcaataagttgaagaaataactcattgaggcaacaatatctgctggagtaatacatttaacttcagaatcaggtaatgcattaccaatgacagtagtcgtacgaccttcttcatcgttaggcacatacactttaatagattggatttctacaggttcgtcaattacgctaccttcaagttcaaatacttcgctattagcgtttgtttctaatacgtccatgatttcgtcaagtttacgacgatctaacactgttccttcgtcaacaacaatttcaccagtttcactgttaacaattggttctgctaatttttgattgaacaaacgatgttttaggtgtaattttttgttcgctttataacgacctacactggctaaatcatagcgtttagggtcgaagaaacgagaatataataaacttttagcattttctactgttggtggttcgccaggacgtaaacgttcataaatctctaataaagcctgttctgtattttctgtcccatctttttctaatgtattacgtaaatattcgctgtctcctaataagtcaacaatttcttgatcagttgagaaacctagcgcacgtagtaatacagtcaatggtaatttacgtgttctatcgatacgaacatatacaacatctttagcatctgtctcatactctaaccaagcaccacggttaggaatgattgttgcatcatagttttcacgtccatttttatcgattttctcgttaaaatacacggatggtgaacgaactaattgagatacgataacacgttcagcaccattaattacgaacgtacctgtatctgtcatcagtggaaaatcacccatgaagacttcttgttctttaacttcaccagtttctttaataataagacgcactttcacacgaagaggtgcagcataagtagcgtcacggttttttgattcttctaaatcatatttaggttcacctaatctgtaatctacaaattctaaagataggttgccagtgaaatcttcaattggagaaatatctctgaacatttctaataaaccttctttaaggaaccaatcataagattttgtttgaatttctattaagtttggtaattctaatacttctgaaattctcgcgtaatttctacgtttacgatgtcttccatattggacaacttgacctgccaaacagattcacccctcaaaaattgtgtgttcacccttacttttcaattgaatataataaataatagaaaagacaaaaagaaaacggcaacacatatgatgacaccattttcgatttctatttacacttaattaatttatccattttacgtaaaagtacacacttattgaacataaatttttacattttataactatatcagaataccatttcgaaatcaaccttttatacttttcaaaatataatatcctttactcttagctataatttctacattgccaaatagttcttctattttctttttagctgaaggcataccttgctttttttgaatgacgacataaagttcacccgtagtcttgagtctgtcaaacgcttgttcaaagattcgatgaacaatgtccttaccagctctaatagggggattagttaaaatgtaatcaaagcactgatgattgacagcagataaacaatcgctttctataatcgttacattatccacttgatttttcgtcttattcatttctgccaacgccaaggctctattgttaatatccaacattgtgatttgatggtgtggagatacttttcctattgctaaaccgataggaccatatccacatcctacatccgcgatggttttacttgggcctggaggatgttcttttaaaaaagttttaattagtaagtcagatccaaaatctacattatcttttgaaaaaactccagcatcagtagtaagctctagttgcgcatttttaatttgataactaattctttttgggttacttttaacatcaggttgttcatcataataatgactcatttcttcacctctatttttatcattcaatccaaaagcatttagtatgcttgtattaattaattgaaaaaccccgttattggaataacggggttttaacttctcaaagaattcaggttgtatttgcattgaaatctatattaaataggttaaacatacattttcaacctaactatttaattagaaagtagaaactattttaattctacgctagctccaacttcttctaattgttctttaagtttttcagcatcttctttaggcatagcttctttaattactttaggagctccatctactaattctttagcatcttttaatcctaagccagttgcttctttaactgctttaacaactttaatttttgaagatccagctgaagttaattcaacatcaaattcagttttttcagctgctgcatctccgccaccagctgcacctgctgct

SEQ ID NO: 3482 - DNA, 2999 bp, Artificial Sequence
  Description of Artificial Sequence: synthetic nucleic acid sequence
aaatgtaatctatcgatgtctacaattgtatttataatactagtgtagcatttttatcaaaggaggcgaataaatatggcaaaatatacaatcgttgatatggatacatgtatagcatgcggtgcttgcggtgcagctgctccagatatatatgattacgatgatgaaggtattgcatacgtaatccttgacgataaccaaggtactgctgaagtgcctgaagagttatatgaagatatggaagatgcgctagaaggttgtcctactgactcaatcaaaattgaagacgaaccatttgatggtgacgcactgaaatttgaataatatatgattcttagaatacataaaaattaatctaaatgatttattactatttatagtatacaatttgtatgagaattaatttttaaggtaactagccataaacaataaaataatcagctattagatgaattgataaaatccataaccgcttctgcttgagataaatctatacgaccatttaaaaatgcacgttttgtatattcacctggttctgccatacgtgcaccataagtcatagttaactctaatatacgattaattgttaaaataccaccatgacaatttatctcaataatatcttctcgtgtgaaagttttaggggcacgtaatacagacaccatgacttcttcaactgtttcatttgtttctggatcaataatatgaccgtaatttattgtatgcgtctcaacttcagataactttttcttacctttatataagatatctccgatttcaatagcttgtggcccagataatctcacaattccaatagcaccttcacccatcggtgttgaaatacttgtaatcgtatcaaaatccatacgtgcatatccgtcggcagcataacttgcattaagctcatttgtattaccaatccatttaatatcattatgtgcaataatatcgtctaaaaaggctagattaaaatctcctgggacaccaaaaactttgtcagcacctgctgaataaaccgcgtccattaaatattgtcctacgcgttgtttcatatataattccacctttgatttcttttatcttacaagtatcatattaacgtcaatttgaaataaagtcaactaagttgacctattaaaagtttgaacagtttctgaaatatatgactatcagtcaaaagtttattataataacgatattgaataaaaaaaggatagtgttaaatgtctaaaaataaaaatgattacgaacatatgctgttttacttcgcgtataagacttttattactacagcggatgaaattattgagcaatatggcatgagtcgccaacatcatcgattcttatttttcattaataaattaccgggtataacaattaaagaacttttgattacgcttgaaatatctaaacaaggatcgcatgcaacgttacgtaaattaaaagaagaaggtttaatcgtcgaacaaacatctaagcaggatagacgagtaaaaaaactttttaccactgaagcgggtgatgatttaataggtaagttaaaccaagcacaagatgaattaattcaacagacactacaaaaagtaggccatgattggtacgcgatgatggaagaactagctaattatcgtgaaggattcaaaacaattgaacatttgaaagaagattaacaaagattttgtaacataaaggtcttagaagaagaaaaagacaatttctatatttattcaatagaaattgtcttttttataattgtataaagaaaaccatgcgctatgcgtatggttcagaaaaggttttaccgttatctaaaaaaacatctcatcatgctagaatatatattggtcagccaaccaaaatattcaacacgaggagatgcttttttatgtcatctgacacaaacagtttagcacatacaaaatggaattgtaagtatcacatagtctttgcaccaaaatatagaagacaagtgatatacggaaaaatcaaaagagatattggagttattttacgtcaattatgtgaaagaaaaggcgtagaaataatagaagcagaagcatctaaaaatcatattcatatgttagttagtattccacctaaattaggagtatcctcatttgttggatatttaaaaggtaaaagcagtttaatgatttttgattaaacctgactgtcattgtacatcgaaatatctgaataacctcattgagcaagatcaccgtcatattaaagtaagaaagacaaggtatcaaagtatcaatacagcaaagaatactttaaaaggtattgaatgtatttacgctctatataaaaagaaccgcaggtctcttcagatctacggattttcgccatgccacgaaattagcatcatgctagcaagttaagcgaacactgacatgataaattagtggttagctatatttttttactttgcaacagaacccaaatcatcgttatcgtgtttaattctataaacagtttgtcttgtaatattcacttctttcgcaattttactaatcgctttgccttcctctaacatttctacaacacgatgatagataacacgtttttgaggatctttcgcattgggagaatataataaaggtcgtcctttatatacgcctttctctttcgcaacttgaatcccttgagcttgtcgacgtttactttcatttctttcttgttctgaaaccattgctaatatctgtataattaaatctttcataaatttatctaataatggattaccaatgacttcattcatcattggtagactggtaatcatcaattgtacttctttctctttaagataattaacggtattaatgacttcatcataattacgacctaaacgatcaattgattccacgacaaaacgatctcccattctcacaaagttcaatgcttcttgaaagacgggtctgttttctatagattgacctgattgtttttctgtaaaaattttttcagcacctttagagcacagtggcgatgatatc

SEQ ID NO: 3483 - DNA, 3073 bp, Artificial Sequence
  Description of Artificial Sequence: synthetic nucleic acid sequence
taacttgacaatgagtttattaaaccaatattaggaccctcaggtgtttcaattggacacatacgcccatagtgagagtagtgaacgtcacgcacttccatttgagcacgttcacgtgttaatccaccaggccctagagcagataaacgacgtttgtgcgttaactctgctaacgggttagcttggtccatgaattgagataattgtgaactaccaaagaattctttgattgatgcaataactggtctgatattaatgagttgttgtggcgtaatagaatctgtatcttgtattgacattctttcacgaacaacacgttccattctggataaaccgatacggaattgattttgtaatagctcaccgacagaacgtaaacgacgattacctagatgatcaatatcatctgtataaccaatgccattcaataagttgaagaaataactcattgaggcaacaatatctgctggagtaatacatttaacttcagaatcaggtaatgcattaccaatgacagtagtcgtacgaccttcttcatcgttaggcacatacactttaatagattggatttctacaggttcgtcaattacgctaccttcaagttcaaatacttcgctattagcgtttgtttctaatacgtccatgatttcgtcaagtttacgacgatctaacactgttccttcgtcaacaacaatttcaccagtttcactgttaacaattggttctgctaatttttgattgaacaaacgatgttttaggtgtaattttttgttcgctttataacgacctacactggctaaatcatagcgtttagggtcgaagaaacgagaatataataaacttttagcattttctactgttggtggttcgccaggacgtaaacgttcataaatctctaataaagcctgttctgtattttctgtcccatctttttctaatgtattacgtaaatattcgctgtctcctaataagtcaacaatttcttgatcagttgagaaacctagcgcacgtagtaatacagtcaatggtaatttacgtgttctatcgatacgaacatatacaacatctttagcatctgtctcatactctaaccaagcaccacggttaggaatgattgttgcatcatagttttcacgtccatttttatcgattttctcgttaaaatacacggatggtgaacgaactaattgagatacgataacacgttcagcaccattaattacgaacgtacctgtatctgtcatcagtggaaaatcacccatgaagacttcttgttctttaacttcaccagtttctttaataataagacgcactttcacacgaagaggtgcagcataagtagcgtcacggttttttgattcttctaaatcatatttaggttcacctaatctgtaatctacaaattctaaagataggttgccagtgaaatcttcaattggagaaatatctctgaacatttctaataaaccttctttaaggaaccaatcataagattttgtttgaatttctattaagtttggtaattctaatacttctgaaattctcgcgtaatttctacgtttacgatgtcttccatattggacaacttgacctgccaaacagattcacccctcaaaaattgtgtgttcacccttacttttcaattgaatataataaataatagaaaagacaaaaagaaaacggcaacacatatgatgacaccattttcgatttctatttacacttaattaatttatccattttacgtaaaagtacacacttattgaacataaatttttacattttataactatatcagaataccatttcgaaatcaaccttttatacttttcaaaatataatatcctttactcttagctataatttctacattgccaaatagttcttctattttctttttagctgaaggcataccttgctttttttgaatgacgacataaagttcacccgtagtcttgagtctgtcaaacgcttgttcaaagattcgatgaacaatgtccttaccagctctaatagggggattagttaaaatgtaatcaaagcactgatgattgacagcagataaacaatcgctttctataatcgttacattatccacttgatttttcgtcttattcatttctgccaacgccaaggctctattgttaatatccaacattgtgatttgatggtgtggagatacttttcctattgctaaaccgataggaccatatccacatcctacatccgcgatggttttacttgggcctggaggatgttcttttaaaaaagttttaattagtaagtcagatccaaaatctacattatcttttgaaaaaactccagcatcagtagtaagctctagttgcgcatttttaatttgataactaattctttttgggttacttttaacatcaggttgttcatcataataatgactcatttcttcacctctatttttatcattcaatccaaaagcatttagtatgcttgtattaattaattgaaaaaccccgttattggaataacggggttttaacttctcaaagaattcaggttgtatttgcattgaaatctatattaaataggttaaacatacattttcaacctaactatttaattagaaagtagaaactattttaattctacgctagctccaacttcttctaattgttctttaagtttttcagcatcttctttaggcatagcttctttaattactttaggagctccatctactaattctttagcatcttttaatcctaagccagttgcttctttaactgctttaacaactttaatttttgaagatccagctgaagttaattcaacatcaaattcagttttttcagctgctgcatctccgccaccagctgcacctgctgctgctactggagctgctgcagttacaccaaattcttcttcaattgcttttactaaatcgtttaattctaatactgacatttctttaattgcttcaatgatttgttcttgattagccattttatatttcctccattaatttaatttttatgcgcaattattcagcgctttcttctttttgttctccaacagctttaactgcataagcgaa

SEQ ID NO: 3484 - DNA, 3159 bp, Artificial Sequence
  Description of Artificial Sequence: synthetic nucleic acid sequence
ggtgagagtaaagctgacttgttttttttacggatttaaaatcctagagtctggacagtctactcctctctataactataaaaaatagctatgaaaaaatctatcgtcatagatttcttcatagctaatcttagtatgtttaatatcctcataatttcttataatcaaatacacggaactatactgttttagttataagttaattccgtttcaagccattcaataacttcgttaaaaatagttctattataagaactttcattaaatatttcatgctccaaacgatcatagatgtgtaatgatttatgtgctgatcctatttcttgataaagctgtaaagaatctacatagcttactagcccatcttccttgccatgcaatatcaaaatattatctgtaaattgttgagcattgtctttcaaatacctaacaccatccattattgaaaagacgagccccatagagatttgtttcgcattcaaatcatcaagtttatatttttccattacctctaaatcagaacataccccctcacttaaattgttttctatataagtatcaggtgatatgtttctatcaggattgccaaatagtttattattataacgtgttaatgctccagaagttataataccattcactgtatttggatgtttcgttccatataaagtgactgtataaccacccatactatgaccgattaagtaaactttaccttcaaagtttgacttcacataatttattatcgcatctaaatcttcgacaatttcattactattgctataaaaggcacgcttgccttcagaacgaccatgccctctttgatcatatctaataacactaaaacccgcttcatttaaatatgctgttatctcatcataacgatctaaatgttctgccacaccatgagctataatgatattcgcttttgcatcttgaatatcattcactttcatataaagttttgtattatcttttgactcaataaattttatataatgcattttaacctctccaatcagcttgataaaattatgattcattcatttttttaatacccctaatttttgacccaaatcaatgtttgcagtaatactatataaattaaccctttaagcccatgttttttataggttctgttgcaaagtaaaaaaatatagctaaccactaatttatcatgtcagtgttcgcttaacttgctagcatgatgctaatttcgtggcatggcgaaaatccgtagatctgaagagacctgcggttctttttatatagagcgtaaatacattcaataccttttaaagtattctttgctgtattgatattttgataccttgtctttcttattttaatatgacagtgatcttgctcaatgaggttattcagatatttcgatgtacaataacagtcaggtttaagtttaaaagctttaattactttagccattgctaccttcgttgaaggtgcctgatctgtaattaccttttgaggtttaccaaattgtttaatgagacgtttgataaacgcatatgctgaatgattatctcgttgcttacgcaaccaaatatctaatgtatatccctctgcatcaatggcacgatataaatagctccattttccttttattttgatgtacgtctcatcaatacgccatttgtaattagctttttatgctttttcttccaaatttgatataaaattggggcatattcttgaacccaacggtagaccgttgaatgatgaacgtttacaccacgttcccttaatatttcagatatatcacgataactcaatgcatatcttagatagtagccaacggctacagtgataacatccttgttaaattgtttatatctgaaatagttcatacagaagactcctttttgttaaaattatactatagattcaactttgcaacagaacctatattttgctataattattaaattaattgcctttgtgttagtattccctggattactaacactttggttagctgttctaagtgatacaggtgcagcaatattagttatattaaattcattacgtttattaaaaaaataaaaaagcctaaatactctctcgatttgtgagaaagtatttaggctttttgaattaataaatttcttacttcttatgtttatttaacaattagtactgggacagaacttcttttagcaatcttatgtgtaacatctcctaaaacatgtttaatattcaaatcgactctatgattactcataattactaaatcaaattcaccattatttatatctccagaagtaattttttctaagattgtatctttaatatgcccaaaatctacatctattttatattgaatatctcttttttctaattcacgtaaaaatggagtgagttttttctctttttctctaataatatcttctttatgcttattataatacttgacactaattgcaagatcattttctgttacaacgtgataaattacaacaactgaatcttcatcggtgactttttctaaatagtcagggatagcactaaaatcattttcgaaatcatagggtaataatatatttttgaacatctacaccagcctcctattacttattatttagatgtctattacttatatataccctaaatatgtatgtgcattattcgtatctagtgaagcggtaggttcatctgctagtatgattgatgggtttgtgtaaatagctttagctattgccacacgctgtttttgaccgccagatatttgatttggtaattgattggtaatatctgataaatttagctgtttaaccaacttttgatatgcatcttcacttaatgtatcttttttatatttactaagaagtttgaattgttgttcgattgttaaaaaaggcacgagattcgtcgattgtaatataaaacctatttcgttaattcttatttgagataactgtttttcagataatattgatatatttttgttattgatgtaaatatttcctgacgtaggtctttgtaaggcgccagccatagttaaaaatgtactttttcctgaacctgaaggtcccacgatagcaatcagttccccctgaattatttttaaatcggtaggctttactgcctgaatcatttgattgccatctctgaaagatttgctcacttgtttgaactctaaca

SEQ ID NO: 3485 - DNA, 3204 bp, Artificial Sequence
  Description of Artificial Sequence: synthetic nucleic acid sequence
ctgtctacaaaggatatgcagaatcattaaaagatacttctgaatttagttggactgatgaaagttggcaatttgaacaaggtgttataggaagtgatgaagttaaatataaacacaatattcgttactttaaaatatttaacggttctaaagatactattaaccctttattaagacacaaattaaatattaattgcacacttacagcaccttatggatttgaaatcgttaatctaaccacaaatgatatatttgaatataaaaaaccgctcaaaaagcgtaatacggtttctattataggagtgcatccttatattaataataaaagagttggtaaagacacaaattatgattttattactttagcgccgggttggaatgaaattttaattagaggtcacaatatatccaatagtcctaaaacagaatttatatttaattacatctataggtaggtgagaatattggaaaatctaatatttatgaatagagaagggacattttcggaaattgttaatgactttgattttggttcctttaaatatgaatatgaacaaaataatgagcgatccatatctctcactgcttataaaactaatgttaacgcggatatatttgatagtttgattaatgaaaattatttagtttggaagggccagaaatatgtcattaaatcgactgagcttaagtatgaagaaggtgtaatacttaatgaaattgaggctaagcatatttctatggaatttcaaaatcattatatacctaaagatttagatgatgagtcactgaatgatgaagatgagactgaagcaaaaatttccatgaaagttaaagagtaccttgattttgcattcaaaaataataaacttaatttcgattataagttacatggaaaatttaatgagagtaaatatattgaacagttaggagataaaaatggtttagaacatcttattgaaggtgctgagcattttggctatatattttttgctgataataaaactttccatatctatacacctgataatttttataaaaaatcagatgaaatattagtttataaatataataatagttcggtttcggctaaaacaatcacaactgaattacgcacctacattcaaggatatggaaagaaaaagtcgaaatccgaaacgaaaaactataaacctataaaacctaaagatttctcatactctggaaattttaataaagaagggacttggtctactgaacatataggagattcgttttataagacatttgattgtaagtgggggaatgaaaccttaacttggaatctaaaaaaaggacctaaaggtggaattatcgaagtatttattgatgataagtcgaaagggacttttgattgttacagcgctcatgcttcgacgcaaaaagtgattttagctaaaggattatcaaaaggtaaacattcttttagaggagtttttaaatcgaaaaaacctggtattgattataagaagtctaatccagtcatgtatgttggtacgagtaaaagtagtgttttaaatctaactgcagttcttaaaggtaaagatatttatcatgtatatgctgaatataagtctccatattataagcaatatggtaaatcagaagcccctacaatatatgatgataatattacaagtcaatcagagttaaagaagaaattaaaagaaacacttgatgacataccaacaatcgaagtagcaacgaattatttaggattagaaagtattcatgaaaataatactattcgatttatacacaaacctatcggatttaatactgatttaaaagttgtcaaacttactgaatatcacccccttgtttcgcagcctattgaagtggaattcagtaatgcacagaaagatattataaaaatgcaatcacagttcaatcgtaggttaagaaaggttaataatcttatgaaaaaaggattcaaaactagtgactattctttaaatgtgttagaggaatataacgaaacagtaggaagtgtattgattgatgagtaaagaagtatcgataagatatctacaagatagagatggagaagaatattttccagtcacgcacatagaggcagtcatcggtttaggtgtttacttagacaaaatagaaaatttggaaaaagaaaatgaagaacttaaaaagagaatatctcatttagagaaggaataaaaggaggttcataaaatgttattaactttagactttcctattcaaataggacacacatttagaaccaagatgataaataattttagaacaatacttaattattataatgaattagatcatcagcatcgcgcacacacagaaactaagcatcatgcacatcaagccatgcaggttgattatagaaatacaaacgtttctgcatttttagattatcttaacggtaatattaatgggcttgttttaggagcaaatggagacggtatagctgaaacaaaacaagccagagtatcaatagatggtaccgtacatcccttgttgcaagaaaggctgcttcatgactttttaggaattaacagaaaattagataaagaaatacattctaatggtgcagttgattttatttggaatcctccatatataccaggaaatagattgggagaaaatgggacaccaaataattgggaaccagaagcccatattgaagcgtttttaaaccctttagttgataatcaatacgttacaaaagaagttataggagaagatacatcaggaaaatataatgtgtacaaatttacgtttgaaccacaaaattacaataaaacgttacttattacttcatgtatacacggtaatgaaactactggattttttgatatgtgccatatactcaatctattggtcaatcaatgggaaaagtatcctcaattaacttacttaagaaaaaatgtacgtttaatttatgttcctatggttaacccgtggggattcgcaaatcaagaaagagagaatgtgaacaatgtagatttaaacagaaattttgattataactggaaggcaggtaaagggacagatcctgataaatctaacttcaaaggtaaaagtcctttttctgaaaaagaatcacaaaatatgcgtagcttagttcaaagtatagataatttaactgctcacttagatttgcatgatattatttcagtaaataatgattactgtttattttatccgcgttgggcc

SEQ ID NO: 3486 - DNA, 2842 bp, Artificial Sequence
  Description of Artificial Sequence: synthetic nucleic acid sequence
atttaagtacagaggcatggtagctgtaagcgtcttaccttctcctgtttgcatttctgcaatattcccctgatgcatagcgattgctcctaaaatctgcacatcttttggatacatacctaaaacgcgcttagaagcctctctaactgttgcataagcttgtggcagaatgtgattgagtgaagctttattatcatttaaataaactttaaattcttttgtcttcgcttgaagtgcttcatcactaaaatttgagaactcctcactaagcgcattaatttgatttaatattttgcgcaattttcttaacctaatattattaataatttggttaacacctttagccattcatatcactcctgtgatagtttgatgagtctagatgatgtgtccttatattggttattatttgattaattactttaagttttttcttaggatctatatattgcgttgcctcataagcttgattactatcttctcttaattcttgcacaattatattgtgaaaagatagatgattcatgccagcattaataagttctaattcatatgaatatgcttctctaggatagacaatattttcttttttattttttagaatttgatgactaagaatttctttattcttacgataaaatttcattttaaaataagccgcaccctcaggttcaacttcaaaattaaattgaaattgatattggcgccctttttttaaaataggtagcttagggcttacacggtcttctgcaaaatcagttaacatataccaactgtgaatgattgtaccggatggcatcaaagggttctcaaaatagatattatcttgattaaaacgtaattttgtaccatacataaaagttgatgaattaactagtcgccatttgacttcaaatttcctatcttcttgcatgtgttaccctcccaaatcgctcttccatgattaaattataaaaattaataaaccaatgagtaacagtagcagaatcatcattatgtctaccaggaattcttttacttatcacacgtgcatgttgttttgtaagaacaggcaataaatcttgaaatgcatatttgtcataatcatcatgctccatgtaagcaatcgcaaatgtggtcattgacaaatcactatgctgaatttgcttccaaaaatgattatctaactgaacaacatctttgttagttatgccattttgattcaatcgcaaaatatcaagtgacgttccaaaatcgtttggacgaacgagtttcatattattagcaatagtaccgagatttatcaaaggttttcctacaataacagccgctggatttaattttgtagcgtaataaagtgcgccaaatgatcccattgataatccagaaagaattaattggttgttcgcaaatcccaaataatccaaagcattttggatgaccttacggattgcctgttcataattctctgaccctaggtaaaaggcaccaccttcgattctaggatcagctattaaaataaatggagcattcatacgtttcatcataaagtacccttcaaagccctcagcagtacgatacccactaaaatatacattgagtggtggttttaaatctccaggatggaagtaatgtataaattcttgcttattttcatcactatatcgttttccgcctaatatgaactgccctaattccaagcgtgaccaacgtttatgaatagcacctataaataatgttcctttacctttagctttgattgatacactcacatatgtttgataaggacgagcaggtagttctatgggagtgtctaaatcgtcttgttcatatattagcttttctactggttgatcagttgaataaacaggcgtcaatctcaatgtatattggattttagcatcaccttcaactttaaattctggccatatttgattcaccttattggcatcagcaatgatattttgactccatgtaatgaggggttggtatgattccccaaatcgtcctgatacttcaatagactcatttccattaaattgataagaaccatcaaaatgaatactaacgcgacaatgaataggtttaactttatctccatattgcccaggaaatgtaactgcctctagtttttgttgtaattgttcttcattttcataaatgagtggttttataaaattacgttgtattgtcttatcttgtagtcttcggtatgataggagttttatgtagtatactagcaacctggggattactacaagctacacatatgtggctattgagtattattggtggttttgtagcttggtttgtaagtgcattgattatttttgaaattgtggaattcatagcacataaaagaagggataaacatggctggaagaccaaaagatccaacaatcaataaaaaaatttatactgagattcaacgtttattggaaacgactcattttagagatattactatagatcaaatttctgagaatactggtatttctaaagcaactatttatagacgttggaaggataaatcttcaattatcatgtccgcgtttattgaacaatctcaatatattgcgattcataatcaagataatttatatgatgatttattccagtttttagtaaaaataaaagatatctataaaacaaaactaggtagtgctgtgattgaaatattaattagtcatcaacaaatggaagctagagaaacttttatgactaattactttaatcataatcgcaaagttttaaaagagattgttcgtaagcacatacaagaggaagaacaagatttgtttattgatttaatcttctcacccatctattttaatatattaattaaacctgaaactctggatga

SEQ ID NO: 3487 - DNA, 3289 bp, Artificial Sequence
  Description of Artificial Sequence: synthetic nucleic acid sequence
ttatcaagtttacttattttagtgatacctagtttgttcttcatgctatatgatgatagaaaaatacatgtttatagcaaaccggaatttattaaacgtcatcaagtcaataaaaaccaatgaatttaagcttaatattaatttcgcaatatctatttgctgcttcatatcaaaaaacataattgaaattgtgtatgctaaaaattttatatgttagcacctacgttaataattatctcaatgattcatatcactgtggaacttcatatgcagcgatgtacgattgtatcaacgctgacatgtttattcatttcaactttaatcacggtatcgttgattcaaattaaacgtcttaaaaaggataacaacttaaatcaaatatgataattcaggatattgacgatctaataaatcatgtagttcacaatatttatggtagagtggtttataagcttgaactttttggatttcaggttcttgtatataagctataggttgcttcatagataatgccgcctcttttaatgtactatatgcattcccaacatttgcacctaacatcgctgcacctaatgctgaagcattagatgaatctatgacgacaacccttttatttaaaacatttgcataaatttcaacgagtaatttactcttttgtgggataccaccagacgcatacactgtatgaacaggaatatgattatcttcaaattgtttcataattaattttgttccaaatgctgtagcttcaatatatgctcgatgaatcatttcatacggtgtttgaagtgtaagaccaaagatacttccagttagatgactattactaagtatactacgatttccattcaaccaatctaaaacaacaacatgttgttcttctattctaatgtgacttgctaattcctctaaatagttaagcacatgcatatgatgttcatttgcttgatctacaatatgtttaggtgcttggttctttgagtattcaaacaaatcaccgacagctggttgaccagcttcataggcatataatccaggtataatagcatttttaactgagccagttattgaagaaatgggtacttgtcttgaatctagcatgagatgacaagtacttgtaccaatgactgcagtgaattctccagcttctattgccccaacacctaagacgccagaatgtgcatctatgataaaaggtgaaacctggacatattgagaaagcccccatatttgttgatagtctttacataaacgacctgcactttctccaattgatatgattggcgcttcacatttttctttgacgattttaggtaaatcaggatccacgctatggaagaagtcgtaattaaatccagcttcattgtcccaaaaacctttaaaaccaataccacaatttgatcgtatatttgaatttgttagtatactagtgatgtaatctccagcttccattatataccgtgctcttctaagtatttctggtgcttcatgtttaacttccaggattttcggtatcatccattcgctatttacgcttgagccataataatctaaccaatttttattcttactcatctgaatcatatagtttgcctcatcttgagctccatgatgtttccataattttacgtacgcgtgtggatttgtctttaaatcttcatgacgatgaagcggttcaaattgttcatcgagaaagataattgtactgcttgtaaagtcgactccaattccaaccacatcgtttttattaactttactatcttctaatacaaattgaacgccttgttcaagaatttgtaaatagtcgtcagcattttgtaagaagtagttttcaggtaacggtttatcatataatgagttcatataagttccgttcgcatagtcttcctcatatcttgatatgatatgtccgttggatgtgtcagctaatatcactcttccagaagcggttccaaaatcaattcctatactataactcatgtgtatgcctcctatatatagcgtaattgtaataaatcatattgttctgagtcgacgatttgatgtttaagtatagtttacatgaatgtaagtgtttacaaaaatgataattatattttcgaatcatcttacatacaatttatttacgttaattgccgaaatctatggaatattacaagaaaaagtgtaacaatatgtaagtgaaacactgctgataaaagttgaatttaaaaagtcttatattgctattttcaagtataaagtgtttgatatgtttagccaaaaagctacccctttatggcagacatcttaaaaaatcaggggattgaaagtaatttaagactttaaacgttcttctatttaaaaatttgtccaattaaaagcagatgttcttatatcattattaacttttaaatcaatcgcgaggctggcgattataaatacaacttaaattgatataagtaagttattataaacactgttaaataaggtgatgagggaattaggacaggtgtggtagaggttttagtcattgaaatatagttagaggagcgttaattttacaaggttgaaagggagattatgtaatgatatctaaagttgaacatcaaagacacggtttagatttaattaaaattgataatgacgatacgaaaattgtatttacaaactatggtgcaagaattgtttcttggaaataccatgataacaatatcgttttagggaatgtagtagaagcggatgaattttattttgaagaaccttttaattttggtgctacgataggtcgctatgcgggtagaattgaaaatgcatcatttaaattagatgatgatacttttcaattagaatcaaatgatggtcaacatcatttgcatgggggcagtcatggattaaatagacgtatttttgattatgaaatagttgatgatattggacaagtaaagattatattcacaacaacgattaaagaagaagaggacaattatcctggagatatgatggtaaaggttattcacacttatgatgccaatcatcgatggtccgtacaatatgaggcaaaatcaacaaaaaaaacagtatttaatccttcaaatcatgtttattttaatttgaatcgtgataacaatgttgtctataaccactgtataaatagttcagcattaaaaatgtatatgttaaataataaacatattgttaaagaggggcaatctcttgatttacatcgattattggatacaaataaagtctatttaaaagatatttttgaaagtgacaatgaaactttgcaacaacaaattaatcatta

SEQ ID NO: 3488 - DNA, 3598 bp, Artificial Sequence
  Description of Artificial Sequence: synthetic nucleic acid sequence
gtttacagaacaaattttgagtggaatcaaacatgcgcatgatatgagaattgttcatcgcgatattaaaccacagaatatattaattgataagaataaaaaattacaaatttttgattttggtattgctaaagcattgagtgaaacgtcgctgactcaaacaaatcatgttttaggaactgttcaatatttatcgcctgaacaggctaaaggcgaagctactgatgaaagtactgacaccttcaaaaaccattttacgtttacgagtaccaccatttcgttgcgtgaaagtaaattcaatttctttttctccagaaccattcataagtatatttttttgtctatcagtcaattttttatatggcttatccatattaattttgtagacttcacatacacgttttaataaagttggataaaaatccgaacttgttggttcccatggttcaattgcaccttcatttaaagttttatttttatcaggaatgactaaatctaggtctacttttagtttttgacctaaaccatcacaagttggacacgcaccaaacggactgttgaaactaaacattctaggttctaattcaccaatagagaaaccacatataggacatgcgtggttctcagagaatttaagttcttctccattaataacgtcaactgttaaattaccttcagcaagttcaagtgctgtctcaatagagtccgctaaacgcgtctcaatgccatctttaactacaagtctatcaacaacaacttcaattgtgtgatttttatttttatccaattgaggcacttcatttacatcgacgatttcatcatcaacacgtaaacgcacatatcctttcttacctatatcttcaattaatttttcatgacttccttttctatgtgatataactggagcaagtaattgaatttttgtacgttcttccaattctaaaatacgatcaaccatttgttgaacagtttgtgattcaatttctataccgtgataaggacagtacggtttaccgacacgcgcatataataatcgaatataatcatagatttcagtcacagtggcaacggtagaacgtgggtttttacttgtcgtcttctgatcaatagatattgctggtgacaaaccttcaatggtatctacatcaggtttgtccatttgtcctaaaaattgtcgcgcatatgcacttaacgattccacataacgtcgttgaccttcagcataaatagtatcgaacgctaacgaagatttacctgagcctgaaagtccagtcatgacaatcaacttgtttttaggtaattcaatatctactccttttaaattatgtgctcgtgcaccttttactacaattgacggtcctttcatttaatcgtcacccttctgcttttaattcaaataacatatctcttaactctgttgctttttcgaaatctaaatctttggctgcttttttcatttctttttctatattttctattgttttttgacgttctttctttgtcattttcttaggtaattcagtttgttgttgttgatttgtctcatcgctctccacagtagcactaatgacgtcgtgaatctttttgttaattgttttcggcgtgatgccatgttctttgttatgagcaatttgtatttctctacgtctttgtgtttcatctattgcatattgcatagaatctgtaattttatccgcatacataatgacttctcctttgtcattacgtgctgctcgcccaatagtttgaataagagatctatcagaacgtaagaagccttccttatctgcatctaaaattacaactaaagatacttcaggtatatctataccctctctcagcagattgatcccaactattgcgtcgtaagtacccatacgtaagtctcgaataatttctattcgttctaatgttttaatttctgagtgtaaataattaactttaatccccgcttctttcatatatgtagttaaatcttcactcatttttttagtaagtgttgtcacaagtacacgttcatctttgtcaacgcgatcttggatttcacttaaaagatcatcgatttgattctcagttggacgcacatcaattttaggatcaagtaaaccagtaggtcgtataatttgttcaaccatttcatctgtatgttctaactcatatgggcctggtgtagctgaaacataaacaagttgttttgttttttcttcaaattcttcaaattttaatggtcggttatccaacgcacttggcaaacgaaatccatggtctattaatacttgtttacgagctctatccccattgtacataccacgaatttgaggtaacgtaacgtgagactcatcaatcatgacaagccaatcatctccaaaataatcaagcaatgtatatggtgttgaacctaatggtcttaaagttaagtgaacagaataattttcaatacctgaacaaaagcccatttctctcatcatttctaaatcatagttagtacgttgttctaacctttgagcttctaataatttattctcatcacgtaattcttttagtctctcttctaattctttttctatacgttcaatagctactttcattttctcttcacgagtaacgaagtgcgaagctgggaaaattgtaaaatgttcacgttctcgaattacttcaccagttaaatagttaacctctctgatacgatcaatttcatctccaaaaaattctacgcgaatacacatttcttctctagaagctgggaatatttcaacaacatctccacgcactctaaatgtaccacgttgaaaatctatgtcattacgtgagtattgtacatcaactaactttctcaacaattcgcttcgttccatctccataccaacacgtacactaacaaccaaatttttatattcttccggattacctaaaccatagatacaactaacacttgcgataataatgacatcatcacgttcaaataaagaacttgtagcagaatgtcgtagttggtcaatttcatcgttaatggaggcgtctttttcaataaaggtatctgttgaaggcacgtatgcttcaggttgatagtagtcgtaataactaacgaaatattcaactctattttctgggaaaaattctttaaattcactatatagttgacctgctaatgtcttgttatgtgcaataataagtgtaggtttaccaacctctttaattacgttactcatagtaaaagttttacctgtcccagttgcacctaataaggtttgatgacgtttcccttcatttacgccatccacaattttttgtatcgcttgtggctgatcaccttgtggctcaaattcagactttaacttaaatggaacatgttctaccattccaaaatacgcctcctaatattgttatcatttataaagattttacacatctcaaatcaattactttttcatgaatatcattttctattttaacaaattctataagaacaatacaaacatttgttcgcttttgaaatataacatttataatgcttattctaaaacaagagctctaagatgatttcttatgtaagaaattgtcttagagctttatttatcagtaatgtatgatgtgcgat

SEQ ID NO: 3489 - DNA, 2902 bp, Artificial Sequence
  Description of Artificial Sequence: synthetic nucleic acid sequence
gagtaagtctcggtctccggtaatgatataaacttcatgttcttgtgaatatgtttccgctaaactaccaataatatcatcagcttcataattacgcttaccaacatttacaaaaccaaactgatgcgatatttctttaacataatcaaattgaggtataagttcatcaggtggtgctgggcgattttgtttgtaaccatcatacatttcatttctgaatgtttcttgccccatatcccaacaaactgctacgtgagtgggttcgatttctttgatagcgctaaaaatatgtcttacaaaaccttgaatgccgtttgtaggaattcctttagaattgtacataaattgattgtgtaagcttgttgcataaaaatgtctaaataataaagccattccatcaacgagcaatactctttgaggcatttttaatccttctttctactataaaatattatctaattgtgtggttttcaattctagttgttgtattaatgtatcatcgatagtgaatgaaagtaactcatcaatttgttgttggatggatgtctccaacatttgaaattgatgttcggcaagttgagtcatctcgtggatataatcatttaattgtcgacgcaatgagttcaaatcatcttgtaataattcaagagtttgattagctatgtgttcttgaatatccttttgtgactttggattaactattttacgtttagttaactgttttggtagtgattgcaacattgaattaagttcaatttgaagtaatggcgtatcaacgattgatggctccacattaaattttgcatttataataacatgaatctgatttaactttttcatgactggtatgatttgttcttctagttgtgaattaaaatattttttaatcctttctgtaataagtgattgttctaagaataagcgttgatgaatttgatctaaatatattttagttgaaattttcttttcctcattgaagtcgttattttgtgtcatctgactattaaatacagatttaacctcatctaaaagttgtagttttaaccgttcatttagatgatatacttgttcttctacttcattaaaagtacgttgtgcagttgtatcaatcaactcttgatttaaccgggtttgatttttatagtgatttaatttatgttgtctcgctgacaattttgcgttgtcatcatgaaaatctttaatcatgtttttaaaggacgtattcatttgttgcaattgataagtcatttgttgctctaaaattgttctggattcaacctttgcaaagtattgtatactttctcttaattcatttatgccaatgttattcccatttaaactttgacgacttgaaacactatatatttcagagtgtatgttaacttgccccagtgcatctgcaacataatcctcaacagcttgtatatcctgtttatcttcagctaggtcaacagcattaattatcattttaaaagcttgattttcatttaattgattcatatctttcatatgttcgataaaggctttgtcgttatctgtaaatgaatgattgaagtaagttacatacaaaataaggtcagaagaagtgagaatttgttcagtttcattcgtgtgtctttgattattggaatgtaaaccgagtgaatcaataatgattttacccttgagccaatctaaaggtagcttaaggtgtacagttttcacgaaagtagcatactcatcctcggcactccattttttaatttcttcaagcgatactgtgtgtataagtgaatgttctaacatagatgtgtacatttcataatgtttctcaattgcactaataaatgcaagttggttcttttctagtttcaattttaacttatctaaatcactctcaataaagtcgtctaatgtgttaaacgatatttcataaaattctagtacatgattaacttcctctagtaattgttctttcgattttaatgtgatttgactctctttaccatatgataattccgtcgttgccgctgttgttggattaggagaactaactaaatagttttcacctagtagagcgttgattaagctgcttttacctgcgctaaatgtaccaaaaacaccaacttttgttatttgattatcgagtctcagaatggtatcggtgatatcttgtttagtgcgatcaaataatggtacatctttaacgatatctaatgcacgcttaatatcttgattagatgtaacaaactcgttacgatgttgtgtctcatgtttacgatgataagcagttgaattttcttgtttaagttcaaaatgagtctctgttcttccaattaatttatctaaagaatcgtctaaatggatatagtaatgtttgtagttgtgggatgtaagcgaatcctttaatgtgttaagttcaatgtatctatcatattcatacctatcttcattttcatcactcgataattcattaacttgtacatgattgacagcttcttcaaatagtggtgttgactcattttctatttttttattcaaagcttttataacttcatctgaaaatgttaaaacgtatgtgttgctaatgctcgtttgagtttgatatagctctgatataagtgacggaacgacgtcatattcttgatttagtattttttcattcacagcatgtttatttatgaatctagttaaaaatgacatatcttcacgaagtggttgtcgtacttgttgattaactttctcttgcaattgagtggtcgcctcattaagtcgtttgatttgttcttcttcttttttcttccttttattaaaaaatccattcactttaaaatcagttgccatgctttctaaataattccgtaaagattcacgcatatcgtacgtcatgatataagcattatctaatatatctttacgcttc

SEQ ID NO: 3490 - DNA, 3371 bp, Artificial Sequence
  Description of Artificial Sequence: synthetic nucleic acid sequence
atgatggtaaagaggttggtccaaatgttaaaggtaatatcgccgtgcctttagacttaccggctttatttaaaggttactttaaagatgaagcacgcacaaaagcagcttcaacaggtgattattatgttactggagaccaagctcatattgataatgatggttatttctggttcgaaggtcgccgtgacgatattatcattagttcaggatataccattggacctttcgaggtagaagatgcactaacaaatcacgcagctgttaaagaatgtgcagttgttgcaagtcctcatgacattcgtggaaatattgttaaagcatttatcatcttgcaagatgattatgaagcaagtgatgagttaatccaagaattacaagtattttgtaaaaatgaagtagcaccgtataaatatccaagagcaattgaatttgttgaacatctaccaaaaacaaattcaggtaagatacgtcgtgttgaattacgtgacgcagaaataaaaaaatataaacaacaagattcatcacattaagcatgaatgaaaatatttcctgggacacttatacaatgtctcaggtttttttattttgactgtcagagactaatattagaatatgcattagtttaatttagttaatgtgatgggacagggaattcagtatgaattttgccctgctttttagattgcatgagtataacctaatcaatgatgaattgaaaaatagaatcatgaataaaaaagcattaaattaatacttttgacatatttagagcaaatttaatgaaagccttttcttaaaaatgttgtaattctctttttattatgacatacttgtaaataaatagtatgacataataaaaaataagaggtggtcaagaatgacacaattcgtttatgcatttaatgaaggaaatatagctatgaaagacttacttggtggtaaaggtgccaatctttcagagatgaagagactcggactaccagtaccagatggttttacaattacgactgaagcttgtattacatatttaaaacaaaatgaagaactacctacagaagtaaagacacaattaattgatcatttagcagctttttctaaacgaacaggaaaagccttttcctctgatgataacttgttattagtatcagtacgtagtggtgcaaaaatttccatgccaggaatgatggatacaattcttaatttaggacttaatgatgataatgtaaaaaagcttgttgacaaaacaaatgatgcacgatttgcatatgattgttaccgtcgtttactacaaatgtttggagaggttgtttatggtattccaatgacagctttcgatacatattttaatgattttaaaacaaagcatcgttatcaaaatgatgctgaaattccggcagaaggactacaaactatatgtgaaaaatataaagaaatctatgtagaagaggcatataaaccttttccccaagaaccgttaaagcaattagaagaagcaattgaagcagtatttaaatcttgggataatgatcgtgcacgtgtatatagagatttaaatgatattccacatgatattggtacagccgtaaatattcaggaaatggtatttggtaatagtggtgaaaatagtggtacgggtgtagcatttacaagaaatccagttactggagaaaatcatttattcggagagtacttacttaatgctcaaggtgaagatgttgttgcaggcattcgtacccctaaggatattgacactttaaaacaacaaatgccagatgtacatcaagagtttgttgatgtaaccaaacaacttgaaaaacattacaaagatatgcaagacatagaatttacaattgaaaatggtaaactttatttattacaaacacgtaacggaaaacgtactgctaaagctgcaataaaaattgctgtggatttagttcacgagcaattaattacacgtgaagaagcagtatcaaaagtagaggtaaaatcaatagaccaattattacatcctaattttaatgaagaatcattaaagcaagcgacagtggtttctaaaatgggcttaccagctagtcccggtgcagcaacaggaaaagtagtcttctctgctgaagaagcaaaacttcaagctgaaaatggtaataaagtagtgttaatgcgaccggaaacatcacctgaagatattgaggggatggtagcaagtgaagcaatcgtaacaactcatggtggtatgacatcacacgctgctgttgtagcaagaggaatgggcaaatgttgtgtgacaggatgttcgaatgtagagatagatacagtgaacaaaacagtatattatcctgaaggtgaattacatgaaggggatatcgtttctgtagatggttcagctggtgatttatatttaggagcaattgaaacagtcaatgctgaacatagtgaagagttcgatcaatttatgacttggtctgaagagattgcaagactgcaagttagaatgaatgctgaaacaccacaagatataaaagctggatataattttggttctaaaggaataggtttagttcgtactgagcacatgttctttggccctgaacgtttaatagaaatgcgccgttttatcttagcttcaaatcatgacgaacgtgtacaagctttagaaaaaattaaaacataccaagtagaagattttgaaacaattttcagattatctcaagatagacctacgattgttcgtttacttgatccaccgttacatgagttcttaccatcatctgaagaagatataaacaatgtttctcaacagctgaatgtatcttcagagttcttacgcaagcgaatcgttgacttaaatgaggtcaattcaatgcttggtcatcgtggttgtcgtttggctgtgacttatccagagttatatgagatgcaagttgaagctatcattgaaagtgttattaagcttcaaaaagagggcataacgtgcctaccagaaattatgattcctctcgtgtcaacagtagaagaatttacaactttaaaagaacgattagttaatacaattacacatttagaaaaagaatcacaacaagatatacaatatatgataggtactatgattgaaacgcctagagcatgcttgattgcgaatgaccttgcgaaacattgtgatttcttcagttttggtactaatgatttaacgcaattgacatttggtttctctagagatgatgcaggaaaattcataaatgtgtatactgaaaataacattttacagcttgacccattccaaactttagatagagaaggtgtaggacgactaattcaattagctgttgaacaagctaaaaatacaaatccagagataaaaattggtgtattta

SEQ ID NO: 3491 - DNA, 3229 bp, Artificial Sequence
  Description of Artificial Sequence: synthetic nucleic acid sequence
tatgtcatgaagtaatatacctgtttcactttgtctttctaacacatttctcacttcatttggaaagtgattaaaatatgcttgaagatggggttttccaaaagattgatattttggatctccttctttagcatgaacagtaataaaccaataagcacgttgattaattaatgggactatacctactcgtcctttaacaccccaatattcattcgcaacatgttggtcattaaattgtacatcttcaaccatgcctctaaaacatgtgtaaccattgtaacgaattttagttcgtgcacctacagactctcttactacagaatgtaacccatcagcaccaatacacaaatcaaacgattcactttcctgtttggtaaaatgtagggtaaccttacaactcgtttgttcaattttagtaactttaaatcctgtgtgaatagatgattcttcgacatatgactgtatgatctcaattaaagtttgtctagataatgcgacatttagggaatgagacttcaatttagcgctcattaatggggtgccttgctcatcataaatattcattgcggtaagattttgaccagcatttttaatgcctttagcaaggtcatgatgccctaatttttttaaaacattatctcctatcccaataccagcgcttaattcgtttatagaagtatttttttcaaacactttaacttgatgaccttgttcttctaataacgcagcagcagttaaaccacctatacctgcgcctactattgctattttcatgttttacacctcaaatttatcattctttattattttagcatacacacacatgttgaaaagcaaacccttctatatttaattgtcaataaatacaattctctaattaaaaataatgaatatatatctaatctttctattgttaatgcttactttaaattttcactctattgtaaaagaaatatttaaaaattcaaaaggggtatatgctcacgaatattcttttaaacctaaaaaacctgagacatcttttattgtcccaagttttttatcatatagctaatcattgacaaagttaaaactactctgtttgaagctattcatatataaattgccaaaatagaatgaaacacttagttgattgctaactcattctctaattttatttatttgtaatatttttttcttatatgatctttttttattccatatttatcatagtatttctccattaaatcagctatattattggcccactgaatatcactagcatattgatgttggcctggattttgtgggttccaccgcatttgatataagctcaattgattatttttaaagtaatggtatctcacaaaccacgcgccacccattatcgctttttcaggagtggtccacttcttctgtttagcaaaactcttaccagtctttacagcatcttcatcaaaagcaccaataccaaaaaagttataatagtgatggttaccttctttaattccttttgataaatctgattgaccatttcctgtctcaactagtgcatgactgatgagatataggatattcacttcatatttatcttgggctttaataaacgttgatcccttattttctaaaataccttttccttttaagatatggttaacttccttctctgacataggtactttttctgatatatccatgtacttcaaatcattatcactatgttttatttgcatagctttctctatatcttgtttggaagcatatataaacttaccattaacttctttagtatggatatttccctcacttgtttgaagagacaccgcttctttaaatgtatgtttaacatcatttttaaaaaggtttgtatcaaatataagaaaaagtattgctaaaatgacgagtatgctaattatgaacaatgtcgtcattcgaagccgagtattctttaacatttcaactaactcctaaaaattttaagataatacaaaataggctattacgatagcaatcatcactataaagaacgagacattaattgcaattttcatacctgtacggtgtctgaacataacattaaaaatgacgagactaattgttaatgatacaacaaaaaatgcaatagctaacatgagctttagcataattaaacagatgattccaataactaatagtacattagatgtgattgctagagcttttaatactttaggattgatatgcgtcactccttctatgatatttaataacattactaatcatacatgattagaagaataaatgtcgactcataatacggtaaaaagtttttatatcaaatgtactagaaatttaagtgatagatgttagtttaaaaatatattaaaccgtactagatttagttattacgagacattcctctaagcagatttaacatatatcatactacgattgatatcatcatcacgtaaaaatccaacaagaatgttaattgttgttttgtcaccaggtttggttagatttgtagaatgtatccactgtttaaacgtgataataattcacttaagttttcaacatctaattcttctagcaaaaagacaagttgtgcgatatttgttaaaacgtctgaatatatatatctttatttcaagccattagcattgaatatcataaccttttgtttaatagacattgaattacatattagctcagtttatttaagtattagttaaaagaaaatggtatataatgcaatataatccttaaaaatttagcaaaaatgtttaaaactaaaataagagaatatttaactcagccatctttaatttgcaaaaaacctagaacatttcgttctaggtttttaactcaagcattacactatatgtgattttaaaaatttttcttttttataaatttaaattgtctcttagtaattgtgtattttcatttttagatgcatcacttggtatgaaatagtacaaaccgtcattttgtataccaccttcaccctctaactgatgtcgattaacttggtcattagcatctttatacttagttctaattgtattaagatcacctaattttaaatctgttttaacatttttctgaatttgattcattaatgtattaaaatgagtgattgaagaagcgcttgtcatcttatctgccatcgcttctaagataagttgctgacgctcttgtctaccaaaatcgcctcctgccccatcttctttacgacttctaataaagtccatggcagcatcaccatcta

SEQ ID NO: 3492 - DNA, 3236 bp, Artificial Sequence
  Description of Artificial Sequence: synthetic nucleic acid sequence
tcattgtcggatgtgtgtatatattatctcttaatactgtgtaaggaatatgttgatctatagcaagtttgattaagttaatcagttcttctgattctttgccatataatgacgctcctaaaatttcttttgtatctttattaatcactgctttaaataaacctctggaatcattattgattttatgacggggtatgttactgacaaagactttattgtctagaatatcgtatccttgtaacttagcctcacttgcaattagtcctactctagataggggagggtcaataaagacagtataaggtattgcgccacgattttcagttgttctagaaccatcactcagctattgctcatcaattaggtatagatttaacagatgtggtagcaataggagataatttaaatgatatttcaatgctagaacgtgtaggttatccagtagcaatgaataatgctacagatgaagttaaacatattgctaaatatgtcacagacaccaatgaaaatagtggagttggaaaagcaatcatgaaaatattaaaagaagaaaataatttagaggtgtaaaataatgaaaggtttaattattatagggagtgctcaagtagggtctcatacgaacgctttatcaaaatatttaaaaggtcaactcggcgaacatgatgttgaggtggaaatctttgacctagctgagaaacccattcatcaattggattttgctggtacaacacaagcagttgatgaaattaaaaacaatgtcaaatctttacaaaataaagcaatggaagcagatttcttaattttaggaacgccaaattatcatggatcgttttcaggtattcttaaaaatgcacttgaccaccttaatatggaccatttcaaaatgaaacccgtgggactcatttgcaatagtggaggaatagtaagttctgagccattatcacacttgagagtcatcgtacgtagtttacttggtattgctgtaccaacgcaaattgctacacatgattctgattatgctaaattagaagatggtaccttatacttagaagataatgaatttcaactacgttcaaaattgtttgttgatcaaattgtatccttcgtaacaaatagtccatatgaacacttaaaataatcatattttatgatttgtttttatcaagcaatatcattaaattagctccctttgatgtttttagtaaacattagagggagtctttatatatttatcaccttaataaaacatatacattattcttgagatttgcctttaaaatattccataaaacactgtgacagagacgtacataatactaatatgaaatacagcggttatttatatttttttatttgaaatagtttggtgacgatttgtttgatgaatataataataattttaattgttcatgttattagaattttaagaaatgctgagcaaattaattaactatttattaaatgtttgttaacatgtttaaaaaatattgcaaaaaatacttatataatatattatattttactctagaaatgatttttacatgaaaattacattgaaatagtcaaagataaggagtttttatgattaataaaaaaaataatttactaactaaaaagaaacctatagcaaataaatccaataaatatgcaattagaaaattcacagtaggtacagcatctattgtaataggtgcaacattattgtttggtttaggtcataatgaggccaaagctgaggagaattcagtacaagactttaaagattcgaatacggatgatgaattatcagatagtaatgatcagtctagtgatgaagaagagaatgatgtaattaataataatcagtcaataaactctgatgataataaccaaataaataaaaaagaagaaacgaataacaacgatggtatagaaaaaagctcagaagatagaacagagtcaacaacaaatgtagatgaaaacgaagcaacatttttacaaaagtcccctcaagataatactcatcttacagaagaagaggtaaaagaaccctcatcagtcgaatcctcaaattcatcaattgatactgcccaacaaccatctcacacaacaataaatagagaagaatctgttcaaacaagtgataatgtagaagattcacacgtatcagattttgctaactctaaaataaaagagagtaacactgaatctggtaaagaagagaatactatagagcaacctaataaagtaaaagaagattcaacaacaagtcagccgtctggctatacaaatatagatgaaaaaatttcaaatcaagatgagttattaaatttaccaataaatgaatataaagtaacgaaacttagcgtcactttcttcattgaaaagaaccgtgaaatacttttgactttcatatcaattctccttatgaattattaatataaaaattatactaacttatttttgaaaaaaacaatatttttattaagtcgcggaatgttttttatattatatcaatatttttaaaacattgatattactaaatattttcactaaaaaaattttttaaacaataacaaagagtttaagatataaatccttaaaaaataagacaccttcatatattttaataaacaccaccaaattaaattaacagagggcttacatataaaaattataacaagcctcaacttaaaagcttatgctatcaatgggaagttatgttagaactgctcaaaaatatatcgcgatatgttaataaaatttttggaacgaaacccaatggtgattttaactaatctctatgtcttaatagtaaaagaatagattttaatcatatgtatatcgaaatggtggaaatggctttaaatgtgattttaatataaataaatgtgatgattgttcagcatgttctttgaaacggctttacgcattagtaataaatactagtgcgtaagtccttttatttattgtatttttgattcataagatgaattgctttatctctgtttttaaaatgtttttttgaaatagtatcaagttgttgaatatcatatttttgaatgactttagcggcaattaaatctactttgttacttgctccttttggtatttccatatggagttttttagagatgtggtccatgtgtttaacaaatgcataacgagaaataatgcttgctgccgcgattgctagtgatttagattcaccttttgtttcaaattttgttttgtcaggaaaaggtaatgctgat

SEQ ID NO: 3493 - DNA, 3543 bp, Artificial Sequence
  Description of Artificial Sequence: synthetic nucleic acid sequence
ctgatgcaactgaagatgaacttcaagaagctaatagtaagttaaataaaatacttttagatgcaaaaaaacaaattggtcttgcgcacacaaataatgaagttgatgatatttataatgaagtttcccaaaaaatgaaaactattttaccacgtgtagatacaaaagcggtagcacgttctgtacttaatgcacttgctaaacaattgattaaaacttttgaaaatactgcagatgttactcacgaggaacgtaatgatgcgattaatcatgtaaaagaacaattatctttagtattcaatgccattgaaaaagaccgaaaagatatacaagttgcgcaagatgaattatttggattaaatgaattaaatagtatatttatcaacataactcaaaagccaactgccagaaaagcaattagtggtatggcgagtcaattaaacaactctatcaataatacgccatatgctacagaagaagaacgacaaattgcactgaataaagttaaggcgattgttgatgatgcaaatgaaaaaatacgagaagctaacactgatagcgaagtacttggaacaaaatcaaacgcaataacattgttacaagcaatcagtgcggatgtacaagttaaaccacaagcatttgaagaaatcaatgcacaagctgaaattcaaagagaacgaattaatggaaatagtgatgcgacaagagaagaaaaagaagaagctttaaaacaagttgatacattagtaaatcattcatttattacaattaataatgttaataaaaatcaagaagtttatgatactaaagacaaaacgattgaagctattcataaaatcaaaccaatatcaactatcaaaccacaagcattaaatgaaatcactattcaactagacactcaacgtgatttaataaagaataataaagagtctacagttgaagaaaaagcctcggctatcgataaattaattaaaactgcagcaagaatagccgaatcaatagataaagctcaaacaaatgaagaagttaaaaatattaaaaaacaaagtattgatgaaatttctaaaatactacctgttattgaaattaaatcagctgcaagaaatgaaattcatcaaaaagcagaagttattcgcggattaattaatgataatgaagaagcgactaaagaagaaaaagatatcgcattaaatcaattagacacaactctaacacaagcaaatgtttcaattgaccaagcattaacaaatgaagctgttaatagagctaaagaaatagcaaattctgaaattaataaaatttctgtcattgccattaaaaagcctgaagctatagcagaaattcaagaactagcagataaaaaattaaataaatttaaacaaagtcaagaagctactattgaagaaaagcaatcagctatcaatgaattagaacaagctttaaaatcagctattaatcatattcatcaatctcaaaataatgaatcagtgagcgctgcattaaaagaaagtatatctttaatagactcgattgaaattcaagcacataaaaaattagaagctaaagcatacattgatggatatagtgacgataaaattaatgacatatcttctagagcgactaacgaagaaaaacaaatatttgtaagtaaacttaaagcattaatcaatcgtacacataaacagattgacgaagctgaaacatttgtttcagttgaaacaattgtccgaaactttaaagttgaagcggataaattaaactcaattgtacgtaaaaaagctaaagcatcgaaggaaattgaattagaagcagaccatgtaaagcaaatgataaatgcaaatttaagtgctagtactagagtgaaacaaaatgctcgtacattgataaatgaaattgttagtaacgctttaagtcaacttaataaagtaaccacaaataaagaagttgatgaaatagttaacgaaacgattgaaaaacttaagtcaatacaaataagagaagataaaatattgagtagtcaacgttcatcaacatctatgacggaaaaatctaatcaatgttatagttccgagaataatacaattaaatctctaccagaggcaggaaatgctgataaatcactaccattagcaggagttactttaatatctggtttagcaatcatgtcctcacgtaaaaagaaaaaagataaaaaagtaaatgactaaatttataaatcacaaaaccggagatatcaattgataaactcccttcaaagtagacattaatataatgaaaactttgaagggagtatttttagatattcaatataaaatcgacgctaatctattattatacgtcttttaagaatagcaaaatgtaaattcttttcaatactaaatcagttcatttaaggtagttattaatatttaccatttatatgtgaaatataataattataaatttaatggagttgaatacctttatcacgttctaataacaaattattaattgtaatggtggttatgttgtggaaatattaagaaatactatttatgaattagtttatgtacaatctagataagtttaataataaaaattatttgttttgatctattttaaattcaccagcaaacattccagcaacatgacccgtaactaatgcgcttgttatattataacctccagtgtatccatgaatatctaggacttcgccacataaaaataatcctggcactaatttagacatcatagtttttggttctatttcttttaaagaaataccgccgcctgtcacaaaagctttgtctaatggaagtgtgccatctactgtaaaggtaaaagtctttagaagattaataaaagtttgaaactgttgatttgataaatgatgtgcagtcatttcatcattaataccagattgttcgagaataaacaataaataccgctcttctattaatcctcgcaagctatttttaatatatttatctggttctgcattaagtatttttctcactttttgagatagttgatctacgtttaattcaggaaaaacatctaattgcatatggatatttttctttttttgatttttctgctctttataaacaaactgactactggagatgattcaatgaagacctataagccgtaccgacatcaattaaggcgttcgctatttgcctcaacgattttcccagtatttatggtgatgattattggtttaataagcttttatgctatttatatatgggtcgaacattgcaccattcatcagcatacctatcaaactcaaaccgaattacaacgtatcgacaaacattttcatacgtttgttacgcagcaacaaaaacaatggcgtcatgttgatttatcacatccaactgatatcacaaagatgaaacgccaactattaaaacaagtccatcaacaacctgcgatattgtattacgatttaaaaggttcttcacaatctttcacaaacaattatgaacaattagacacaacaaagatgtatttaatatcaaaatatcgaattgattttaaagacgatacttatatcct

SEQ ID NO: 3494 - DNA, 3209 bp, Artificial Sequence
  Description of Artificial Sequence: synthetic nucleic acid sequence
tcttcggagtttttatgtctttcttttctttgtctttctttggtgtttttgtgtctttagattctttctcgtctttatctttctttagtgtttttgtgtcttcgtctttctcgtttttggtaatttgtgtatttgttactgaagtatttgcttgattttgttcttttccattcacttcatctttattttgattggttgtttcaacaactttatttgtattattatcttgttgattattttcaactataggtgattgtgcagtgctaattttacgataaataaacttagtaattccgtcactcacagaagttctataatgttggtacccaggaattttcaccggttgcctttctgaagcaggggttttagcatcttccacagcatctttaataatatttccttgatcatctagccagacagttacataaagaattggaagttcatatgacgcatcgtattcttcttcatcattattattttgatctgttgttatggctgtggcatctgtattttcagtattatttgtaggtgctgtctgtgaagtttttggtgatgttccttgattttggtttgcagtattttcatccgcatacacagttacgttactgttaaataaatagagtgccaatgttaatgcacttgctgtaccatatcttaaagttttcttacttaaatatgtttgaattaatttcgaattattaggtttgttgtctttcatagttgtatgtgcctcctaattttttgatttaaattaaacttcgatatcaaatgcttatgatactgatttacagtgtgagcataatcgataaaatatacacaatacgttatttaatttataatatatcatgtattttaatttttcacaatttaatttcccctaataatactaaagactttttattactttcaacattgaaataacacttttataactgcattaaaatcgttgatttcttagagttttactgactaaacattataactttactatatagtgatttatctgatgattttttaattacgaatattttaacccatacctaaaaaagcttctcaaaagtctattcaacttttgagaggcttgatagtaatttaaattaaatacttatattgatgtctaaaatcaataaaatatttacatcatacctggcatgccacccattccaggttgttcattattttctggctctggaatactagcaacgactgcttcagttgttaagaacatagcagctacacttgctgcatgttgtaacgctgaacgagttactttagttggatctactataccttcttctaacatattaacccattcatttgttgctgcattgaaaccaacgcccgcttcagcatgttttaaacgttcaacaataattgaaccctctaatcctgcattttcagcaatttgtctaacaggtgcttgtaatgcttttaatacgatattaacacccgtttcaacatcaccttctgctttaatttcacttactttttgatatatattgactaacgcagtaccaccaccagcaacgataccttcttccaccgccgcacgtgttgaatttaatgcgtcttcaattcttaatttacgttctttaagctctgtttcacttgcagcccctactttgataacagctacgccgccagctagttttgccaaacgttcctgtaatttttctttatcaaactctgaatcagtttcttcaatttgtgctttaatttgacctacacgagcatcaatattattttcatcaccattaccatctacgactgttgtatgatctttagtcacttcaactttattagcagtacctagcatatcaagagatgcatctttaagttctaaacctaaatcatcagtaatgacttgagcaccagttaatattgctaggtcttctaacattgctttacgtcgatcaccaaatcctggggctttaactgctacagcagtaaatgttccacgcatacggtttaaaacaatattagtaagtgcatcgccttctacttcatccgcaacaattaaaattggtcgactagcctgcacaacttgttctaataatggaagaatatcttggaatgatgaaacttttacttattaaatgattttaattgaatatatgtttttcagtcaccatataacatcactaacaaaatacatttatctcactgaatagtcatattaaaataaaaaaactgctcgcaaagcatttagctttgtcggcagctttttacagaacaaatacattaagttcatatatgatacattttaatttttagattgctctaatactttatgtgacgcattaacgcgaccttgtttatcgatttcagtaattttcacttcaattgtatctccaattttaagaacatcttctactttattaattctttcttgtgaaatttgagaaatgtgtaataacgcgtctttaccagggaacaattcaacgaaagcaccatacttttcaatacgttttactttagcatgatatacttgtccaacttccgcttcgcgtgtaatatcttcgataatttcttttgcacggttaatcatcgcttgatctacagcacctataaagattgtaccatcttgttcaatatctaatttaactccagtttcgtcgataatttcattgattttcttaccacctggtccaatcacgtctcgaattttatctggattaatactcatagttaccacttttggtgcgtaagcacttaattcttcgcgtggttgttcaatcgtgtgaagcatatgatccataatagctaatcgtccttgacgcgcttgttctagtgcttcttcaataacttctcgagttaaaccatcaattttaatatccatttgaatcgcagtaataccgtctttagtacctgctactttgaagtccatatcacctaatgcatcttccattccttgaatatcagttaaaattgtatagctatcgtcacgcgttactagtcccattgcaatccctgcgactggcgctttaattggtacaccggcatccattaatgctaatgttgaaccacaaatcgatgcttgagatgatgaaccgttagactctaatacttcacttacaatacgaattgtataagggaaatcttgagtatcaggtataatgtaacgtaatgctctttcaccaagcgcaccatgcccaatctcacgtctaccaggtgcacgtacagggccagtttctcctacagagaaatta

SEQ ID NO: 3495 - DNA, 3060 bp, Artificial Sequence
  Description of Artificial Sequence: synthetic nucleic acid sequence
gattcggctattcttgctgcagttttaattaatttatcgatagccgaggctttttcttcaactgtagactctttattattctttattaaatcacgttgagtgtctagttgaatagtgatttcatttaatgcttgtggtttgatagttgatattggtttgattttatgaatagcttcaatcgttttgtctttagtatcataaacttcttgatttttattaacattattaattgtaataaatgaatgatttactaatgtatcaacttgttttaaagcttcttctttttcttctcttgtcgcatcactatttccattaattcgttctctttgaatttcagcttgtgcattgatttcttcaaatgcttgtggtttaacttgtacatccgcactgattgcttgtaacaatgttattgcgtttgattttgttccaagtacttcgctatcagtgttagcttctcgtattttttcatttgcatcatcaacaatcgccttaactttattcagtgcaatttgtcgttcttcttctgtagcatatggcgtattattgatagagttgtttaattgactcgccataccactaattgcttttctggcagttggcttttgagttatgttgataaatatactatttaattcatttaatccaaataattcatcttgcgcaacttgtatatcttttcggtctttttcaatggcattgaatactaaagataattgttcttttacatgattaatcgcatcattacgttcctcgtgagtaacatctgcagtattttcaaaagttttaatcaattgtttagcaagtgcattaagtacagaacgtgctaccgcttttgtatctacacgtggtaaaatagttttcattttttgggaaacttcattataaatatcatcaacttcattatttgtgtgcgcaagaccaatttgtttttttgcatctaaaagtattttatttaacttactattagcttcttgaagttcatcttcagttgcatcaggataaccattaattatagcttcttgagtatctgaaacatcatataattttaatatagcatttttctttttattatattctggtctgtattcagttatgttattcaacccagaagttttagcattatctacttcattatctgtattagcttgatttatagaattaatgatttctttaacctgttcatctaaatgttgtaaagcattgtctttttcctcttgtgtagcactaaattcttgctctatttcatcaattttgttttgttgcgctttaacaatttcagctactgcattacgttttttactaaaatctggtctgaagttattgatttgatctaaactattttgctcagcattttcaacttgctgattagtttgagattgatttacatcatttttggctttttcatgaatttgatttaactgatttaaaccctctcttacttcatcatgagttgcattttgtgtttgattaatttcagttttctttttttctactgcgctttcaattttagatttggcagtaggttttttaactacaagtggttgaatatctctaattgtacctatacctttgttcttttctacattcacttggttggtatctggtgcatcctcaatagcttgatttgttgtctcgacaacgtgatttaaattgtcactagcaactaatttttcttcagtcgttgcttcatcattactattaatttgtaggtttttctcctctttttcagcatttacatcagctttagctttatctttaactgtagtagcaggtaatatattttcaatttcagctattccgtttactacagtcttttctacatcatcattggtttgacctttatctattttagctatggctttttttaagaacttcttgtagttttgcacttgcttcctgtctttcttcaattgttgaattaggatgagttgcaatagtactttgttgttggttagctttttcatttaatctgtgacgcccggttgcttttgtttgtggatgtggttgaatttgctctatatcttgaatactacgtgttttcgcactatctacatctttatttgactgtgcttgatcaatatttactttagcctgattaagtaattggtttattttatttaatgcttcagttttttcttcattcgtagcttcttgcttctcttgtatttcttgagtttgtgaattaaatgcttcttggattgcatttaaagcatctcgtttcttactaacttgtggtacaattgcctcgatttttggtctagctttatctaaagcttgatcaacctcgttgttatgatctacattagcaatttcatctgatgtggaagttagtacattttgaagcaatctattagcttcagctttttcttctagtgttgcatcaggcgtattttcaataattttcttttgattatcaatgaattgatttaattggtttttagcgttttgtttcttgataacttcaacttgaacagcgttaatattttgaacagcttgatttttaatattattaacttcatcagtagtgtgtgcttttaggatattagcatctgcttcttcttgaagacgatcaactttattatttgcttcttctttttcttctgctgtcgcatttggtgtttgatctattatagcgtttttatttttagcttcgctagctagagctgctaatgcattagttttgactgctgtacttggtaatatttggctaatactcgtgttaccactatttttagcatcattaactaattgtgtagttgtagcattagtaatattgttaatagcatcaattttagctacattaactctatctatagcggctgatttttcttcattagttgatttattatttgcattgatagtatcaatttgactttgcgcatcttgttcaatttcttgtttagcattacgtttaattatagtctcaggatggacctcagaaattttagcaattccattattttccacaattttcacatcattatttgagtgtgcctgtgatacttgatttaacgcttcattctttacttcttctaatttgccaagtgctatttgtttttc

SEQ ID NO: 3496 - DNA, 3994 bp, Artificial Sequence
  Description of Artificial Sequence: synthetic nucleic acid sequence
tgtattaccttttaatctgtatcccattcgatctgattgatcagaaattttgaaatcgctatttacgaatttagctatcgtttcttcatcaaattcattgatctgaggtccttcaatgacgtgtatgtaattattatcaggtatagatgagaaatcaattgtttttcctaaattagttttatagttatgatttacttgagttgcaataacatcgtatttctttaatgcacgacctttaaatccgcccattccacttctaacatgtgtagaatagctttgagccactttattaattttaagtgggtgtccaaaaacaatatatcctcttgctccttcagtgatttgaccaatgtctaattggtctccatttcttacatgataaacagttaataagtcaattttgttaccattaagtttcggttctgaatcaccaccgacaatggcaaaagtattgtctgttaaaaattctatattaggacctactaaagtatattcaattgctggtccatgatttccgataagtttttgggcaatagataaactatagtaatctaatgcacctgcttcagaaaatcctaaatcctgataccctaatctacctatatcttgaattgttgaaaacaggccaggctttaaaattttaatactcatcttgatatgtcacccacttatctatatcaaattttcctttattaatatcgtttgatattttttcaaactcttgataatttatactataaaattgtatgtaatcaccagcttcatataacgtcattggtgtcctatttaaatcaaagacttttattggtgtgcgaccaattatctgccaaccaccaggtgagtccataggatataaacctgtttgattatttgctattccaacagaaccagcgttaattttgattctaggttcagaccgtctaggtgtgtgcaacttagcatccaatccacctaagtatgggaaacccggcataaacccaagcatatagattagataaggttgttgtgtatgtatttgaataacttcttcctgacttaatttattaacgttagctacttctgataaatctggaccaaaatctccaccatataatacaggtatatgaatgatacgctgtttaaaatgtgattgttttctactgttcgaattttcatcgagttctaaattttctaataattcagttccgtttatccccgatttatcaaagtaaattagaatagcacgatatgaaggtatcatgtttgttatttcagataaatttttcgattttatatattgaattgtttgttgtacctttttgaaagttgattcactaatttcattttcaaagtaaatcatcattgtttgttcattaataaattgtgtcctcaaaacaaaatccctccttttaaaaatactaaggaattatttgttacaacaattttattgtaccattgcaataaagatgttgtttaataattaattcaaatagctaataataacaaataataaattgaattaaagttattgggttatcttaattattgcaaacttccaaacattaaatttctattatcatttaatcatattgataacagtttgtcatattttggtggataaaacctcatcaaacatttatttaaaccattctcaaattacacaaaatacctgagacatcgaaaatagtctcaacttttaaagtgcattgaagtgtaatcataactatcaaactacaagtataatgcactttttatgagtcagggacataaagttccaggataagtaaatcaaaaccacccgtatgaacgggtggtttgttctacggctataagcctttcttactggccagccctaaaagggcactgataggtcagccaactgcactactttcccagcacccctaaaggggtactatttttttcgtctttttttaatttcttctcctgtaaagggatctaggtattcttccattgaaatttgatctgcaacgatatcttcttgtaattgattacgaatgtaattttcaattacctttttatttctacctactgtatctacataaaatcctttacaccaaaactttctatttccatatctatattttaaattagcatgtctatcaaaaatcattaaactgcttttaccttttaaatatccaacaaatgaggatactcctaatttaggtggaatactaactaacatatgaatatgatctttagatgcttctgcttctattatttctacgccttttctttcacatagttgacgtaaaataactccaatatctcttttgatttttccgtatatcacttgtcttctatattttggtacaaagactatgtgatacttacaattccattttgtatgtgctaaactgtttgtgtcagatgacataaaaaagcatctcctcgtgttgaatattttggttggctgaccaatatatattctagcatgatgagatgtttttttagataacggtaaaaccttttctgaaccatacgcatagcgcatggttttctttatacaataaagaagccagtaatgaatttataaaaaattcatttactggctattttgctaggaattatatcccagactcattgaactcaaaatttatatatattactatccggaaccgagtttggaaagtacttcaatgatatttaagttcgatttcccccatttagtaaattatttaatttcaacgattttaacattcatttcgccaccgttaggaagtggaacacgtacttgatcatttaatcctttaccgattagtgcttttgccattggagattcgttagaaatttttcctttaaatgcgtcagcttcagcagaaccaacgatttgataactttcttcttcatctccaggtaattcaataaaagtaactgttttaccaatttgaactacattgttatcaccgttatcttcaatgattaacgcatttctaatcatatgttcaatacgttgtatatcttgttcaataaagccttgttcatctttagcagcatcatattcagagttctcagataggtctccaaatgaacgagctacttttattttttcaactacctcaggtcttttaaccgtttttaattcttctaattcttgttcaagtttctcataaccttcttgagtcataggatattgtttttggttttccataaatctcatcttcctttactataaaaattactattttttgcttacgagtgactggattttagtagtcataatatctatggcaactttattgctgcctccttcaggaattatgatgtcagcatgcttttttgtaggttcaataaattgctcatgcataggtcttactacattaagatattgattaattactgattccattgtacgaccacgctctttagtatctcttgtaagcctacgtaaaattcgtaaatcagcatcagtatcgacataaattttcacatccatcatgtctcgtaatgtgttgttttctaaagcaaagataccttctacgataataacatcttttggatcaaatgcaattgtttctttactacgtgtatgttgagaataatcgtacgtaggtacctctactggttttccatttcttaaatcttttaaattatgaataagtaaatcattatcaaatgcaaatgggtggtcataatttgtttcaagccgttcttcaaaagttaaatgtgattgatctttatagtaataatcttgtgctaagagtgcgacactatgaccttctaaattcttcatgattgcattagtaactgtggttttcccagagcctgaaccccctgcaatgccaataatcgttgtctgattcattagccaatttcctttctcatcatgttgttagaataaataggcttatctactttaatttgtacaatttgtaatggatgacgtgctgcatctaaagaattaccttcttcgtcgtaaatcgcttcaacaacttgtttaaaactatcaatttctggaccaaagaactcaatttcttgtcctggtttaaaatgattt

SEQ ID NO: 3497 - DNA, 3841 bp, Artificial Sequence
  Description of Artificial Sequence: synthetic nucleic acid sequence
attgatagttgtaccatatggagcgccatagtcaataccaaagtgagcaccaccattaaaactataaccaggagcaccaccattaggataataccccgtagtaattgggaatttagtgaacgaagaaccatctccaccgcctgcagagtctaaaccttcattaaagaagtctttaataccatttttaagtttcttaatcatagctgtcattaaatcaaatggtaatggtgcatttttcataaagtctaggttaaaaccaactttctcaaagactttatttaccaatttcataggatgacctacataatcaaaaacatctccaatacccttgataacagtgctagacacatctttagctttatcaagtgcttttgtacctatgtcttttgctttgtcaaacgtagtaccacctatgtctcttgctttaccaccaatgtcttttactttattaacatcattttttacaccagagctaataacatctaatataccgtctttctttttagtacctttactaaatttaggtagttttttcttcttagtgtcatatttgattgtagaattaagcattatcaaggtcgcattcaatcaggtgagaagattaaatatactaaataatatattaggtgattcgttatgcaaatattattagtcgaagacgataatacgctttttcaagaattaaaaaaggaattagaacaatgggattttaatgtcgttggtgtcgaagattttagtcatgtgatggagacatttgaaacatttaatccagaaatagttattttggatgttcaattaccgaaatacgatgggttttattggtgtcgaaaaatgagacaacagtcgaacgttcctattttatttttatcatcaagagataatccaatggatcaagtgatgagtatggaacttggtgcagatgattatatgcaaaaaccattttatacaaacgtcttaattgctaagctacaagctatttatagacgcgtttatgaatttggagttgaagaaaagagaacgttaagttggcaagacgctactgtggatttatcaaaagatagtattcaaaaagatgataaaactatctttttgtctaaaacagagatgattattttagagatgttaatcaataaacgtaatcaaatcgtgacacgagacactctcattactgctttgtgggatgatgaagcttttgttagtgataatactttaacagttaatgttaatagattaagaaaaaaattatcagaaattgacatggatagtgcaattgaaaccaaagttggtaaaggatacttagctcatgaataattttcgatggttttggttttttataaaatctcgtattaattggatattgtggatattatttctcaacattattttattaggtgttgcctacatagattatgagatttcagttgaaagtgtattttatatagtgatattaaacgtaggattgagtatacttttcttattatttacgtttgttaaagaagtccgtctatctaaacatttttatgaagataaagaaattgaagaaattaagcataaagatttggcagaaaccccatttcaacaacaagtcatagattatctgtatcgtcatatagccgctcaaaaagagaaagtagtcgaacaacaattacaaattaaaaatcatgaacaaacaattacagagtttgttcatgatataaaaacacctgttacggctatgaaattattgatagatcaagagaatgatgatcagcgtaagcgagcgttattatttgaatggtctcgtattaatgagatgttagataagcaattatatttaacaaggcttgaaacacatcatcgtgatatgtattttgattatatttcattaaagagaatggttatagatgaaatacaagttactcgacatatcagtcaggcaaaagggataggttttgaattagattttaaagacgaacaaaaggtttatacagatgttaaatggtgccgtatgatgattaggcaagttctatctaactctttgaaatatagtgataattctacaataaatttaagtggttataacatagaaggacacgttgttttaaaaattaaagactacggtcgtggaattagtaaaagagatttaccacgtatatttgatagaggatttacttctacaacagaccgcaacgatactgcgtcttctggtatgggattataccttgtacaaagcgtgaaagaacaacttgggattgaagttaaagttgattcaatagtggggaaaggaacaacgttttatttcattttcccacaacaaaatgaaatcattgagcgcatgtctaaagtgacaagattgtcattttaaacgtgcgttttgttacttactattatcacaattgtaataaataatcgatataataaaagatgtaaattaaagaagatatgatagtctacattaagtttgtcttcgtaaaaagataatttggttgaagtatgacaggagtgattatttgtcgatattagaggtaagacagttgtcaaaagtctatggtgataagcaagctttccaagaagttttgaaagaaattaatttagatgttgatgaaggtgagtttatatcaattatgggaccttctggttcaggaaagacaactttattaaatgtacttagttcgattgattatatgactaaaggatctattacaatcaacgggaaacaacttgagaagttatctaataagcaattatctgatattagaaaaaaagatattggatttatttttcaagattataatattttaaataccttaaccgttaaagaaaatatcatgcttccactatcagttcaaaagttagataaacaaataatgcatgaacgttatcaacgtatagtagaagctttgaacattagtgatattagtgataaatatccatcagagttgtcaggtggacagcgtcaacgtacctcagcagcaagggcatttattaatttaccttcaattatatttgctgatgagcctacaggtgctttagattctaaaagtacactagatttacttaagcgtcttaaatatatgaatgaggaatttaacacaaccatacttatggtgacacatgatccagtagcggctagtttttcaaaccgtgttgtgatgttaaaggatggacaaatctttactgagttgtatcaaggtgatgatgataaacaaacgttttataaagaaattataagaacgcaaagtgtacttggtggcatcaattatgagctttaatgaaattatcttcaaaaactttaaacaaaatgtgacgcactatgctatttatttattatctcttgttatcagcgttgtattatattttagttttgtaactttaaaatatgcgcaccatttacacggtaatcaatcgtttcctgccatcaaagaaggttcacaagtaggaagttattttttatttatcattattgtggtctttttgctttatgctaattttttatttttgaaaagacgaggtcgtgaactatcgttattacaaattattggtctaacaaagaaagatatcatgaaaatgattatgttggagcaattgatgacatttatgatgacaactattgtaggtatcatattgggaatctttggttcgaaaattttactcatgattgtattgcgattattaggaatcaacgtgagtgtttctattatatttaattatcatgccattttagaaacgttattattaatagctgtgtcatatgtacttatagtctttcaaagctatgtatatttacttaaacgttctattaaagagttagcgtctgatgtaaataaaaaagagttcagtcatacacgcacaacacttggtg

SEQ ID NO: 3498 - DNA, 3082 bp, Artificial Sequence
  Description of Artificial Sequence: synthetic nucleic acid sequence
acagattacaaaagataactatagcattatgatataaatatttttttaaagagaaatcacactaatttcgaagatattttaacttacatatagatttttcattatacttcactaaaactaaatgattattataataccgtatactctctttatattcatcacgtttatttacaacgtcatttatttcagcaccatcaccaactgtctcattaattgataattttgaaattgaatcaaacaaaagtttcaattattgaacgctatataaaattaatcaattctatgaagcttagctacacaacagcaaaaattattctttaagctactgttttttactctggtgcacgtaagggcgaaattagagccctcacatggcgtgatattaactacgatgatgagtttcatacatataaacaaaacagactatcacggtgaagtgacagcccctaaaacaaaagcagcaatacgtgatatatatttacctgttcatatgatgaatgatatcaaagaatatttaaaatggtacaaagaaaacaatgtatataaagatgactatgtattattcggtacattcttcaaagcttaaagcgaatcaactatagatcgtttgtttaccactgcattaaaaacattagatgaacaactgccagacggtcagaagttctctagaatcgttatacatgaattaagacatagccatgcgtctatgttagtcaatcacggtgcaagtatcatggtgatagctcaaggtttaggccatgcaaatagcaacgaagtatataacagatatggccatttatatcccagtacacaaaaagaaatagtaaaatacttataagggagattatatatgaaaatatttaattggaatattattaatgaaactagtttcgatattacttgtgactacttttcaaaagatataatcattgttgataaagcaacaaatagacaactcgtatactttaagtacaatattaaggaagatatttatactgaagatgaaaaggttcataaagtaattacacaaattaatactatggataaatcaatcacgatttatgataatattgcgtcctaattataggacgctttttatgtgctggggcatatctggggcaacgaaaataaaaagcccacaaccacatgggttacaggctatataatggagacggcgggattcgaacccgcgtccagaggtcctgatacaaatctttctacgtgtgtagtttattgataattttcgcatcatgctaagcaataaacaaccaacatgatactagcttgattatatttcatctaaacagacttcaagcggcagtgtttagcatatcctactagggttgaatcgcgttaacagcacgtaggagatgctgttaggcgatgcagtggctattacgcagctactgcgaaattattgtttgatttgtcagttatatttaaccgaaatgtgttgatgacggagccaaccctccgacacgcttaataagctcgggggacccctgtcgaatccaagaacgtcccctcaattcaaatcaatctaacaaaatatttggttaaatcatcaataaaacaatttgacactgcaatcaatcatatcaaagatggcccgattaagcaatgatattgcttaataacgggctttaactgcgcgatcaatatctcgttttaccgctttttctttaagtgcttgacgtttgtcgtatttctttttacctctagcaacgcctaataaaactttacattgaccatgttttaaatataacttcaacggaataatagaataacctatttctcgtgtacgctcacctaatttttgaatttcttttttgtgcaagagtaatttacgtgtacgtaaagggtcatgattaaaacggttcccttcttcatatggtgcaatatgcatattattcaggtacatttcgcctcgtctcacttgcgcaaagctatcttttaaattggcactaccacgacgtatagatttaatttcagtacctcttaaagcaatacccgcttcaattgtatcttcaatattgtagtcatgtcttgctttacgattttcagctaacgtacctggtgattttgattttttcttagccactattactcacctcatctttgctgactattttttctttcgacgcgatttcttcttcacacttttatctttataaaaaggtttgtgatgcgtattaccttgtttatcttttttacgtgcatttttacctttacgttgcttacgttttttctttttacctttaccattacgatcacttttagtgtggtctaacgacttgccacgtgttttagcttgaatggttttctcacgagcaggtcgttgtgatgatgtctttttaggtaatggcatgccaacaatttggaaatctatcatgcgttcttccacatcaacatgtgtcactttaactttgaccgtatcaccaatgcgaaagacctttgcttgacgttcaccgattagtgccatttgtcgttcatcaaaatgataataatcgtctgtcatattagcgatatgaaccataccctcaatagtattaggtaattctataaacataccaaaattagcaaccgagctaatgataccttcaaattcatcaccaatatgttgaatcatatactcagcttttttcaattcatcagtatcacgttcggcttcaatggcacggcgttcacgttgtgatgtgtgctcagctaattctggcaacgtctcttcccaatgacgtatttcttttttatccatagaattctctattaaatatttacgaattaatctatgcactgttaaatcaggataacggcgtattggagacgtaaagtgagtatagtactcagcagacaaaccaaaatgtcctaaattaacatcatcataatgtgcttgttgcatagaacgtaacatcatcgttgaaataaccatttgttctggtctaccttcaacttcttcttgaatgctttgtaatgttgttggatgaatatcttcacctgtaccttttatcataataccgaaattggtaataaagtcgaagaactgtcttaatcggtcagattttggttgttcatgaacacgata

SEQ ID NO: 3499 - DNA, 3730 bp, Artificial Sequence
  Description of Artificial Sequence: synthetic nucleic acid sequence
atctagtattgcacaaactcttattaataatggtgatgcatctgatcaagaagtttctacagaaatagaaaaattaaatcaaaagctgtctgaattaacaaattcaatcaatcacttaacagttaataaagaacctttagaaactgccaaaaatcagttacaagcaaatattgaccaaaaacctagcactgatggtatgacgcaacaatctgtacaaagctatgaacgtaaactacaagaagccaaagataaaataaactcaattaataatgtcttagctaacaatccagatgttaatgctatcagaacaaacaaagttgagacggaacaaatcaataatgaattaacacaggcgaaacaaggtcttactgttgataaacaaccattgattaatgcaaaaactgctttgcaacaaagtctagataatcaaccaagtactactggtatgactgaagcaacaattcaaaattataacgctaaacgtcaaaaagcagagcaagttatacaaaatgcaaataaaattattgaaaacgctcaacctagtgtacaacaagtgtctgatgagaaatctaaggtagagcaagcactcagtgaattgaacaacgccaaatcagcgcttagagctgataaacaagaattacagcaagcatataatcagttgattcaaccaacggatttaaataataagaaaccagcttctatcactgcgtacaatcaaagatatcaacaatttagtaacgaattgaacagcactaaaacaaatacagatcgcattttaaaagagcaaaatccaagtgtagctgatgtcaacaatgcactaaataaagtaagagaagtacaacaaaaattaaacgaagccagagcacttttacaaaataaagaagataatagtgcactagttcgagccaaagaacaacttcaacaggcagttgaccaagtcccttcaacagaaggtatgacgcaacaaactaaagatgattacaattcaaaacaacaagctgctcaacaagaaatatcaaaagcacaacaagttatcgataatggcgatgcgactacacaacaaatttctaacgccaaaacaaatgttgaacgcgctttagaagcattaaataatgcaaaaactggtttaagagcagataaagaggaacttcaaaatgcatataatcaattaactcaaaatattgatacgagcggtaaaacgcctgcaagtatcaggaaatacaatgaagctaagtcacgtattcaaactcaaattgattcagctaaaaataaagcaaacagtattttaacaaatgacaatcctcaagtatcacaagtgactgctgcgttaaacaaaataaaagctgttcaacctgaattagataaagcgatagcaatgcttaaaaataaagagaataataatgcattggttcaagcgaaacaacaacttcaacaaattgttaatgaagtagatccaacacaaggcatgacaacagatactgctaataactataaatcaaaaaaacgtgaagctgaagatgaaatacaaaaagctcaacaaatcattaacaatggcgatgccactgagcaacaaattactaacgaaacaaatagagtaaatcaagcgattaatgcaataaacaaagccaaaaacgatttacgtgctgataagtctcaattggaaaatgcttataaccaattaatacaaaatgttgatacaaatggtaaaaaacctgctagtattcaacaataccaagctgctcgacaagctattgagacgcaatacaataacgctaaatcagaagcacatcaaattcttgaaaatagtaacccttcagttaatgaagtagcacaagcattacaaaaagttgaagctgtacaacttaaagttaatgacgcgattcatatgcttcaaaataaagagaataatagtgcacttgtcacagctaaaaatcaacttcagcaagcagttaatgatcaaccattaacaacaggtatgactcaagattctattaataactatgtagctaagagaaatgaggctcaaagtgctatcagaaatgcagaagctgtcatcaacaatggcgatgcaactgcaaaacaaatttcagacgagaaatctaaagttgaacaagcactagcacatttgaatgatgctaaacagcaattaactgcagatactactgaattacaaacagcagttcaacaattaaacagaagaggcgatacaaataataaaaagccaagaagtatcaatgcatataataaagcaattcaatcattagaaacacaaattacttctgctaaagataatgccaacgctgtgatacaaaaacctatacgtactgttcaagaggtaaataatgcattacaacaagtaaatcagttgaatcaacaattaactgaagcaattaatcaacttcaaccgctatcaaataatgatgcattaaaagctgcaagattaaatttagaaaataaaattaatcaaactgtacaaactgatggtatgacacaacaatctatagaggcttatcaaaacgctaaacgcgtagcccaaaatgaatctaacactgctttagcattaattaataacggcgatgccgatgaacaacaaattacaactgaaacagaccgagtcaatcagcaaactacaaacttaactcaagcaattaacgggttaacagttaataaagaaccattagaaaccgctaaaacagcgttacaaaataacatcgaccaggtacctagtacagatggtatgactcagcaatctgttgcaaattataatcaaaaactacaaatagctaaaaacgaaattaacacaattaataacgttttagcgaacaatctagatgttaatgcaatcaaaacgaataaagcagaagcggaacgaatcagtaacgatttaacacaagctaagaataacttacaagttgatactcaacctttagaaaaaataaaaagacaacttcaagatgaaattgatcaaggtactaacacagatggaatgactcaagattcagtggataattacaatgatagcttaagtgcagcaattatagaaaaaggcaaagtaaataaattacttaaacgtaatccgacagtagaacaagttaaagagagcgttgctaatgcacaacaagtcatacaagatttacaaaatgctcgaacttcacttgttccagacaaaactcaacttcaagaagctaaaaatagattagaaaacagtattaaccaacaaacagatactgacggcatgactcaagattcgcttaacaattataatgataaattagcaaaagctagacaaaaccttgaaaaaatatctaaagttttaggtggtcaacctactgtagctgaaattagacaaaatacagatgaagcaaatgcacataaacaagcattagacactgcacgttctcaacttacattaaatagagagccatatatcaatcatattaataatgaaagtcatttaaataacgcgcaaaaagataattttaaagctcaagttaactcagcacctaatcataatactttagaaacgattaaaaataaggctgatactttaaatcaatctatgacagcattaagtggaagtattgcagattacgaaaatcaaaaacaacaagaaaattatttagatgcatctaacaataaacgtcaagactatgacaatgcagtcaatgcggctaaaggtattttaaaccaaactcaaagtccgacaatgagtgctgatgtgattgatcaa

SEQ ID NO: 3500 - DNA, 3280 bp, Artificial Sequence
  Description of Artificial Sequence: synthetic nucleic acid sequence
aaataacgatcatgactgaccgtaatgacagaaccaccgaaatcatcaatgtaatcttctaaaatcgtaagtgtttcagtatctaaatcattagtcggttcatctaaaaggagtacattaggtttatgaacaagtaaacgcaataaatacagacgtttttgttctccacctgagagtttataaacttttttaccgtgtgtagcgctcggaaataaaaatctttctaacaattgtgtaactgaaattgaggtaccatctttttctttagccatttcactttcttctcttaggtagtcaatcactctaatatcacggtcaagtgtcttttctgtttgcttaaaataagctaccttaacagtctgaccgattttaagctcaccctcatagtcctgatcttcattacttaaaatattaagtaatgttgtttttcccgctccattaggtcctacaatacctatacgtctaccactttgaataatttcagtgacatcttcaaataaaactttattattaattgattttgataaattctttaattcatatacttgtttacctaaccttgaatatgcaagattaagttcacccttatcttgtgtatgttgcgtcttaacgtctgattctagttgattaaatctattgatacgtgcctgttgtttagtagttcttgcctttgctcctgctcgcatccatgctaactcttgtttatacaatgctttttgtttttcttgttgtttttgttctactaattcattttctgcacgcattactatgtaatcttcataattacctggatatgtttttaacttccctctatccagttcaataattcgcgtcgatacttcatttaaaaagtagcgatcatgtgttacaaataaaactgtatgtggatattgcttgacataattaatgagccaacggatggattcaaagtcaagatggttcgtcggttcatctagcaaaagtaaatccggttgttctattagagttttagccaatacaactcttttttgttgaccacccgaaagttcaactattttcttagttgtatcgtgaatccctagtttagataaaatcgttttaatttctgcattatagtcccatgcatccttttgatccatttcttcttgtgcttccatcattttattaaaattagagtcactttgatctaacgcatagcgattaactgcttcttcatatttttttataattcttaatgtaggagtatccgaacttaaaacagcttcgaacacagtcatatggccattgaggtcttgtttttgagaggaataacgaatgcgatattgattagggtgggtaatatctgcagtaaaatcttcatctagaccaccaatgacttttaatagtgtacttttacctgttccattgatacctactaatccaattctttcatgctcagatatagataggttaagatcattaaaaatttctttatctgcataggatttatttaaatgttcaattttgtatgcttccatgcttatcttccttttcaaatactggaaattgtcaactatcgaattttcaaaaaaattttgttaagctaaattcagttctatatattatacacctttttagattcaaatgatataaggagacttagatatgtcagatttattccaaaacgcaccaccctatattcaggcgcttatagccggaataatcacgtggttacttactgctttgggtgcggcagcagtttttatatttaagaaagtgaatgataaagtcttaaattcgatgcaaggttttgcagctggaatcatgatagcagcaagtttttggtcattgttacaacccgcaattgaatcgagtgaaaatagtgctatgccatggcttcctgcagcaataggttttattctcggtggcgtttttatcagggttctagattatattattccccatattcaccaaaatgcccaagataaaaaccaacaacaagagggtgtgcctacctctcttggaaaaaatgcattacttgtgttagctatcacacttcacaacatacctgaaggactatctatcggagttgcattcggtggtgttgtatctggcaacagtcacgctacatttttaggtgcgattggtctagcgataggtatcggcatacagaatattcctgaaggtgcagcactatcgatgccaatccgtgctgcaggtgcaacacgttggaaagcatttaattatggacaagcttcagcaattgttgagcctattttcgctactatcggtgctgcagcaattttagtggtaaatcctatattgccttatgcattagcgtttgctgcaggtgcaatgattttcgttgttgttgaagaactgatacctgattctcaatcaagtaacaacactgatttggcaactttaagtctaatgattggttttacaattatgatgattcttgacgttgcacttggataattcatatcatttaaaaaagaatcatgataagttaattaactatagtgctttactttatctttagctttgtgacccaatcatttatagtcagagaactacattgttcttaaagttaatcgtaataaaaatttgaggttctcttttatagttaataaagcaagtgacttcaattaattccaatataaataagacatacttataaagttaaaggagtgtcattgaaagtttcaaatttactttatttgtacaaaaatatattaaataaagtagtcacttttaaagatattctaatttcaaaatgattactaaagacattaatataaaaaacatactaagattagctatgaagaaatctatgacgatagattttttcatagctattttttatagttatagagagaagtagactgtccagactcttggattttaaatccgtataaaaaacaagtcagctttactctcgccttttgaaattcgtttgtagtatgttgggttcttgaaaccgtgtataggaaaatgaaatgagaaaggttaagtaaagtttttagcttctcaattattcaaaggaggtttttttatcgattacttaggtgttgatattagtaaaagaagtagtgtagttgcacattataaaaatggaaaattccaaaaagagtttttcatccagaataataaaaatggttacaattatttactcaagtatttgaatgacttagaccacccacaactcatttttgaatctacaggtatctattcaagaggtatggaacgattttgttgtgtaaatcaaattaactatattcaaatgaatccgttagaagccaaatttaaaacgagcgct

SEQ ID NO: 3501 - DNA, 3879 bp, Artificial Sequence
  Description of Artificial Sequence: synthetic nucleic acid sequence
gtcagcgatactttgagcatatctttcagcatccgcgtcagttgcagcctcaaccattacacgtactaaaggttcagttccagaaggacgaacaagaattcttccttcaccattcatctctgtttcaactttcgtcattatctcttgaacatgaatattctcttcaacacgatatttgtcagtcactctcacattaattaaagattgtgggtactttttcatttgagaagctaactcgcttagagttttaccactcattttaataacggaagccaactgaacacccgttaataatccattaagacaccgcctaactttaaacaaccgtttaaagccaaaaatattaaagatttctggaatagatggcatatgactttatctttctggtttagagattgtatctatatgagatctttattctacatgtcacgtaagaagttattaaaaagtcaatttgcaatgtcaaatgtagcgttctttttaaactttttcataatgggagtatggcatggtcttgaagtatattacattgtatatggattataccacgcagcgttattcataggttatggttattatgagcgttggcgtaaaaagcatccaccacgttggcaaaatggtttcactacagctataagtattatcattaccttccattttgtaactttcggattcttaattttctcaggcaaatttatttaataaaggagtaattaattatggaatttagagaacaagtattagatttattagcagaagtagctgaaaacaacattgtgaaggaaaacccagatgtagaaatctttgaagaaggtattattgattcatttcaaactgtaggtttacttttagaaattcaaaataaattggatattgaagtgtcaattatggactttgatagagatgagtgggcaactcctaataaaattgtagaagctttagaagagttacgatgaaactgaaaccattcttacccattataatcagtggcgtcatatttattatatttttatttttaccagcaagttggtttactggtcttgtgacaaataagacgttagctgataatagaatttctttaactgatcaagttttaaaaggcacgctcattcaaaataaattattcgagtcaaataagtattacccgatttatggttcaagtgaactggaaaaggatgatccttttaatccaggtatagcgctaaataaacaaaatgctagtaaagaaacgttccttattggtgcgggaggttcgacagatttaattaatgcagttgaacttgcagcgcaatacgacaatttaaaaggaaagaaatttacatttattatttctccacagtggtttacgaatcatggattaacaaatcaaaactttgatgctcgtatgtcacaaagtcaaatcaatcagatgtttaatcaaaaagatatgccagctaatttgaagaaacggtatgcacaaagattgttacagtttccgcatgcacacaataagtcataccttagagaacaagcaaaacatcctaatgatgtctctggaaactacatttcttcatttaaagaaaatcaattaactaagattgaagctattaaatcattattctcattcactaagccacctctagcagaagtaaaacctgcaacaagagaagatgcttcatgggatgagatgaaacataaagctgccgatataggcaaagcaaatactcaatctaataaatatgatataagagatccatattggaaattgataaaacaaaacaagcgtaaaatcaaaagggattatgagttcaacattaactcacccgagttccaagatttaaaattattagtgcaaacgctacatgctgctggagctgatgtacaatatgtttgtataccttcaaatggaagatggtatgatcatataggtatcaaaaaagatagacgtgaagctgtatataaaaagattcactcaactgtagttgataatggtgggaaaatttatgatttgacaaataaggactatgaaaagtacgtaattagtgatgctgttcatattggatggaaaggttgggtttacgtcgaccagcaaattgcaagacatatggatggtcatgcgcctaaaaatcatgaagtcgattattctaaaaataaaccaccgcacaaacatcacaacgatcgtcaagatgatcaacatcaaggcaacaaataatattattaaccgaaataaaattaagtgagctaggtacagaattcgttatttcatcccgtgtaacgagatttataaaggaaatacctcgacgtaatgtatttttcgtttacttctttgatagccagtatataaaatgcttaggaacaatgttttgtatcctaagcattttattgttttatttagcatcatagagttaatattagtgcgctatgacttcatttattaatttctatcaaattaaaaaacctaggacgtcactatctatcctaggttaataaataattatatagggatgtattagaatacttgttctacttctattacacctggaacttcttcatgaagtgcacgctcgatgccagcttttaaggtaattgtagaactaggacatgttccgcaagcgccatgtaattgtagcttaacaataccatcttcaacatctacaagcgtacaatcgccaccatctcgtaataagaatggacgcaaacgttctataacttctgctacttgatcaaacattgttggattctcagtaggcatgtgacatgtctcctttcagagcaattatttcataatcattattattacattataatagataaagtagtaaaaatctataaaacaagataggggattttaatgactaaaattagtgttgtcgtatatggagcagaagtcgtttgtgcgagttgtgtaaatgcacctacatctatagatacttatcaatggcttcaagcattacttttaagaaagtttcctcaacatcattttgaatttacatatattgacatacgaaatgatactgaaaatttaactgatcatgatatgcaatttatagaaagaattaatgaagatgaattgttttacccattagttacgatgaatgatgaatatgtagcagatggttacatacaatataaacaaataacccgttttattaaatcatattttactatgtaagattaaaagagggggcaatattcatactaacgatgtgcctcaattgacagtgtctgtgttattttttagtgaaaatcttcatttttaggctatatcttttattgagaagaaggacatttcaatgctgtcatagtttgtgattattaattaagcacctagggaaatgtaaatgccctaggtgctttatttattaaccattatgatatttatagcgccacagaacacctgattttagaatagaggctaatcgtccggtaactgttcgatccatgatataagcaaaaccttgtttgtcacctaaagagcctaaaaagccttgtactttaatttcaggcattttatctggaagtggttcgttattccattgcttcttcaacacctcagcaatctgttcaccttgtagttctgctagttgagcactgggtgcatgtggtaaattagcacagtcacctacgacataaacatttctataggttgggacttgatggtactgattaataattacgcgtccagtggtactcatatcaataggaagattacgcacaatttcaacaggttgtatgcctgctgtccaaacgactaaatcaatattttctggtttaccattattataaatttttccgggttctactctgtcgatgactgaattaggtactacagtaacattgtgtttagaaaaccaattagatatgtatttactcagtttctctggaaaattccttaaaatt

SEQ ID NO: 3502 - DNA, 3127 bp, Artificial Sequence
  Description of Artificial Sequence: synthetic nucleic acid sequence
catatgaacatcaagaatatccttttgaaagcttagtcaatgatcttgttgatgaaagagatgcttcacataatccgttatttgatgtgatgctcgtacttcaaaataatgaaacaaatcatgcgaattttggacatagtcaattgacacatattccacctcagtcaacaacagctaaatttgatttgtcatttattattgaagaagatcaagatgactatgtcgtcaatattgaatataatacagatttatataaacaagagaccattcatcatattgctgaacaacttcaaatgattattaaacatgtaatatctaccgaaaacctaaaaattcaagatattgatgaaaatgatgacttattaatttggttggacaagcatgtgaatgattgttctttagacttgccaaaaaataagtcaatacagcaacttttacatgatgtcatgaaagcgaaagcagatgatgtagcacttaaaatgaatggacaatcgatgacgtatcaagaacttgatgattattctaatagtatggctcaaacattgatacaaaatggcattcaaaaaggggaacgtgtagcccttttaactgaacgaagttttgaaatggttgctagtatgattgctgtattaaaagttggaggttcttatgtacctattgacgtcacttatcccgataaacgcattgaatttattattgaagacgctgaagtcgcagcagtgctcacatatggaaaagcaatatcctcacatataccagtaattaaaattgaagatattgataacactgaaaataataaaaggttaaatatagaatatgcagggaatttggaagatgatatgtatcatatttatacatctggaacaacaggaaagcctaaagcagtatcagtgaaacaacgtaatatattaaatttagtatgtgcttggacaaaaagactcaatttatccgatgatgaagtctatctgcagtacgctaattatgtgttcgatgcttcggcaactgatttctactgtagtttattaaatggatatccgcttgtcattgcaacatcagttgagcggaccaatacagatttattagaaaagttaatttcacaagaaaatatcaccatcgcatctattccactacaggtatataatgtgatgcatcatttctatattcctaaagtgattacaggaggtgcgccaagtactccagcatttgttcaacatatttctaagcattgtgatatgtacgttaatgcctatgggccttctgaaaatacagttataacatcttgttggatatacgaaaaaggtgacgccataccatcgactattccgattgggaaaccgttagctaatgttgatatttttattatgtcaggcggtaaactatgtggcgttggtattccaggtgaattatgtattgcaggagaaagtttaacttcaggatatttaaacagacccgaactttctgctgaaaaatttataaataatccttttgggccaggacaactttatcgaagtggtgatttagcacgattgatgccagatgggcaaattgaatttcttggtagaatagacaagcaagttaaagtacatggctatcgcattgaactaggtgaaattgaaaatatcattaattcagtagatactgttacagatagcgttgttattttagctaaacagggtgagcgtgaagtgctgcatgcttattatgttggaagtcaagaagatgaaagtcatatttcacaacatttaaatcaatatttgcctaaatacatgattcctaagacattaacagctattagcgaaattccattaacaggaaatgataaggtggatgagtcaagattacctgtacctaatgtacacaaaaataaatttgttgcaccacgtaataatatcgaacgagaaatagcacaaatcgttagcggagtgttggacgtatcgtctatgagtatagatgatgacttctttgaaatgggtggtacatcactagatgctatggtggtagtatcaaaactaaaatcaaatggcatacacattacaatgcaagatgtatatcaatttaaaactgttcgttatatagctaatcacacagaaaaacgccaagcactaccagaagtagtattaccagatcatctaccacaattacaatctttggttgaaagacgataccaactaaaatcacaacacctaacgcaatcatctctaggtcatgtattgctaactggtgcaacagggttcctaggcgcatatttaattgatgaaatgcaagatgatgctgatcaaattacatgtattgtcagaggtcatgatatcaatcaagctaaaactaacttggaaaataatttaaattgttattttgatacggctcatgtggataaattaatgaagcacattgatattattttagcggatttatcagaacttgaccatcttattatcgattcagccattgatacaattattcatgctggagctcgtacagatcactttggcgatgatgaaacatttttcgatgtcaatgtaagaagtacacaagcattaattgatttagctaaggataaaaaagcgaaattaatctatatatcaacgataagtgtgggtacggtatttgaagtacatcaagacgatattacattttctgaaaaagatttatataaaggccagttatttacatcaccatacactaaaagtaagttttatagcgagattaaagtgttagaagcggttaatgaaggtttagcagctcagattataagattaggaaatctgacaagtgcttctactggaccattaaatatgaaaaatttaacaactaatcgttttagtattgtcatgcatgatttattaaaaatgccgtttataggagaaagtatatcgaaagctaaagttgaattttcatttatcgatgtcacagcgcgccatattattaaattggcaagatccaatgcaatacctattatttatcatgtatacgcaccatgttcgataactatgaaacaagtaattgacaatgccaaagggtcagaaatgactgtagtaagtgatagtgagtttgaacagaaattacatgaattaggtatgcatgaattgattggtcttaatagtaatggagataatcaaatttcaggtgt

SEQ ID NO: 3503 - DNA, 3335 bp, Artificial Sequence
  Description of Artificial Sequence: synthetic nucleic acid sequence
atgagttccactaaatgttaattctttgttagatgtgcttggtaagagttgcttgtcaaaagtatcttgacttaaagttttcttacctttagcctcttttacccacttatcaaaatcattttgacttacagagtgaactttaaatgtttgacgagagaatccctcaccattgaagtttgagttacgacctctgaaagtacctaattgatcagctgttaaagtccaattcatagtcataccagtcatggcatatttctgaccacctaattgtggaatccagaaacttgtcattgtatccatagattgaagcttgaatacaactggtcgatctttaggaattgttaatgtgttaacagtttcaatatgttgatcagggtaggcaaagaaccatttatagccagcacttactgcgtaaacgacaagtggatctttgtctttttctggtggtttttcataatcgtataaagttttaactgtaggaatagctaaagcaattacgattaaaataggtaccacaaaccaaattgtttcaattagagaattgtggtgcatcttaccagattcgctattctttttgtagctatatttaaaaataaaaatagcgaacatggaaagcactacagcaacaataacaagcatgaaaattattgaatagataatcaagaacttctgactgcttgctactggcccttttgcattaaaaacttctatatttgaacaaccactaagtaaaattagtgtgccaaataatagaagcaaagacttaaattttgacactttttttgacctcctaatactacaaatgtagggcttaccaataattttagtttattacacaatatttacaagagtatgttcaaaaaaaattacttatttatataattgaggtctgttagtcctagatatgacggggtttgtaagatttgttaaaattatgtgtacattttgtgaaaatagacaaatttagcaaaattacatgtaatacaacacattattgataaatcttatcaattagatacaaaaaaagaatattacttatagaaaaatatgatcttatatagaaagaattaagttgaataatatgtctataagatgtgtctgattttaggtaggttaatagtaggatatattgttttagtttattgattgaatgttcttttaagtgatgcatagtcatataaaataatttttaatcacaaaaaaataaacgcttatacaattaatttttgtataagcgttctcgtaatttatagctcattaaaatatataataggtagaaattaaacaaagattatgtgtgattaagaggagaggttcattttacttcaatatttcttatagaagttttttcagcaccatcagaatcggtaacttgatattttactttatacttacctgctttggatgtatcaacttgaccatcaattttgattttatgagtaagatcgccgtcttctttatcgtaagcacttatgcctttaagtaaattatattcttgtcctttttcaataacgatatcgttaacaccttttaattgaggttcagtattagtagtggcttctgcatttaaattgggtgtcactaatgtagctgaaactccaagtgctgataatgactgtagtaatttgttcataacttaacctccgtctattgaatcatctataatttaagtttaatataccctatttttattttgtcgacatcatactatggtcttaatataactcaatcaacataaaaattaaatccttttttatgaaactttgataaagattatgtaaattgtgaattgtttgaaaacatttactgaaactgaattcaaagttaagtgttcaattaataagtattgtgaattagacgaaaattcgttgttatatttaaatgattaataaaaaaaatataataaaatcaactcataaacttatgttcaactcattcatgtgttgaaagtaagacagaaaaagtccatgactacatattcatgtcacgggctttttcactgatattattttgttaagccacgtcttaatttctctgcaagaagtgtattattaagtaccattgtaatagttaaaggaccaacaccacctggtactggagtaattgcactagctatttcttttacttcatcatatgctacatctccttttaattttccattttcatcaggtgtattaccaacatctataattactgcgccttttttgacattttctttagtaactaaaccaggttgtcctactgcgctaacaatcacatctgcttgttttaagtgtgcattcatattttttgtacgtgaatgtaaaatcgtaacagttgcgttagcttgcaacaataactttgaaacaggttggccaacaatatgactacgaccaataacaactgcattttttccttctaaattaatatctgcgtgttttaaaatttccataatacccaggggtgtacatggtacaaaggtttgctcatcaatatacaattttccaatattaattggatggaaaccatctacatctttttccggattgatagcttcaagtactttttgttcgcttacctgtttaggtaatggtacttgaactaaaataccactaacagtatcgtcattgtttaatcgattaagttcgcttaaaactacttcttctgatgtggattcgtctaagtgaataatttctgatatcattccaattttttctgctgcttttttctttgattttacataactttggcttgcaccatcattaccaactaatatgactataattttggagtaaaaccatattcttttaagtcattgacttgatttttaagtctttgtctatattcttttgctatttgtttaccatctaaaattttagcaaccaccttaaaccactcctaattattaattaatatcttaactttaacattaatcaaaaagcaaatgatagtcaaaagacgtaaattaatatttaaattgatgttaaagttcgatttttgattgaaaaataccaaatggattgttatgctatatgtgtaatatacaactattcctaataacaatccaaaagtttcgaaagggtgtacaaagtgaaagtagcagtcattatgggcagttcctcagattggaaaattatgaaagaaagttgttcgatgcttgaagaatttgaaataccgtacgaaaagaaagtcgtttcagctcatcgtacgcctcaaatgatgttcaatttcgctagtcaagcacgccaaaatggttttgatattatcattgccggtgcagggggagcagcacacttacctggaatggtagcttccatgacaacattacctgtgattggtgtgccaattgaatctaa

SEQ ID NO: 3504 - DNA, 3344 bp, Artificial Sequence
  Description of Artificial Sequence: synthetic nucleic acid sequence
tagaacctcgtcgacacggtcatccttaaccccacataagaaagttgtattgcctgctcttaaaaatccaccagtagttgctaactttgtagctctgaaattgttttttacgagttggtctgaaagctcttgactatcttgatcttgaacgatcgctataatcattttcatttttatacacctctttttatcattatatcataattattttaaatatttgatgatagattggtatgtttcttcaacaaacgttttagcgaacaatctagatgttaatgcaatcaaaacgaataaagcagaagcggaacgaatcagtaacgatttaacacaagctaagaataacttacaagttgatactcaacctttagaaaaaataaaaagacaacttcaagatgaaattgatcaaggtactaacacagatggaatgactcaagattcagtggataattacaatgatagcttaagtgcagcaattatagaaaaaggcaaagtaaataaattacttaaacgtaatccgacagtagaacaagttaaagagagcgttgctaatgcacaacaagtcatacaagatttacaaaatgctcgaacttcacttgttccagacaaaactcaacttcaagaagctaaaaatagattagaaaacagtattaaccaacaaacagatactgacggcatgactcaagattcgcttaacaattataatgataaattagcaaaagctagacaaaaccttgaaaaaatatctaaagttttaggtggtcaacctactgtagctgaaattagacaaaatacagatgaagcaaatgcacataaacaagcattagacactgcacgttctcaacttacattaaatagagagccatatatcaatcatattaataatgaaagtcatttaaataacgcgcaaaaagataattttaaagctcaagttaactcagcacctaatcataatactttagaaacgattaaaaataaggctgatactttaaatcaatctatgacagcattaagtgaaagtattgcagattacgaaaatcaaaaacaacaagaaaattatttagatgcatctaacaataaacgtcaagactatgacaatgcagtcaatgcggctaaaggtattttaaaccaaactcaaagtccgacaatgagtgctgatgtgattgatcaaaaagctgaagatgttaaacgtacgaaaactgcgttagatggaaatcaaagattagaagttgctaaacaacaagcacttaatcatttaaataccttaaatgatttaaacgatgctcagcgacaaactttaactgatactataaatcactctccaaacatcaattcagtgaatcaagctaaagaaaaagctaatactgttaacacagcaatgactcaactgaaacaaactattgctaactatgacgatgaattgcatgacggcaattacattaatgcagataaagacaaaaaagatgcttataataacgctgttaacaatgctaaacaactgattaatcaatctgatgctaatcaagcacaacttgatccagctgaaattaataaagttacacaaagagtcaatacgactaaaaatgatctaaatggtaatgacaaattggctgaagctaaaagagatgctaatacaaccattgatggtttaacttatctaaatgaagctcaacgtaacaaagctaaagaaaatgtaggcaaagcttctacaaaaacaaatattacgagtcagttacaagattacaatcaattgaatactgctatgcaagcattacgtaacagtgtgaacgacgttaacaatgttaaagcaaatagcaattatataaatgaagataatggtccaaaagaagcttacaatcaagccgttactcatgctcaaacattgataaatgcacaatctaaccctgaaatgagccgtgacgtagtaaatcaaaaaacacaagcagtaaatactgcccatcagaatttacatggacaacaaaagttagaacaagcacaaagtagtgctaatacagaaatcggtaacttaccaaacttaactaatactcaaaaagctaaagaaaaggaactggtaaatagtaaacaaactcgtacggaagtacaagaacaacttaaccaagctaagtcactagatagttctatgggcacgttaaaatcattagttgctaaacaacctacagtacaaaaaacaagtgtttatattaacgaagatcaacctgagcaatctgcctacaatgattccattacaatgggacaaactataattaataaaacagctgatccagtacttgataaaactttagttgataacgcaatcagtaacatttcaactaaagagaatgcactgcatggtgaacaaaaattaacaactgctaaaacggaagcaattaatgcacttaatacattagctgatttaaacacacctcagaaagaggctattaaaacagctattaacactgctcatacaagaactgatgtaactgcagagcaaagtaaggctaatcaaataaatagtgcaatgcacacgttgagacaaaacatttctgacaacgaatcagtaacaaacgaaagtaattatattaacgctgaacccgaaaaacaacatgcctttactgaggctctaaataatgctaaagaaatagttaatgaacaacaagccactcttgatgccaattcaattaaccaaaaagcacaagcgattcttactactaaaaatgctttagatggtgaagaacaattacgtcgtgctaaagaaaatgccgatcaagaaatcaatacgttaaatcaattgactgatgcgcaaagaaatagtgaaaaaggtttagtcaacagttctcaaactagaacagaagttgcttctcaattagcaaaagctaaagaactaaataaggtgatggaacaactgaataaccttatcaatggtaaaaaccaaatgataaatagcagtaaatttatcaatgaagatgcgaaccaacaacaagcatattcaaatgcgattgcaagtgcagaagtgcttaaaaacaaatcacaaaaccctgaattagataaagtaacaattgaacaagcaattaataatattaattctgcaattaataatctaaacggtgaagctaaactgactaaagctaaagaagatgctgttgcttcaataaacaacctaagcggattaactaacgagcaaaaaacaaaagaaaatcaagccgttaatggctctcaaactagagaccaagttgctaacgttttacgtgattcaaaggcattagatcaatctatgcaaacattacgtgatttagttaacaatcaaaatgtaatacattcaacaagtaattattttaacgaggattcaa

SEQ ID NO: 3505 - DNA, 3410 bp, Artificial Sequence
  Description of Artificial Sequence: synthetic nucleic acid sequence
tacagctaaacaagtttataatggcttatcaggattattatatatagaagatagtaaaaagaataattatcctagtgattatggaaaaaatgatttgcctataataatccaagataaaacatttgtatctaaaaaattaaattattcaaaaacgaaagacgaagatggcactcaaggtgatactgttcttgtgaacggaatagtaaaccccaaactgacaacaaaagaagagaaaatacgtttgagacttttaaatggttctaatgctcgagatttaaatcttaagctaagtaataatcaaagttttgagtatattgcttcagatggcggtcaattaaaaaacgctaaaaaattaaaagaaattaatttagctccttcagaaagaaaagaaatagtaatagatttatctaaaatgaaaggcgagaaaatcagtctggttgataatgataaaactgtaattttaccgattagtaacaaagagaaaagttctaacaaaggtaatacaccaaaagtaagtaaaaaaataaaattagaaggtatgaatgataatgttaccattaatggtaataaattcgatcctaaaagaatagattttacacaaaagttaaaccagaaagaagtatgggaaattgaaaacgtcaaagataaaatgggtggtatgaaacatcctttccacatccatggaacgcaatttaaagttttatctgtggatggggagaaaccaccaaaagatatgaggggtaaaaaagatgttatatctttggaacctggacaaaaagctaaaatagaggttgtatttaaaaatactggaacatacatgtttcactgtcatatacttgagcatgaagataatggaatgatgggtcaaataaaagtaacaaactaatcaatagggagattttaatatgatgaaaaaagataaagacactaatgaccaaaaaagtgagagccatatgaagcataatgatgaaagtaaagttcctgaagatatgacatcgactaatgagggtgaatttaaagtaggagataaagtaacgattacagcaggacatatgccaggtatgaaaggtgcagaagctactgtaaaaggtgcgtataaaacatatgcctatgttgtaagttataaacccacaaatggaaatgaaaaagtaaacaatcataaatggatcgtaaacgaagaaatcaaagatgcacctaaagatggatttagtaaaggcgatactgttaaattagaagcaagtcatatgtctggtatgaaaggtgctacagccaatatagataacgtgaaaaagacgactgtttacgtagttgattacaaatccaaagataatggtaaaatcattaaaaatcataaatggatgacaggaaatgagctgaaagcacgataaaaatctagttctagattgagaaataaatagatataaaaaatatcccccttaatcaataatttaaataacttattattgttaaggaggatattttttagtgtgtaaattaaatagataagaaaaatgactaatcctgaagataaatcaaaaagtataaaataattaataataaaaaagcgtcccaatgatattgagacgcttaaagtttatctagttttaaatgattcaatggcggttttgatttcatctctaacacgttggaattctgaccaaggtttgcctgctggatcatcaaatccccaatgttctttttttacattcggcggtaatataggacaattattgtcagcatcactacatagagttactactaaatcggattggtttagtatagtgttgtcaattaaattagaagtatggtttgagatatcaattccaacttctttcattgcttcaattgcctttggattgacaccgtgtgcctcaataccgccagaatatacttgccattcatcacctaagatgtttttgccccagccttcagccatttggctacggcatgaattacctgtacatataaagtaaattattttctttgtcattattgacacctcttttttaaaatataataagtgtaacgtataaaccaactaatgtgataaacagaacaggaatcgtaataacaatacccgttttaaaatatgtgccccatgaaatttttacccctttttgtgttaaaacgtgcaaccatagtagtgttgctaaggagccgataggtgtgattttaggtcctaaatctgcgccgatgatattggcataaatcatgccgtctttgattaaaccggtagttgcagattgtccaatagcaatggcatcaattaatacggtaggcatattattcataatggctgaaaggaatgcggatatgaagcccatacctatcacactactaaacaatccatagtttgatatgcttgatagcatattagctaataatgcagtaatacccacgtttttcagaccaaatacaactaaatacattcctatagaaaagagaacaatattccaaggtgcgcctttgataacttgtttcgtgtttactactctcgatttataggccaatacagtaaatataaatgcaatcaaacaagcaattaacgatactggaatttgaataaattcactaattatataaccaatgagtaagattgacaaaacaatccacgaaaacttaaataattttggatctttaatggcttgattaggtgttttaagatttttaatttcaaaatggttaggaataacttttctgaaatataaccataatacaacaatacttgctattaaagagaatatatttggaataatcatacgacttacatattcaataaatccaatatggaagtagtcagcagaaacaatattgactaaattacttacaattaatgggagagatgtagtatctgcaataaatccacttgcaatgataaaaggaaaaatgactttttgattaaacccaagatttcttaccatagcgagcacgattggagtgagaattaatgcagctccatcattcgcaaagaaagctgctacaatagcgcctaacaacataatgtaaacaaacattttcaagccattaccctttgatgctctcaccatatgtatagcagaccattcaaagaacccaatttcatctaatatgagtgaaatgagaataactgcaacaaaagttaaggtcgcattccaaacaattccagtaacttctagtacatctgaaaagcttacaacgccagtgattatagcaattacagcaccaattaatgcagtaataccaatatctagacctttaggttgccatataacaaaaattaacgttaatataaaaattgtgattgctaatgttacctacaacagatgaaaatgcaaataaggtaactgctacagttaagaaaatacctcctgctgaacctaaatgttcgttcaacgctgattgcgtaactgctacaccttgaggcgcgctat

SEQ ID NO: 3506 - DNA, 2998 bp, Artificial Sequence
  Description of Artificial Sequence: synthetic nucleic acid sequence
ggatttataaattaaatccaattacgggagcaatagagaaattaatagaagaacttgagcatgaatttccaactggctcacatgaaagacaagattcatcacatgttcattttttaaatgaaacacctgatcataagtatgttgtagctactgatttaggtacagatagagttgtaacatacaaatttggtgaggatggtttaaaacaatatgcagtttctcaattcaaaaattcagacgggcctcgccacatcgcttttagtaatgatggacgacacgcgtatatcgttcacgagctatcaaatgaggtgagtgttacagaataccaagacggtaagttcattgagctagagagacattcaactattccaagtgactttaacggggaatcgaaattagcagcagtgagactatcacatgatgggaagcacttatatataagtaatagagggcatgatagtattgctatatttgaagttttagaagatggcagatcactgagaagtattgaaatacaaccaagttacgatgcctttccaagagactttaatataactgaatcagataactatttaatttgcgcacatcaagaaggagaatcaaaagtttcaatttttgagcgtgataacataactggtaaactttcattaaaagataaaaaagctatagcaaatgaaggtgtttgtgtactactataagatgtctttgaataatagaaaagtgatataaaaagcccttgagtggttatgagataaaaaaacaaaactctgtatatcactcaagggcaaatcatatggagataactaacactagttcttgaagaaggttttaatatatttaaatttacctttatatggagggaaaaataaactcgattctagacgtgtagatttaaatgtgtatgatttcatatgactaaatgtatcaaaagaatacttaccatgatattgacctatgcctgaagaacctacaccaccgaaaggtaagttaggattagctaaatgcattaacgtatcgttaattgcaccgcccccaaatgataattcttcaaccactctatgtgtcatgttttcatcttcgctaaaaagatacaaacttagtggttttgatttactttggatgatttcaagtacttcatcgaaattatcataagtaataataggcaaaatgggaccgaatatttcttctttcatgattttattgtcattggttatgttatccaataaagtaggttcaatatataaatcttctttagaactattacctccaaaaacaacattatctttatgaatttgaatcaagtcattcaaccgattaaagtgtttttgattaacaatccgtccgaaatcagggcttttttcaatattttctccgtaaaattcagtaattgtttttttaagagcttttattaaatcatttttaactttccgctgaactaatatataatctggagcgacacatgtttgaccagcattagtaaatttaccaaaactaatacgttcactcgctactttgatattggctgtatcatcgacaatgacaggtgatttaccgccaagttcaagagtaactggaattaattttcttgctgcagcttcatagacaatttttccgactttttcactgccagtaaagaacatataatcaaatggtagacttaataacgtttgggtttcttcaataccaccttcaacaacagaaacgtatgcttcatcaaatgtatcttcaatgatgtccttgatcacaatggcaacatgaggtgttaactctgaaggtttaactatagcagtatttccggcagctattgctccgatgagaggctcgaaaactaattgaaccggataattaaatggtcctataataagcaccgtaccgtaaggttcttttttaatataactctttgtagggaataagtagagtggtgtatccgtttgtttggttttcgaccaattttttaactctttgcgcattagctttatgcttttcaaaagcataccaatttcagttgcgtatgcttcaaccttacttttacctaaatctttatataaggcatctaataattcattttcatgatttttgatatttttacttagtaatttaagttgttgttttcgaaatttaaggttttttgttttatgcgtattaaaaaaagctttactattgttaaatttatctctaattattgtcataaaattacctccaaattatttttttggtaaagaggttgagatagtcctgaatatattaaatgagaacataaaaagattagtgattatttcttcttaaatataaaaattttgtttaaaaagttacaaaaagggagtggaatagaattcatatcgaattcttagtccactcctgaaatttagaactaacaatttaataacacctgatatcaatgtgttattaaatcaatcaactactgagaaattactctaggatgaaaaaatatatcatgggcaacaatatagttttaatgcttttaaagttattgagttaaaacttcagtgatttgaggaacaacttgtttttttcgtgatacaacgccagataagaaagccataccatcatctagttgtactttaaatgcttctccaactttatctttttcagcaccaactacaaggattttagaatcgctgttaataatatcagtaactacaagaacgaataaatcgtatttttcattggcactcatttctaacataactttttcaaattcctctttacgatctaaaacttcatcaatatctacagtattgacttgagcaatacgtgttacataatctcccatattgaatgatttagcatccatattgacaagtgtttcagcagatttatctgtagttgaagcacctgcttttaacatttctaaaccatatgcttctaaatcaacatttgcaatatctttaagtgcttgagcagcatctacatcttcttttgtgcaggtaggtgatttaaataataaactatcagaaattatagctgaaatcataag

SEQ ID NO: 3507 - DNA, 3349 bp, Artificial Sequence
  Description of Artificial Sequence: synthetic nucleic acid sequence
taatcaaatagataatcgaattcactgttatttcaatgaacttgttgatattcaagaactgtatattctgagtgaatgtatgattacagattactcgtcgaccatttttgactatatacatttaaacaagccagtctttattcttcaagaagacgagcaacaatataaacaaagtgttggtttttattttgatttgtttgaagtgggtgattttcttaaagcctctttaaatgaacgcatgttagctaaacaaatttgtagcactgattatataaattattcaaaagtggttcatcgtttgatgaaacaagatagttcgaaaagcagtgaaaagttaatggccgaaattcttggggaaccagaatatccaagttcatcaaactgcaaacaacagatttcttaaagaaagttgttatttaccgggaaataatataattatgggtactttgagacaagaatcatgtgactcttgtctcagtttcatatttttgggtaaacatttaacatatagcaatgataaccaatacaaatttaataagtatacaatctaactatttttatagaacattaaaacacattctaggggggagtgcatgtctaaaattttactaactggtgcatcaggttatattggtagccatctcaagaataaattaaaaaaagatcatgaagtgatagctatatccagaaatactcataataaaacggatgaagaaaatgtcacgtggaagtcagcagacttatttgatttggacgaaattacaaaagtaatgaaagatgtagatacagcgatatatttagtacactctatgatgccatcagcaaaattaacgcaggctagctttgaagatatggatgcattgttagcagataattttgcgcgtgcggcgcaaaagcagggtgttaagcatattgtctacatgagtggtttaataccagaaaatgatgagctatctgcacatttaagaagtcgacttgaatgtgaaaaaattcttggtgattacggtataccagttagcacattacgtgcaggtttaattattggtgcaaaaggaagttcttatccaattcttaaacgactagttaagagattgccagcaatggttttgcctagttgggcttacaataaaattgcacctgttgccattgacgatgtgatagatggtttagcagcattggtgaatcgaacacccaaagataacgaagcaattgatatcacaggtcctgaagtgatgaattataaaacgctgatacagcgcacagctaacgtacttgataagcgactgcctatgcttgatttacctattatacccattatcataagtcggtattgggtacaactgatttcaaatgtaccgaaagaaatggtatatccattaatgaatagtttaactcacgatatggtaccacatcgaaaacgcgttgtgtctaacttgtccgtaggaaatatcacctttgaagatagtgtgaaaagagcactaagagaagaacaaaagacttctaagaaaaagtcggattcgaaaaattctcaatcatttgggcgtatgcatcaagaaattaaagatgtacgagccattacacggtttaaaattccggaaggttattcgattaaagatgtgactaaagaatatgcaaaattcatcaataatatcacactacatctcgttaaaggtacgataaatgaacgagaatttaatatgaatttgcccttcattaataaatttattttaaaaatggaacgtgatgaagctgactctacagaagatatggtggtatataatattgtgggtggcgatttagcacattcaaatgatggtggaaatgcacgctttgaattccgaagaataagaaacaccaatgagggtattattgctttacaagaatatgaacctacattaccttgggtagtatataaactaactcaagctaaagcacacaagactgttatgaatatttttaaaaataaaatggcacgtttatcgcaacaaaaaaatgtgaaagatgaaacatatatgtctaatcgtgtaactattggagtaacagtagcatcagcgttcgttattggaagcgcagtagggttccaactttttaaaaagcatcaaatcaaaaagaacacaatgtcgaatgcagaattataagcattttatatttaattgttattacatcttatgtgtataaaatatatcatttacatgataaagggacagtggtcatgacgacgactgtccctttcttattatattaaatttaaactttataattaattttgatttgatgttacattgtttccgaaaaagtcaaataagtttttagcgctttgggtattttccatattccctttgaatttgttagaacctggcccatatgcatatgtgttaacatctacacctgtatggccattggttgtccaacctgtgtgtgaagcatcgttaattggtttttgaattgcattttgtaattttgttgtttgttctacaactttttcgtctttgtcatctttaccttctttttgtaatttgtgaagctcgtctgctgcttttttgactttatcgagttgtttatttgggaaatcaataccgtatccatctttaattactttttcaggatcttttccatcagcgatttgttttgtcatatacattccagaatgtttcatcttgtgaatagcctctggattccatttataatctttaccttttgcggttgatagaccgccagttgagtggtctgcagttgctacaacaagtgtatctttatgtgtctttgcataattaatagcattatcaaaagcagtttcgaaaccagacatttcagacatcacaccagtgatatcattagggtgggcagctttatcaattgaagcaccctcaaccattaaaaagaatcctttattatttttacttaatttatttagtgcactgttttgcatgtctactagcaacggattagattgaggtgcatctatttgtaatggcatatctttttctgagaaagtacctaaaacttgcttgctttgtgattgatttaattcatctttattagaaacgatatcataaccatcttttttgaattttttcgctaaatttttattttctttaccgaagtattttgcaccgccacctaacatcacatcgactttatgtttaccatttattttatcattataaaattgctgtgcaatttcatcttttttgtcgcgtgaatctacatgagcagcatatacagcaggtgttgcatcagtaagttcagcagtagttactaaaccagttgattttccttgttctttagcttgttctagcacagatttaattggttttttatttgtatcaacactaatcgcaccgttata

SEQ ID NO: 3508 - DNA, 3990 bp, Artificial Sequence
  Description of Artificial Sequence: synthetic nucleic acid sequence
tttttaaataaaatcatgctaatacttaatccattattttgatttttatttaaatcaacctacctggttcctcaccaaattctctgcactaaaattttccgttaccattctgttcccatatttatattttcaattgaaatatctatcaaaaattaaactattcttctatttaagtattcaacaaatgatgatacacctatatgggatggaatacttaccaacatatgtatatacctttgcttcaattattttacaattttccactcacatcattgacacaagggatttcttataccttatttcttttccatatatcactagcctgctatatctgggctcaaaaacaatgtgctacttacaatttcattatgtatgtgctaaactgtttgtgtcggatgacattaaaaagcatctcttcgtgttgaatattttggttggctgaccgatgtatattctagcatgtagagatgcttttttagatagcggtaaaatcttttctgaattatacgcatagtgtatggtgttctttatacaaaaaaacaacgaacctgaacaaggtttaatgttcaaggttcgttgaaatcaatactaatatatattattttttaatagttaataactcttcataaatgcctgcttttttagctgcatcaataagggttgttcctatttcagaaggtgtatctgcagtttcaacaccacaatcgtttaatgttttaatcttttcagatgctgtacccttacctcctgaaataatagctccagcatgacccatacgtttacctggaggtgctgtctgaccgccgataaaacctactacaggtttgttcatattttctttaatccattgtgccgcttcttcttctgcggtaccaccaatttctccaatcattacaacggctttagtttcagctctaaaggtcacccagaaagaatcataaattaaatgaattttaagattaacatttcatttacgatcaccttttcaactcataaaaaatacccaagatgaattgatttaacaatccatcttaggttatcatttcgatataaaatttcaattaacttaaatattttcttttaaaatatgatacttaaaaccttgatatacatatccttgtcttagatacatatctttagcagtatcttttccatctgcaacaagaataacaggtcgctcattagccatacgtccaacgtaagcttgtatttcagaaccgataccttgatgttggaattcttctaaaaccccaaaaccatctatttctattgttttatccgtcattataatatcgactattccaactggttgatggttaacatatgcaactaaacgttcaatatcgtccaagttatatgagctataaatatgttgtttaaccatgttggcatagctatcaccaaaaggccgtgcaaacgcatcataaacatgaaggtaatcattgatattattgcttgatacaagttgaatatctacgtctcttttgcgggagagctcttttaacgctttagcttcaatgacatagagctcaagtactcctatctgaaaacctagttcacgtattttttccaacaatacttcatctatcttttcattagctggaaatgaaaatgaaagatgataggatgattgatttagatgcattttcttttgaacttcaatgtctttaagccactggttcattgttggcatcgttttataaatccacgtgttactagcatattttaatggttgaggaggtaagagataaatcgcctttctagaatcttcagttattttatttccatcaatataaatatctttaaaagttattttcgacataaatatcgcctcatcaactttattattattttttagttattgaataagagtcttgaaacgtgaatgatttaaaattgctgcacctattaaacttgcaataatagccttaatgatatcacctggcataaatgtaaatgataatataaatgccttagagataggtatatgtataataaagcccataatgatagtacctaatatatctaatcctaatacaccgataactagtgtagctataaaaatcactaagaaattaattttatgcaaatatgcatcacgaataatgcctataaagtaagctacaacaggatataagaataagaatcctgccgaaggtcctgcaaatacgccaattcccccacggcctccagaaagcactggcaaacctgtagctaccaatagtaaaaagacaataacactagtagtaccaagctttcgccctaaaataattcctgccaaaaagattcctatattctgtaatacaatagggactggcataaatggcagaggtacacttggtactatacctaaaatacaaatgatagcagtcattaaagctgtatatactaaatgttttgtagtcacttgttcatcctccttacatagattttattatagcacccttgtaaacttttatgaatggaaagtttacaataagttgaagtagatgaacctttttattaacaaataaaacttaggactcgattttctttgctaaatccgttatgtagttaaaaaatgcttgtttatttacatccgtaatgacttgaacttcacgtccatattcagattggaatgttctcccttgactaggtccttgactgactacatcaattttcaatttcgttgattcaactaaatttggagaacccacataagcagtagttaatacatcccataaaaagtatgttgaattggtcacaaaatgtgtgagtggtggtactgctgcgtaacttgtgcccagaaaatcaacgcctaaatattgtcttttatctgcccacatttgacgaacttccattgttagagggacttgatttgtactttctaaagcaacaatatcgacattcatatcactatctaatacaacttttacagcctcaggatcccaaaatgcattccattcagctgtaccatcatgttctggttcttcaacatttcctttgtctaaaaacgttccacccatccaaactaatttctctatattttttaaaattgagttgtcatattttatagctttagctaaatctgtaagcggtccagtaaataacaatgtaactttctcatcacaactcttcactttacgaataatatctatatacgcctcgtcctcactagccttgcatcttttgggtatacaagactcatttagcactggtaaggcatccataaagaaagcatgcattctccattcttttggaaaaggatttttccctctttcatatgatggtgctacattaatttcaacgtctgaaaaacgatttataatctttaatgaagcacttaatgaaggctctaaatagcagtctgcaccaatcgtacttacgccaacaagttctatattttccatttgtaataataaaaatagtgacactagatcatcaacgccaccatcatgattaaaatatactttggtcatagttgatactcctaacgttttttaatgaataacttaattatatttgaaacctttcgtgacaccaaataatttaaagttaatcattgaatacatggcaacctataattattaaaaatttttagcagttacacagcgatttcattatggttgcattagaaaagcctgtgacaaaaaagttgtcacaggcatacttaacttgaagtcaatcgatgactgaattaaattgttgatgtacatcgcgcttttttatactttatatgcattgcaatgaaaaacgttaaattccatctcattcctttaaagaatatcaatatgacattaaagtttgtttgtaatacttttagcaatattagtgtaagccatatcttccattggtggattatgtaatccagcacgtatatctctatagtaccgttgaagaggtctgctcatttctagactcttagctccaactattctcatagctaaatcaacgatttctataccttggttcattaccaccactttacttgctgaggtttcattccatatt

SEQ ID NO: 3509 - DNA, 783 bp, Artificial Sequence
  Description of Artificial Sequence: synthetic nucleic acid sequence
aatcttgaaaaataaatccaatatctttttttctaatatcagataattgcttattagataacttctcaagttgtttcccgttgattgtaatagatcctttagtcatataatcaatcgaactaagtacatttaataaagttgtctttcctgaaccagaaggtcccataattgatataaactcaccttcatcaacatctaaattaatttctttcaaaacttcttggaaagcttgcttatcaccatagacttttgacaactgtcttacctctaatatcgacaaataatcactcctgtcatacttcaaccaaattatctttttacgaagacaaacttaatgtagactatcatatcttctttaatttacatcttttattatatcgattatttattacaattgtgataatagtaagtaacaaaacgcacgtttaaaatgacaatcttgtcactttagacatgcgctcaatgatttcattttgttgtgggaaaatgaaataaaacgttgttcctttccccactattgaatcaactttaacttcaatcccaagttgttctttcacgctttgtacaaggtataatcccataccagaagacgcagtatcgttgcggtctgttgtagaagtaaatcctctatcaaatatacgtggtaaatctcttttactaattccacgaccgtagtctttaatttttaaaacaacgtgtccttctatgttataaccacttaaatttattgtagaattatcactatatttcaaagagttagatagaacttgcctaatcatcata

SEQ ID NO: 3510 - DNA, 3458 bp, Artificial Sequence
  Description of Artificial Sequence: synthetic nucleic acid sequence
tatactctctttttagtttgtctaaaaacacgtattttagtaaaatttaattaagatttaaaatgaattttagctatgaatgataataagagtttaattcaacatttatttatagcaagcatgatacaatattgatgtatcaagctaaaatttatattatgaaatttatctcatgttgatgaaacattaaatttacgtaacttgaaaaggagcgcgtttatgccaggaataattcaaattgacgatattaatcaatctcaagctttaataggaaataacgatgaaaacctaaaagcgattgaagcacattttaatgtcgtaatacatgctagaggtcaagaaattgctgttaaaggtgaaaaaatagagcatgttgaaaaagcagaattagttctaaagaatttacttaaagtaattgaattaggtaatacaattacgcttaaagatgtagaagctgctataaaaatggccgacaataatacaattcatcatttattagatttatacgatgaagaaattacaaaagatgcttatggtaaaacaattcgtgctaagactatgggacaacgtatatatattaatgctatgaaacgtaatgatttagtatttggcattggtccagctggaactggtaaaacctttttagcagtcgtatatgcggctaaacaactacgtaaaggatctgttaagcgtattgttctaacgagacctgctgttgaagcaggtgaatctctaggatttctaccaggcgatttaaaagaaaaagtagatccatatttaagacctctttacgatgggttaaatactgttttaggtagagagcaaactcaaagactcatcgaacgaggtgtaatagaaattgcgccattagcatatatgagaggtagaaccctagatgatgcatttgttatattagatgaagctcaaaatacgacacatgcacaaatgaaaatgtttcttacccgcttaggatttggatcaaaaatggttgtcactggtgatcaaactcaaatcgatttaccaaaaggtgtaaaaagtggtttgaaagaagcggtaaaaaaactaagtggtgtcagcggcataagtatcatgaaaatggatcaaagtgatgtagttagacatccacttgtaagtaaaattattaatcgttatgaaggagttgaataaatgtttactatagattttagtgaccatacaggtctagtagaaacgtcttggtttgaccaaatagatcaattattaacattcgctaagaagaaagaaaatattcataatgatgccgaattgtcagtaacttttgtagataaagatgaaattcaaaatataaataaagtatatcgcgacaaagataaagttactgatgtcatctcatttgctctagaagaagatgaaccagaaatagatttcaatgactttgatataccacgtgttctaggtgatattattatatgtacagatgttgccaaagaacaatcagaaagctacggacactcatttgagcgtgaattaggatttttagcattacatggctttttacatttgctaggatatgatcatatgaatgataatgatgaaaaagaaatgtttggtcgacaagatgctatactaaacgaatttggtctaactagaaattaatatgaaacgttttaaatatgcatatgagggtttttgcgcaattttaaaaaaagaccaaaatttcttattacacattttagcggccataattattatcatattaggatttgtgttaaatattgatcgtatagattggatattaatcatcgtagctataggacttgttttaagttttgaagctattaatacctcaattgaatttgttgttgacctaattacaactgactatcatgaatatgcaaaatacgctaaagatatagctgcgtttagtgttgtcatcgtttcaatcgtttcaatatgtattgggttaatcgtttttttaccatatatattagaaatatttaagggaggaatgtaatgagttatcaatcacactactttaaagaagtccgagaggcacaaaaaaatgcttacgcaccatacagtaactttaaagttggtgcttatttaaagacgaaagatggtcgatgtttttatggagcaaatgttgagaacgctgcatatccgatgggaatatgtgcagaaagatcaagtttagtaagcgctatatcagaaggttatcaaccaggtgattttgaatccattacagttactgtcgatgctgataaaccatcatccccatgtggcgcatgtcgccaggtgatgatggaactttgtgataaagatatgcctgtatatatgaccaatcaaaacggagatatgatagaagctacagttgatgaattattaccattaggattttctggaaaggatttaaattaatgacagaacataaatcaggatttgtttcaattatcggtagacctaatgtaggtaaatctacctttgtaaacagagtaataggacataaaattgctattatgtcagataaagctcagacgactagaaataaaatacaaggtgtgatgacaagagatgatgctcaaatcatctttatcgatacacctggtatccataagcctaaacataaattgggagattacatgatgagagtagctaaaaacacactttctgaaattgatgctattatgtttatggttaatgtaaatgaagatataggtagaggagacgagtatataatggaaatgctaaaaaacgtcaaaacacctatatttttagttttaaataaaattgatttggttcatccagatacattgatgccaaaaattgaacaatatcagtcatatatggattttacagacataattccaatttctgctttagaagggttgaatgttgatcattttattgatgtattaaaatcttttttaccagaagggcctaaatattatcctgacaatcaaatttcagaccatcctgagcaatttgtggtgagtgaaatcattagagaaaaaattctacatttgactagtgaagaaattccacatgcaattggtgtcaatgtcgatcgtatgattaaagaggatgaagatagagtacgtattgaggcgacaatttatgttgaaagagattcacaaaaaggtatagtaataggtaaaggtggtaaaaagcttaaagaagtgggtaaacgtgcacgtagagatatcgagatgttacttggctcgaaagtttatcttgaattatgggtgaaagtacaacgtgattggagaaataaggttaattttataagacaaattggatatgttgaagatcaagattaatcaatagaaggttggtgatcaactgatgctaatgaaacaaaagggcatcattatcaaatctgttgattatggtgaatcagacaaaattattacaattttaaatgaatacggagctaaaataccactaatggccagacgagcaaaaaaagttaagtctggact

SEQ ID NO: 3511 - DNA, 2962 bp, Artificial Sequence
  Description of Artificial Sequence: synthetic nucleic acid sequence
aaggttgactcatatctgaaataatagccatcgtattacgacctacattattaccaattcttaccatcgcatgcgcaagcgcttcggcatcatctagcgtcttcataaacgcaccactgccagttttgacatctagaacaattgcatctgcgccagcagcaattttcttactcattatggacgaagcgattagaggaatagaattaactgtccctgttacatcccgtagtgcatataattttttatcagctggggtcagattgcctgattgtcctattactgctacttgattatcatttacaagttttataaaatctttttcactgatttcaacgttaaatcccttaactgattctaatttatctatcgtaccccccgtatgtcctagaccacgaccactcatctttgcaactggaacacctactgccgctactaatggggcaagaacgagtgtcgttgtatcaccgacgccccctgtagaatgcttgtctaccttaataccattgatatcgcttaagtcgattttctctcctgagttaaccattgacattgtcaatgccgctctttcttcatcattcatatcttgaaagaatatcgccatagctaaacttgaagcttggtaatctggaacctccccatgagtgtatccgtttacaaaaaattctatttcttctttggttaatgacttaccgtctcgtttcttttctatgatgtcaatcattctcataattcatcattcccttagacataaatttagtattagtaatcagtatttgattcaagtccttgaataatttgcacaccggcactagcaccaatacgtgtagcacccgcttcaatcatattattaaaatcctctagatttctcacgccacctgacgcttttacttctaaacgatcaccaacagtatctttcattaattttacatcttcaactgttgcacccccaccagcaaaacctgtggatgttttaacaaaatgtgcacctgccgcttcagataattgacatgctttaatcttctctttctcagttaataaaacagtctcaataattaccttaactgttttaccattggctgcttgaacgacggcttcgatatcattttgcactttatcaaaacgaccatccttaagtgctccaatatttatcaccatatcaatctcttgggcaccattgttaatcgcatcttttgtttcataagatttaaccgctgtagttgttgcacctagtggaaatccaataacagtacacactaaaacgtctgttcctttaagttgttcagatgcatattgtacatgtgtagggttcacacatacagacttaaactgatatacttttgcttcatttataattgtatctatttgttcctttgttgaatcggtttttaataatgtatggtctatcaattttgctttattcatcatttttcctccatgtttttagtttattactatctccaaataataaatcttcatataactttaatatatcgttaaaaaacaaaacatatttaccttcaattatatagtacaaaaattcgcaaaaaatataaacaaatgttatcttaaaatggtaatataacggttataatgatattgcgaactgactattaaggagaagatatattatgacagaaagtacacctcacattaacccaaatggagttaaaatagctaaaactgtattaatgccaggcgacccattacgtgctcaatatattgctgaaaattttttagaaaatgttgaacaattcaatacagtacgtaatatgtttggttacacaggaacttataaaggcaaagaagtttctgtgatgggctctgggatgggaattccaagtattggtatttattcctatgaactttaccatttctttgatgtggatacaatcattcgcgtaggttcatgtggcgctcttcaagaagatgtcaatttatatgatgtgattattgcacaagccgcttccacaaactcaaattatgttgatcaatttaatataccaggtcactttgcgcctattgctgattataatctagtagctaaagctaagaaagctgctgatgaaattggtgccatatcacatgtaggtaacgttttgtcatctgatacattttataatgctgattcaacttttaatgattcatggaaaaagatgggtatcttaggtatcgaaatggaatctgcaggtctatatttaaatgccatccatgcaaataaaaaggctttaggtatttttacagtaagtgatcatattctaagagatgaagccactagtgcagaagagagacaaacatcatttactcaaatgatggaaatagcgctcgaaatagctgaatagaaaatataaaaatagagtgggatgacaaacactaaatgcgtttgtcgtcccactcttttctaatagctacacttaaaatatttgagatcgtcaatttaaaattaaaatgtaagttattaaaaattaatgacctaaataagattgtaacatccaattatgcttatcaactgaagtttgcatgccgataaacatatcttctgaaacgtcatcactagcacttcccgccacttcaattgattgttctaattgtttagagattttagaaaaatctttagacaattcttctaccatttcttcagctgaataatgttttcctgcttcatttactattgatttatctaaacactcggaaagtgttccaattggattaccacctattgccaaaattctttctgctaaatcatcaacatattgactagcttcattgtataattcttcgaattttgtgtgtaaagaaaagaaattaggacctttaacgtaccaatggaaattatgcaactttgtataagctaccgtccagtttgcgacttgttgatttaattctttgactacatcttgttgttgactcatatcaaacactccttagaaccttatttttacaatagttattatattataataat

SEQ ID NO: 3512 - DNA, 2725 bp, Artificial Sequence
  Description of Artificial Sequence: synthetic nucleic acid sequence
atgtttcctaaaattctccatgctttctaaaataattccttcaggataatgcatatcatctaatcatagcttttttctctatcaagtgatttaatttttgaattattggtcttttcatattaataactctctctaaatttaatttttcatcttatatgagacaaatcatcatcattcttattaacccaattcctttttaacaagcccattacatagcaatctctatattctccccttgtatagaagtgttcctttaacgttccttctatttcgaaattattactttgatagatatgtactgctttctcattcttaatatccacatataagtataccttattcatatttaatactaaaaaagcatagtcaatagccattttaaaggcttttttcgcgtacccattatttgcatactgcggatcgataataattaacacttcacaagttctatgtataaagttaatttctaataactctaccacgcctacagatgttgatccctcttcaacaatgaaacgtcgctctgtttcatctaaaatatgctttgtatataaattttctaattcgcttaatgattgataaggctcttcaaaccaatacgacataatggaatactcattattcaaatgatgtataaatgataaatctgtcttctccaatgccctaataatcaaagtcatccctctttcttaatttcttgttatttattactagtgtattagaaaacacaaattttctctaatacttaactaacttcttaatcattgtcatttcaacttacttagatgttcgatttaaaattgctttattaaaaagaaaattttcccaaacctaattattgtaattatttaatataaaaaagagacctttcggtctcgtactttgtctggtaacatcttattctatcgaaacgttagtccaactaccatcatcggatgctaagaagtttccttcactcaagacaagcgctaggctctcactttatatatagtgttcattaactcgtttagattatctaaattcattgtctctctcatttattcataagttcctaatactttctcctcgccgagaaacctattttttagaactatttttgtataaaaaaaagagacctttcggtctcgattaggctcatcgcatcttatacgatatttgcctggcaacgtcctactctagcggaacgtcagtccgactaccatcggcgctaaggagcttaacttctgtgttcggcatgggaacaggtgtgacctccttgccattgtcaccagacaaatgaatgattatacattcaaaactagatagtaagtaagattttgcgtcgcaaaacgttttttaaaaattgattaagtcttcgatcgattagtattcgtcagctccacgtgtcaccacgcttccacctcgaacctattaacctcgtcatcttcgagggatcttataaccgaagttgggaaatctcatcttgaggggggcttcatgcttagatgctttcagcacttatcccgtccatacatagctacccagctatgccgttggcacgacaactggtacaccagaggtatgtccatcccggtcctctcgtactaaggacagctcctctcaaatttcctacgcccacgacggatagggaccgaactgtctcacgacgttctgaacccagctcgcgtaccgctttaatgggcgaacagcccaacccttgggaccgactacagccccaggatgcgatgagccgacatcgaggtgccaaacctccccgtcgatgtgaactcttgggggagataagcctgttatccccggggtagcttttatccgttgagcgatggcccttccatgcggaaccaccggatcactaagtccgtctttcgaccctgctcgacttgtaggtctcgcagtcaagctcccttatgcctttacactctatgaatgatttccaaccattctgagggaacctttgagcgcctccgttaccttttaggaggcgaccgccccagtcaaactgcccgcctgacactgtctcccaccacgataagtggtgcgggttagaaagccaacacagctagggtagtatcccaccaacgcctccacgtaagctagcgctcacgtttcaaaggctcctacctatcctgtacaagctgtgccgaatttcaatatcaggctacagtaaagctccacggggtctttccgtcctgtcgcgggtaacctgcatcttcacaggtactatgatttcaccgagtctctcgttgagacagtgcccaaatcgttacgcctttcgtgcgggtcggaacttacccgacaaggaatttcgctaccttaggaccgttatagttacggccgccgtttactggggcttcgattcgtagcttcgcagaagctaaccactcctcttaaccttccagcaccgggcaggcgtcagcccctatacatcaccttacggtttagcagagacctgtgtttttgataaacagtcgcttgggcctattcactgcggctcttctgggcgtgaaccctaaagagcaccccttctcccgaagttacggggtcattttgccgagttccttaacgagagttcgctcgctcaccttagaattctcatcttgactacctgtgtcggtttgcggtacgggcacctgttatctatctagaggcttttctcggcagtgtgaaatcaacgactcgaggaaacaatttcctctccccatcacagctcagccttatgagtgccgga

SEQ ID NO: 3513 - DNA, 3008 bp, Artificial Sequence
  Description of Artificial Sequence: synthetic nucleic acid sequence
attgttatcattattaccttaacagtttggacttttagtgtgattacttatcagaaacacaagagtgagaaaatcatcaatcacgttatagaacgtaagggttgggataaaaaaataaaaaatgaaaaaatgagttttaatattataatgggatatgctgaaaaagatattgtttttaaagatcaaccatatagtgagtatgagtataacgtgacaccagcaccatggacagatgataaagaatataaggtgtggggggaaacagatttacaaaagaaagactcctattataaatatcttttagaatcagaaccttacagaaaataatataaatgtataacataataaaaaatagagatcattcatctaccacttagagacagcgtagacttctacctaattatattaataaaatgatattgaaggaaaaataatattgaaaagagaaattttaaaatgaaatggttaaaaatcattatattaattttatctttagttccaatagaatttatcggattatttactgattatcaaacaggtttattaataggttacatcccatttatagtagttgctatattaatgagtatatccatttttaaatttggctttaaaaataatataagtattgtaataggtagatgcattggaatatttctttcttggggatgtgttcatttatttatgaacatttacgattcatcagattattttaaacctcttaccacagatattttcgcattatttttaggagctattcatttcatagttattatgcttatatatttagttatctatggtttttctcatcgcaataattaactattatgttacttatattaaagggcacaaagattaatttaacaatgtttgtgtttttagtatttatacaattctactacctataatacataattatgtcaactcaacacaaaggcttaaacgctgtgaaatcaacgtttaagcctttgtcttgtgattatcgtttattcatattttatacatgcccttaaccacgcgctttcatgcattttcatcacgtgaacttttgtatctttattcagtatttaagcgactaaaaaatagatattaattaatcgtttgtattttaatattcttgattattttcattcaaaaacgtgtttagtcttttttcttttaaaaatagaataacttgcccatcatttttatcagatatacatatataataggtgttgcgcttcctatacatgaaaggaggtgtgcatatggcgttaacgatactttcacttgttggaacatttatcttatctgttatcgctggtgtagttgcgaactacattacagataatctaaaaagataaataaaaaaccccactttgctttggtcggcagtggggtttttgcatatggcgaaccatacttcacttgttatttttagtatatattgtagcttcttcatttgcaataaaattacaagtcttactcatagaaaatctgtaatttctttactatagtgaactagttattttttatcatgttttttcttttttagtgataagataaatcccactattaaaggaaataaaagcaaaatatagatgtatctcatttaaattattattcctcccatttttcttctaattgacgttgaaatgcctctcgatcttgttttaattttgcatcttcattatgtatctcttgagattgtttatatatcttttcgtctaaccatttaggtgttttttcacgattggtatattggcgcgacttacctatattagtcatttgtggttgtcgcttgttgtgaatgcgtttctcagcgtcaaaggtaaactctaaccattcaattttacgtccttttttagctttgatcttattaatatgaaggttattaaaaattgaagaaagctcattaattattggttttaataaacgtttagttatatcattcatctgataagttttaggtatatctagacgatttttaaagtcagttatatttatttttacataaccagtgagtctgggacataaagtcccagactcttttttgctaaaataattgaaattctttatttaatgagattttcaacacttaaattataataatccgataatgttaaaagattgtaagcatctagcaaatatttatcattttcccacttgcttatcgtttgaatgggaactctatttttttagataaaaattctttcacgcctaaaaatcaagttaatctgttaatattaagacaaaaaaggagtaataaaaatgaatattatagtctattgtggagcaagcaagggaaacaaaaaagaatacgaaaatagtgcaattcaattaggtgaatggatagctaaaaataatcacactttagtttttggtggcggaaatgcaattccacaattcaggtatgatcattatcagcaattatataatgaaatttccaatagaaaggttcgatactaaatggttaaaattttaccatcacttttatctatagattttttaaatttaaaagaagagcttcaattgttagaaacagcaaaggtagacggattacactttgatgtaatggacggtaaatttgtccctaatatttcaatcggtattccgattttggatgctgttagacaacaatctcatttgccaatagatgttcatttaatgattgagcaacctgaaaattatattaatctttttgccgaacatggtgctgatatgatttctgttcatgttgagtcgacaacacatatacatagagcaattgaacaaattaaacaattagggaaaaaagcaggtgtcgtcatcaatcctggaacatctgtagaaacaattttacctatattgagtattgttgattatgttctagtaatgactgtaaatcctggttttggtggacaaacattcatagaacaatgcgtgactaagattgagcaattaaatcaacttaaacatgaaaatcatttaacttttgatattgaggtagatggaggcattaacgatcaaacgagtaaacgatgtgtaga

SEQ ID NO: 3514 - DNA, 3053 bp, Artificial Sequence
  Description of Artificial Sequence: synthetic nucleic acid sequence
cggtacgcagcaataatttccttttgatactgatcagggtgagcatcaaaattcatatgttccattgcgatggtcactatttcagctttagcatatttagaaatgagaatattaaagctagctcttgttccaacgagtacatcagttttagtatgcctgattgctttaatcatttttttctctacataactcgaaaactgacttttacctggctcaaattgagaaatcacttttgtatttaaaaagggggtatactttttgatacgatttgccgtaatagctctagtatttttaagctttaagcgatagtccactacgactttaacttttattgctgaatgtaattcaaaatatggagagtctgcgcctctaaaaactgaaataattgttacaggatgtcctttttctgccagtgtatttgcaagttgtgtcaccgactttaccgttccgcccattgcataaatattatgcataaaaaatgtgaacgacttcattgcgtaaaacacctcattgttttctatgatatttaagtcattataacattagttcgtatataaggggtaacatgtaaacaattgtaatttgaattgtgtaatgaagctattctcataatgttgacttttattcttttgtgtaacacaatttatatatataattaaattagttcaattaatggttatgataaggaagaaatgagcacttccttgaaagacgcttagatttttttgcaatatagagaaagcgctttaattttattaaagacatcgacatctatgagtgtcaatcgttccatttatttaataaaaaagggggactgtgtttgttatgaatactcaacatagcaaaacagatgtcatcttaataggtggcggaattatgagcgcaacattaggaactttactaaaagaattaacaccagaaaaagatatccaattgttcgaaagagtgagtcaacccggcgaagaaagttcaaatgtttggaataatgcgggaacaggtcattcagcattgtgtgaattgaactatacgaaagaaggtaaagatggttcagtagatattactaaagcaattcatattaacgagcaatttcaaatatctaaacagttttgggcttatttaatacgtgaaggtcatattgaaagtccagataaatttattcaatcagtgccacatatgagctttgttaaaggggaagaaaatgttaaatttttaaaaagtcgagtggcgagtttacagaaaaatgtattatttgaaaaaatgaaaatttctcaagatccagaaaaaattaactcatgggttcctttaatgatggaaggacgccaatcagatgaagcaattgccattacgtatgacgagacaggtacagatgttaactttggtgctttgactaaaaagttaatagctaatttacaacaaaaaaatgttggcattaattataaacatgaagttttagatataaaaaaattaaataatggtaactggcaagttgtggttaaagatttaaatacatcaaatgtaatgaattatgaatctaagttcgtcttcatcggagctggtggtgcaagtttacctttattacaaaaaacaaagattaaggaatctaaacacattggtggtttcccagtaagtggattatttttacgatgtaaaaatccagatgtcatacatagacatcatgcaaaagtctacggtaaagccgaggttggtgcacctccaatgtcagttccacatttagatacacgatttgttaatggtgaaaaatcattactatttggaccttttgcagggttttcgccaaaattcttaaaaaacggttcatatttagatttagttaaatctgtgaaacccaataatatgataacaatgttaagtgctggcgtaaaagaatttaatttgacgaaatatttagtttctcaattaatgctttcaaatgaagaacggatcaatgatttgcgtgtattcttaccagaagcgaaagatgaagattgggaagtaattactgcaggtcaacgtgttcaagtaattaaagatacagataagtctaaaggtcaattacaatttggtacggaagtaataacatcagaagatggttcacttgctgcattattaggtgcttcacctggtgcttcgactgctgttgatatcatgtttgatgtcttgcaacgttgttacaaatcagagtttaagtcatgggaaccaaaaattaaagaaatggtcccatcatttggtttaaaattgtcagagcatgaagatatgtaccattcaataaacgaagaagtaaaaaaatacttgaatgtaaagtagtatttaaaaaaccaccattaaatgattaaaaataagttatcatttaatggtggttttatatgtggtgtatagtttatttaatgaaatgttttaaattcatcatattttgttatgaatccaattgatagtttaaagaatacttactaaataaatagttttacaataaattgtgttttatcatctgaagtgagagtaatgctaccatgatgaagatgaatgattgattgggtaatggctagacctagaccattactactagattcgtcactcagtttataaaaacgatcgaagatatgtttcgcatcttcttctgcaatcgatccatcattttcaatattaaatataatcaagtgatttgtactagttagagtgatattaatcatgctattttgaggagcataattcattgcattaatgatgaggttattgaaagcttgatgtaatagtctttcatttcctcggaaatacaaatcttctaattcagtaaacataactaaatctttttcatcagttcgaaattgttcatgtctaataatatcctttattaaagtatttaaatgaacattatcgttaaaagtaaggtgggaagcattatctaattcagataaaagtagcaattccttagttagttcacttacttgattagtgatttcaaacatttcattgatacatagttgtttctcttcttcattttgcgtcaattcaagttgtgtaagcaatcgttgtaaatgtgtaagcggtgttttaac

SEQ ID NO: 3515 - DNA, 3601 bp, Artificial Sequence
  Description of Artificial Sequence: synthetic nucleic acid sequence
tacgcttaccggttttcatcaccattccagcaagccctctaccctttctcaaaatgataagtttatatctatcatttgtgttacctgaaacatattgccatttaattggtgatgaagtgtgatgataatcatataaagcgataccaccaaaatcataaccctcttgtgctctcaacttatctaaattcatttgtaaatgttgattatgttttaaagattctggttccacactttcacctcataataaattaaattttgtttttgcgataaacaatatatcttctgttcatataagacagtggtacactccaaacatgtactaaacgagtaaatggccaacacgcaaacactgtaaaccctaataatatgtgcagtttaaacgaccaaggcacgtttaacattaagtcagcatttggagaaaacatgaataaatgtctaaaccatatcgcaatggtttgacgataatcaaattcaggttgaatcgcattggttacaagcgtagaataacaacccattattaaaataatcaacaaaacgatattcacaaatatatctgaaaatgaacttaatcgtctaacgtttttgatggatagtcgtcttaaagttagcaacaacattcctattaatgttattataccaaaaacactacctatataaactgcacctatatgatagatatgattatttactcctatcgcctctaaccaattagcgggaatcaataatcccacaacatgaccaaagaataccggaataatacctaaatgaaaaagtaaacttccccattttaatcgtttcttttcaatcatttcactcgactttgctgtccatgaaaattgatcatatttatatcttgcgatatgtccaataacaaatattgctaaacataaatatggataaataacccatacaaattgattaagcatgattttccacctctttcaaaggcacgatacacgcttttaacgtttttcttaatgcactgacaacatatgcatagggattattgttttcagctagggtatttgccatttcatacgtaccatcttcaataatcataatgacaagttgaaggttttcctgtgctcgactatcatttttaaaatcagcaacttgcaaaaactgtagcatcaatgggagaaaatcagataattcattatcaaccatttttagtccaaacatttcgtataaaacctttaatttagctagcatttgaccccgttccttttgcgtgtcaaatttattaaatgtcatatagagtgggtgttttttactaaaatcaaatgtatctgtatagatagctttaatttctgacaaagtataattcatcatgacttctctatatgcaagcaaatcttcgtagccggggtgagacttagaaatagtttcttcaaatatttttggatgaaatgtcattttttctggaaaattcatttgttgaccaagatagcctaagctatcttggtatagacttaattgttcaaggttaatcacggaagatccctccatagaaattttcattataaatttcttgtccagttttacctgattgaactgcaacaccacaaccttcacaattagagccaaagtactctccaccgtaaccttgacttccttgcgctttataagtatctaaatatgtttctttatgggaagaaggcacaacaaaacgatcttcatatttagcaatacctagtaagcgatacatttcagtcatctgtctttcagtaagtcctaatcgttctaatttagaagtatcgaaaggttggtttgttatttgagaacgcatataacttctcatcatcgccattttttgtaagccctctttaacaggttttgtgtcgccagcagttaataaatttgctaagtattgaataggtaaacgcatttcctcaatagctgggaaaatcatatctggattttgacctgcattttcaccttcgaaataactcataataggacttaaaggtggacaataccacaccatcggcatagttctaaattcaggatgcaatggaaaggccattttatattctattgccaatttatacactggtgagttttgagctgctgtaatccattcttgatttattccatctttttcagcttgtgcaatgacttcctcatcaaatggatcaaggaataggtctaattgtttttcgtataagtctttttcatctttagctgaagccgcttcttgaacgcgatctgcgtcatataataaaacacctaaatatctcatacgtcctgtacaagtttcggaacaaacagttggcataccagcttcgattcgtgggaaacaaaatgtacatttttcagctttattcgttttccagttaaaatatacttttttatacggacatccagtcatacagtatctccaacctcgacaggcttcttgatcgacgagtacgataccatcctcatctcgtttatacatagctcctgatggacaagatgctacgcaacttggatttaaacagtgttcacatagtcttggtaaatacatcataaatgtctcatcgaattggaatttaatatcttcttctattttctgaatatttggatcctctggtcctgtaatgtgacctccagctaaatcatcttcccagtttggcccccatttaagattcaatctatcacctgaaattaaagagtgagctgtcgccacgggagagtgctgtccttgtttagcattggttaagtgttcatagttatatgtccacggttcataataatcttgaatgagtggcatgtctggattatagaagattttacctaaagcaatttttgaccatctgttaccagattttaattcaagctttccttttttatttagcacccaaccacctttatattgtccttggtcttcccatctttttggatatcctacacccggttttgtttctacgttattaaaccacatatattctgcaccaggtcgatttgtccatgtgtttttacatgtcacactgcaagtatgacaaccaatacatttgtctagattcaataccattgcaacttgcgctttaatcttcaagccaattgacctccttcatttttctaacagctacatactcatctctttgatttccaattggtccataatagttaaagtgataactaatttgtgcatatcctcctactaattgagtaggtttcaagtgaatacgagtaggtgcattatgagaacctccacgagtatcagtaatttcagaaccaggtgtctctatatgtttatcttgtgcatgatacataaacattgtgcctctaggcatacgatgagatgttacagctctggcagtaacaactccgtttctgttgtatacttctaaccagtcgttatcattaataccatggtcagctgcgtcttcatttgaaatccatacaactggtccacctctaaacaacgtcaacatgcgttcattatcttgataagttgaatgaatattccattttccatgaggtgtaaggtatcgaagcactaatgtatcttgtccacctttaacttttttatcacgagcaccaaataccattggaggtaaagtaggtttatataccggtaaactttcgccaaactgttggaatacctcatgatcta

SEQ ID NO: 3516 - DNA, 4107 bp, Artificial Sequence
  Description of Artificial Sequence: synthetic nucleic acid sequence
caatgtctgaacgaattattttagatgaggcagcgatacaacgtacaattacacgaattgctcatgaaattctagaatataacaagggaactaaagatttagttctattaggcattaaaacaagaggtgcttttttagcacatcgtatacaagataaaataaattcaattgaacaacaattagtaccaacaggtactatcgatatcacgcattttcgagatgacgttgataaggtagtgcaacaagctgatcaatacgcttttgatattaatgtagatattaataacaaagtggttgttatcattgacgatgttttgtataccggacgtacagtaagagcctcattagatgcgattttattacatacaagacctattaaaatagggcttgcagcacttgtggatcgtggtcatcgtgaactccctatacgcgcagattttgtaggaaaaaatatacctacagcacgagatgaatctgtttcagtttatttagaagaaattgacgatagaaatgcagtcgtcattgaataattatccttttaaaacagtacgagagactgaaaaaggtgaagtgtttcttatggataaatctacatatgactataaaaagattatgtaaactataaatatccaatagaagcttcattgataaatgtgatgataaaagtttaacttaacattacacttagatatatttcattttagtctctttacattctactgattgtaaagagactttttttatgaaaggaaatgaatcaacatggaaaatgagcaaatgtttgagcgtaccgttcagccagttcttgatgtaaaagataaaccaaaaccagcacaatgggcatttctgagtcttcaacatttatttgcaatgtttggatcaactgtacttgtaccatttttaacacatctgcctatatcagcagctttgttggcatcaggtattggtacacttttatacatattaatcacaaaagcgaaaattcctgcctacctaggatcgagttttgcctttattacacctatcattacagggttaagtacacatagtcttggagatatgctggttgcattatttatgagtggattaatgtacgtgattataggtattttcattaaattgagtggaacacattggttaatgcacttgttaccaccagtagttgtcggaccagtaataatggtcattgggttaagtttagctcctacagcagtaaacatggccatgttcgaaaattctgctgaaatgaaagggtataacttaagttacttaattgttgctttgattacattagcagtaaccatcatcgtccaaggattcttcaaaggatttttatcactaatacctgtacttataggtattatagtgggatatattgtatccattttcatgggcatagttaaatttgctccaatagcacaagcgaaatggatagattttcctcatatttatctaccatttaaagattacacaccatcttttcatttaggactcattctcgtgatgatacccgtggtgtttgtgacggtaagtgaacatattggtcatcaaatggtaattaataaaatagtaggacgcaatttctttgaaaatccaggtttagataaatcaatcattggtgatggtgtttcaactatgtttgcaagtatgataggaggtcctcctagtacaacttatggtgaaaatataggtgtactagcgatcaccaaaatatatagtatttacgttattggtggtgcggcagttatagctatcattcttgcatttattggtaagttcactgctttaatatcttcaatacctacgccagtgatgggtggtgtctcaattttattattcggtattatagcagctagtggtttaagaatgcttgttgaaagtcaagtagatttcgcaagcaatcgcaacttggttatagcatcagttgtgcttgttgtcgggattggtaatcttcttatcaatttaaaaggcataggtatcaatttacaaattgaaggaatggcattatcagcactttcaggaataatattaaatttaattttgccaaaagataaaaaccaaataaattaagctttatttctataggaggcgctttatggaacacttattatcaatggagcatttatctaattcagaaatttatgatttaattactatcgcttgccaattcaaatctggtgagcgaccattacctcaatttaacggtcaatacgtatcaaacttattcttcgaaaattcaacgcgaacaaagtgtagctttgagatggcagaacaaaaattaggattaaaacttattaattttgaaacaagtacatcatctgtaaaaaagggtgagtcactttatgacacatgtaaaacacttgaaagtataggtgttgatttacttgtcatacgtcactcccaaaattcttattacgaagaactggatcaattaaatattccaattgctaatgcaggtgatggaagtggacaacatcctactcagagtttattagacataatgacaatatatgaagaatatggttcgtttgaaggtttgaatattctaatatgtggggacattaaaaattctcgtgtcgcaagaagtaattatcatagtttaacatcattaggtgccaacgtaatgttctcaagtccaaaagaatgggtagataatacattagaggcgccttatgttgaaattgatgaagtcattgataaagtagatattgttatgttgcttagagttcaacatgaaagacatggaatttcaggtgaagctaactttgctgctgaagaatatcatcaacaatttggtttaacacaggctagatatgataaattaaaagaggaagccattgtaatgcatccagctcctgtaaatagaggtgttgaaattaaaagcgagctagttgaagcacctaagtctcgaatatttaagcagatggaaaatggaatgtatttaagaatggcagtaataagtgcgcttttacaatagaaaggggttaattctacatgaaattaattaaaaacggaaaaatcttaaaaaacggtatcctaaaagacacagaaattttaatcgacggtaaacgtattaaacaaattagtagtaaaattaatgcttcatcttcaaatattgaagttattgatgcaaaaggaaatttaattgctcccggttttgtagatgttcatgtgcacctacgtgaaccaggtggtgaacataaagaaacaattgaaagtggtacaaaagccgctgcaagaggtggttttactacagtatgtcctatgcctaatacaagacctgtaccagatacagttgaacatgttagagaattaagacaacgaatttctgaaacagcacaagttagggtgttgccttatgctgctattactaagagacaagcaggtactgaacttgttgattttgaaaaattagcactagaaggtgtgtttgcatttactgacgatggtgtgggagttcaaacagcaagtatgatgtatgctgctatgaagcaagctgcaaaagttaaaaaaccgattgtcgcacactgtgaagataatagcttaatctatggtggtgcaatgcataaaggtaaacgtagtgaagaattaggcatacctggtattccaaatattgctgaatctgtacaaattgctagagatgtattattggctgaagcaactggttgtcactatcatgtgtgtcatgtttcaactaaggaaagtgttcgagtaatcagagacgctaaaaaagctggtatccatgtaacagcagaagttacaccacatcatttattattaactgaaaatgatgttcctggcgatgattcaaactacaaaatgaatccaccattaagaagtaatgaagatagagaagcacttttagaaggcttattagatggaacaattgattgtattgcaacggatcatgcacctcacgctaaagaagaaaaagcacaacctatgacaaaagcacctttcggcatcgtaggtagtgaaacagcattcccattactttatacacactttgtaagacgaggtaattggtcactgcaacaattagttgattatttcactattaaaccagctactattttcaacttaaattatggaaaattacacaaagat

SEQ ID NO: 3517 - DNA, 2986 bp, Artificial Sequence
  Description of Artificial Sequence: synthetic nucleic acid sequence
atcgctactaaacggaacgctattactaaagtttgattgtacatattgattgtaataaacaattgcctttaattcaccgcttaatggtagatctttaaggtagtctgatgaacggaatgttaagaccccatttttacttggatcattatcatggtatgcttctgcaactactgtgtagttttcagggacagtatatggatttatttctggatcatgatcaccatcggttccgcccatcacaagtttgattttagcagtagtatcatttggtatatctgttactcttatttcaggcttgtggttaggatttccacgtaattcattagcagttgtaatgattcttggtggagttggttttgatctaatttcaaattgttctactttatcaccaaacttaacagtgatgaaataatttcctggatcaatatgaccaacaagagctaagtttttttcagtagcattatttgttctacccacagcgttttgtaatgtaagcgtgttaggatatcctgtaatagaccattcactatctttaattggttcattactagtaagtttgatacgtatctcttgttgataaggtaatattcctgatcctacagtgttatgaagcgttccactcattacttggaaaacaccatggcccgctcgtttcgatactgaaaattcctttctatcttgtttttcattatcgtgatataactcaattgtatgttttaactcaggttttacatataaatttactggtaaaagagtttcagggttatgatggctatcttcaacatcaaaacctacaagaaattgaattggacggcctgaacgtgctgcattttgaagattttcttgtgaaaaaagttcttcaatttgataggcattcattgcattagctccctgccatctttcctgattataaggaagataagatggataaatacctaggactgtaccagtcacattctttacataacttaatgggtcgtataccgaatcaatacttccggaaccgtcactatccaaaataggaacatcagtagttctctgtaatgtaggatcgaattgtctgattgttctttttaaatgaagtgtacgatttttaacttggacatttgactgtactcgatttcgataattcttataaggttcgacatagagttggttatagttcgttgcttgtttatattcaccagaacgcgcgccagcagcataatacaatcttgcagttggagctccttgagttttaaatgaaatacgataacttacatcaccactacctttaaaactcttgagcgttatcccttcgaacttagtggaggtatggcacaacgtgtcgcctttataatgtcattaattagacgtccgaactacttatttttagatgaaccaacgagtgcacttgatcaagaaaatattaaaaagtttatgcattaccttcttagggcacaggagcgctaccaaatgaccattgtttttatcacacatgatattaacttagtgaaagattgtgccacacatattagtattatgcagcaaggtaaattgatagaaaatggtgaggccgcgtcgatcttaactaagccgacacataattacacgaaaaaattaattacgattgcacatcggagacaaccttatgcttaaaatagagagattaaccaaatatatagacacgcaactgatatttaaagagatatcatgtacaattaacgaccagcacttactcataagtggggagagtggttgtggtaaatccacattagccaagattatcgctggcttagatacggattatcagggcgaattatatcttaatgggcgcttacgtgaatcttatacgtctaaagagtggatgaagcacatccaatatgtacctcaatatcaacgtgatactttaaatcagcgtaaaacggtattagctacattattagaaccacttaagaattataaggtaaataaacagcgttatacatcaagcattgaagcagtgcttgatcagtgtaatttaccacacgatatacttaatcataaagtttcgacattaagtggtggccaatttcaacgcgtctggatagctaaagctttaatattagaaccagagattctcatattggatgaagctacaaccaacttagatgtcattaatgaagaagctatacttcaaatgttgatttccttaaagatgacacaattaatcattatttcacatgatacatacgtcttaagccaatttgaaggaattcatgactatcagtcgattccttttggttcttacgcaataagtcttcatctaattctgttaagggtacgagtgaaccatatcgtttaatgactctttgatctaagaaatcgtttttgtttgttattttagataaatctaaatcattacgtaaaagatttgaatattccataatactttttacgcttgggtggtaatagtatatatcatttaagtagtcatccttacctttaagttgtgatgttttaatttcagtactaccaccaagatacattttggctagagacttaatttctttttgagttaaattatgtttagcatttttccctacaatactaataacattgtcaagtttatctatagattttaaattttgagctttttggaacaatattttaataagttccatttgtctttgaccacgtttaaggtctgaatcatggtgtctagttcgagctacagctaatgcttggtcgccgtttagcttttggtatcctttttttattttaattctaccagtatcatcactgttaggttcatttaagttatatggtacgtcataatatataccacctaattcatcaactgcttcaacaaaggctttcatattaatacgcacataataatctaccggtacattcattgttgcttcaactgagtccatagcagcaagaggtccaccatatgcatgcgcatgtgttattttatcgtaatagccaactttaggtatataactgatagtatctctaggta

SEQ ID NO: 3518 - DNA, 3213 bp, Artificial Sequence
  Description of Artificial Sequence: synthetic nucleic acid sequence
ccaccaaaatgttcaagatgtactcctactttatctaattcatctttgtactgatcaataatcatttgttcatctttagagaaatggaaagtaagtggtattaataagttttgcacttcattggtcacttcgccaattttttctctaaaatattcatatttaattctttcctgagcagcatgttggtcaatcataaacattccattttcattttgtgcaatgatatacgtacctaatggaatcttatttagcaaattaaaaattggtaataaaggtaatgccttcgcggtatttgtagaaccgttaactcaaattgacttaattgccaaatatccactacaactgtttggtgcgaatgccattattggtgttgtaaatgcttgtattgtcacatacagtggactaattattgatattaaaggtatggcaacacctatagcaggtgctattgtactttatggctttaacgacgctgtaagatctacaattacaattatcgcagtagcaattgcaagtgtgatattagcgtacgttattagtgctattattaataaatttaacttgatgaatgtcggattcaagttaccacgtagaaaaaaccaagttaaggagagtgtttaatgatggctaaaagctatgattatcaaagtgctttcgatattattggaccagtaatgatgggaccttcaagttctcatacagcaggtgcagtaaaaattggtaattcagcgagagctgtgttaggagatatgcctaagcatatagaaattcgttattatgaatcttttgctaaaacgcatcaagggcatggtacagacgttgctattgtcggaggtgctatgggctacagcactttcgatagtagaattaaatcatccttagacatagcaaaagatgaaaatattacaattgatattattgaagatgaaggagaaagtattggtcaacatcctaactgtgcttatatcaaagcaaatacgaaagacggacgttatatagaagtgataggtatttctattggtggcggtacaatcaaactaaaaggtatcaatgtaaatggtttaaatgtggaactgaatcatgggcttccaatgttagttatagatggaaatatgaataaagctaaaataaatcatcttattaatgatttatcagatatggacttagacttaggtgaagaattaatagaaacaaatgataatgaaggtttagttgtatttcctttaaataaagcaatctcagaatcagcattaaatattattaaagataaacatagtgatttaaacgtttcctatatcaaatagagggggattaacatgtttgattcaattagagagacaatagattattcagttgaaaataacatcagttttgctgatatgatgattaatgatgaaatggaaagagaaggtaaatctcgcgaagaagtgcgtgatttaatgagacaaaacttaaatgttatgcgtgaggcagttgaaaaaggtacgactggcgatggtgtggaaagtgtaacaggttatacaggtcatgatgctgctaaacttcgagattacaacgagaataatcatgcattatcaggtcatgaaatgattgatgcagtcaaaggtgcagttgcaacgaacgaagtcaatgcagcaatgggtattatttgtgctactccgacagctggttcctcgggaacgattcccggcgtaatatttaaattagaaaaaactcataatatcactgaagatcaaatgatagattttctattcacatcagctttattcgggcgagtagttgcaaacaacgcgagcgttgccggtgcaactggtggttgtcaagccgaagtgggttcggcatctgcaatggctgcagctgctgcagtatcaatttttaacgggtcaccagaacaatcaggacatgccatggcattggcaattagtaacttattaggcttagtttgcgatccagttgctggtttagttgaaattccatgtgtaatgcgtaatgctattggttcaggaaatgcattaatatctgcagaccttgcactagctggagttgaaagtcaaattccagttgatgaagtcataggtgctatggatagagtaggtcgtaatttacctgcatcattaagagaaacaggtttaggcggtttagcaggtacacctactggcgaagaaattaaacgtaaaatattcggcgaagcagacaacatggttaaaaataaataattaagattcaaatgctcaggctttgtaaattataaagcttgagcatttttgtaataaaagctgttaaaaataaagaaaaaaattataaaagacaaagtttttatattaagaagaggctgggacaaaaaggttcaagataagtaaaaaaagacaatttctattgaaataatataggaattgtcttttttataatttttttgatgattttcagctcgttgagctgttacttttcttatattaagccacgataatgtctgaattcatcgaattcagtatcgggaattgtttctgcaatatcatttacatgtcgtgaaatatcatttgtggagataagaactgaagtttccattagtagagtatgttgagtcatgttatagtctttatacataaggcacctcgttaattttgtttattgctatttattaaattttacggaaaggccttattttcaaagtattttaatgtaaaatgacatatgaacacaaagtattttggcgagactcttgagggaacaggacaagttgaagactacaggctgaagctgtcccctaggaaagcgagccaacaatacgtagtattataaataaagaagccagtaaatgaatttataaaaactcatttactggctattttgctaggaattatgtcctagcctttgtatattgcaaattttctgacaacgacataaaatagctaaaaaggggttgatgaaatgctgagattatttttgattttcatcgcattcatcattaacacgacgataacttatttatggactatcgagggaacatggcccaacttgctatttaaatcattatcattgagcatgataattgtttttatgttctattacattcgttttgttattgaaaataaaaaagaagactgaagaaataaaaaataaagagtatctttttggattaacttatttaataataactccacacttttttatgaatcagataaatcatattgataaaatgataaatcgagccat

SEQ ID NO: 3519 - DNA, 3332 bp, Artificial Sequence
  Description of Artificial Sequence: synthetic nucleic acid sequence
tattgaaaacaacagctacatcatggaaaaacaaataatgtaagggaggatattcaaatgaatagagatgaggtacaattactcggatttgaaattgttgcctatgctggggatgcacgttcaaaattattagaagctttaaatgctgctaaagatagtgaatttgataaagcagaacaacttgtagaggaagcgaatgaatgtattgctaatgcacataaagcacaaaccaatcttctagctcaagaggctaaaggcgaggatatcgcatatagtatcactatgattcatggtcaagaccatttaatgacaacattacttttaaaagatttaatgaagcatttaattgaattatacaaaaaagggagctgacccctatgaataaattaatagcatggatagaaaaaggaaagccattctttgaaaaaatatcacgaaatatttatttaagagcgattcgtgatggatttattgctgctattagacgcagaatttaatttagaaccaaggattgtaggtaaatatttacagaaaaaaataaaaattaatgatgtaatcagtttagatattaataatattagtaaagcaacaaaaggaggcctaatgaaagtgtctaatgataaaagatacttaaaaatacgtctcgaaacaaatattaaagaagaccttcccgatattcaggaaggagattgataaatgagttattattggtattatgaaattttaaaatttgataatgatttaaataattatttctctaatgaagacttaaaagttttttcttctaaatgtctttcaaatgaagaagaagatgaattatatttacaaggatcaaaaatatttattgatgacgactctaaaattaaacattcagaaagtaattgttaatagattacttatctcacaatgatttatcacaaatcccacaagtgattgatttcaatgttgttaagtaatccctagttctattaaaacatcatcgatgaaaagtttgattgcataaagaaaaatccttatagaggcgtcgccacacttctataaggattttttaataatcatgaatattcattaaatgtgatatgtttcttttcataaagttgattaacaagattaagaagcatacccaacactataatcccaccagatatcaaagtaatttgaatgtaaggtaaccctattgataataatatagatccaatgattgcaccaagaaaattagcaacattgaaaatagaagcagctaacgtacttgcaagaagtggtgcttcttttgcacttaagataattttgctattaagtaacggtgttgtaccaaatgtaccaaaaccgaataagaagcaaatgattaatgctaatattgaattttgaataacagtaacaaatagtatgattgttacaaatagtaaaagaaatgtaaggtataaattttttgttaatttatcttccggtacattaccagtaattaaattccctatcacaccgcctagaccaaacataaataaacaaacagttaaacctacaattttaaatggagaaaaatctcgtatcattggctccataaatgtataagtagtaaacacaccagagtaaccaaacacaataattgcaatcacaattaaaatgtgtggattcttaaacactgttaattctttgctaatatttgcttctgcacttaaagaaacatttggaacaaatttaatcattcctaacatagtaatgattgccaacacaatcatgaatccaaaaacaactctccaatttgcaaagccacctaaaaatgatccgaatggtacacctaacattacagcaatagttaaacctgcctgaacaagtgcaatggcctgtgtttttttagcaggaggtgcgactgtcgcagcaacactcatacacacaccgaagaatggcgcatgcattgccgcagacatgagtcttgataataacaatacattaaaattcggtgctaacattcccactaaattacttattataaaaatcgcaactaaaatcggtaacagacggtgggcgtgaactttcaatgttatgattcgcattaaaggccctatcaatgcaacactaatagcataaacactaattaataaacctgcactcgaaatagaaaccttcatatcgtcagcgatttgtgtaagtaatcctgtcactacatattcagccattcctactgtaaatgttcctatcataaaaataatgaacaacattttattatctttcatgagcgtttcctccttttcttaatatcaaaaaatcaatatgagtgatatattataaaaaattcgtctcaatgtgaagagtaagttttcaaattttcatcttcctcaaatattaatctcataagttttcatcttattttcatgaaataataataagacaatttatgatgacttgctataaagcatatgtttaaatatgtctgattgaattgatttaatttcgataaataaaattgaatattcatgaaataatgtcaattttttgacgaactctcttataatacgtcttcatttctctgtttgatcataattaaatgatttttttaataactcgacaataattatctttaagttcattttaatgtttgaaggtaatttggtaatcagaaattaaaatagttacctaaaaattaattgtagtatggacaatgtagtagtatgtgattaattttgattgaatgataatcacagtccaaattgtatatattttcttaggtcatttaatgaagacgctttacatgtttataatgaaaaactaactgttactttacaaaaccttcgatatataatatgatattaattgttgaaattttggagggatactcaagtctggtttaagaggctaatcattcgtgattagtaggagctttttgctcgcgttggttcaaatccttctccctccgctatatataaaagagcctgaggcatttatttgtctcaggctctttcctacgattagtcaagtacttataattaaaataagcattacttaactaaaccgttcattttaatttttttgaataaggtgttaaactatatttaattgtacgtttggctaatgtggtgacatttgataatcgtacaatttatgattcattacaagataatgaattgtttttaataatcgatttatacaagcaatgatggcagtcttatgaggtttctcattaggctgctttcttagtttgtagtaataatcgacgacatgattgtcataatgatgctgccctcttattatattcataatcacccaaaataaaagttttctcgcttttttattaccacgcttgttgatggtatctctacagtgtgtatgacctgatt

SEQ ID NO: 3520 - DNA, 3845 bp, Artificial Sequence
  Description of Artificial Sequence: synthetic nucleic acid sequence
accggaaaaactgtcccccttttttatgacaatatagatactgaccaaatcattcccaaagtgcatcttaagcgggtctctaaatcaggctttggaccttttgcttttgatgaatggcgttacttacctgatggtagtgataatcctgattttaatcctaataaaccaaaatatcatggtgcgtcaattctaattactggagataactttggttgtggttctagccgtgagcatgcagcgtgggccttaaaagattatggttttaacattattattgcaggaagttttagtgacatcttttacatgaattgtactaaaaacgcaatgttacctatatgtttaaatcagaaagaaagagaacatttagctcaatttgatgaaataactgttgatttacctaatcaaacagtgtctacggtgtctcagtcttttcattttgatatagatgaaacctggaaaaataaattaatccatggcttagacgatattgctattactttacaatttgaaaatttaatagaaaaatacgaaaaaactttttaaaggtgtgaatgacagtgacagtaagaactaaagtttcgacaaaagatatagatgaagcatatttacgtctaaaaaatatagtaaaagaaactcccttacaattcgaccattacttatctcaaaaatataattgtaatgtttatttaaaaagagaagatttacagtgggtacgatcctttaaattaagaggagcttataatgctatttcagtattatccaatgaagaaaaaaataaaggtattacttgcgcaagtgctggaaatcatgctcaaggtgttgcttatactgccaaaaaactcaatttaaaagctgttattttcatgccagtaactacaccacgacaaaaaatcaatcaagtcaaattcttcggggatagtaacgtagaaatagtattaattggcgatacatttgatcactgcttagcacaagctttaaactatacgaagcaacataaaatgaattttattgacccatttaataatgtatatactattgcaggacaaggcactttagctaaggaaatattaaatcaagctgaaaaagaggataaaacatttgattatgtatttgctgctataggtggtggcggtcttatttcaggagtgagcacatattttaaagcacattccccccatactaaaattattggtgttgaaccaaccggtgccagtagtatgtatcaatcagtcgttatcaaccatagtatagttactttagaaaatattgataagtttgttgatggagcttcagtagcaagagttggtgatattacctttgatattgcgaaagataaagtggatgattatgttcaagttgacgaaggagctgtttgctccacaattctggatatgtactctaaacaagcgattgttgctgaaccagctggtgctttaagtgtaagtgccttagaacaatataaaaagcagattgaaaataaaactattgtatgcatagtaagtggaggcaacaatgatattaatcgaatgaaagaaattgaggagcgttcccttctatttgaagaaatgaaacattactttattttaaatttcccacaaagacctggtgctttaagagaatttgtcaatgatgtcctcggacctcaagacgatattacaaaatttgaatatttaaagaaaacatcacaaaacactggaactgttattataggtatacagctgaaacatcatgatgatctcattcagttaaaagatcgcgtatgtcaatttgatccttctaatatttatatcaatgaaaataaaatgttatattcattacttatttaagttaattttataaccaaatccgaagacgacgaatatattattaattcgtcgtcttcattttagtatcttattttagaatgtcagtttgttccctcggctaagaaactttcttcacttgagataagcgctcgccctcttgtgtttcattttcgtctcttgttgaaccttgtagctcgactaatttcattactctcgctcccaaattcataagttacaagcgctttctattcctcgatatgtttactttttcatatcaaacactttcttttttaaaactaattttgtataaaaaaagagacctttcggtctcgattaggctcatcgcatccatacgatatttgcctggcaacgtcctactctagcggaacgtcagtccgactaccatcggcgctaaggagcttaacttctgtgttcggcatgggaacaggtgtgacctccttgccattgtcaccagacaaatgaatgattatacattcaaaactagatagtaagtaagattttgcgtcgcaaaacgttttttaaaaattgattaagtcttcgatcgattagtattcgtcagctccacgtgtcaccacgcttccacctcgaacctattaacctcgtcatcttcgagggatcttataaccgaagttgggaaatctcatcttgaggggggcttcatgcttagatgctttcagcacttatcccgtccatacatagctacccagctatgccgttggcacgacaactggtacaccagaggtatgtccatcccggtcctctcgtactaaggacagctcctctcaaatttcctacgcccacgacggatagggaccgaactgtctcacgacgttctgaacccagctcgcgtaccgctttaatgggcgaacagcccaacccttgggaccgactacagccccaggatgcgatgagccgacatcgaggtgccaaacctccccgtcgatgtgaactcttgggggagataagcctgttatccccggggtagcttttatccgttgagcgatggcccttccatgcggaaccaccggatcactaagtccgtctttcgaccctgctcgacttgtaggtctcgcagtcaagctcccttatgcctttacactctatgaatgatttccaaccattctgagggaacctttgagcgcctccgttaccttttaggaggcgaccgccccagtcaaactgcccgcctgacactgtctcccaccacgataagtggtgcgggttagaaagccaacacagctagggtagtatcccaccaacgcctccacgtaagctagcgctcacgtttcaaaggctcctacctatcctgtacaagctgtgccgaatttcaatatcaggctacagtaaagctccacggggtctttccgtcctgtcgcgggtaacctgcatcttcacaggtactatgatttcaccgagtctctcgttgagacagtgcccaaatcgttacgcctttcgtgcgggtcggaacttacccgacaaggaatttcgctaccttaggaccgttatagttacggccgccgtttactggggcttcgattcgtagcttcgcagaagctaaccactcctcttaaccttccagcaccgggcaggcgtcagcccctatacatcaccttacggtttagcagagacctgtgtttttgataaacagtcgcttgggcctattcactgcggctcttctgggcgtgaaccctaaagagcaccccttctcccgaagttacggggtcattttgccgagttccttaacgagagttcgctcgctcaccttagaattctcatcttgactacctgtgtcggtttgcggtacgggcacctgttatctatctagaggcttttctcggcagtgtgaaatcagcgactcgaggaaacaatttcctctccccatcacagctcagccttatgagtgccggatttgcctaacactcagccttactgcttggacgtgcactccaacagcacgcttcgcctatcctactgcgtccccccatcgattaaaacgatactaggtggtacaggaatatc

SEQ ID NO: 3521 - DNA, 3585 bp, Artificial Sequence
  Description of Artificial Sequence: synthetic nucleic acid sequence
tgtccatctctatttaaaacaagctttccttcttcacttaaagcaacaatgttatcttgcttaaagaaatgaatatgattggcatcatagttaaaatatttatgttgtttaaaatactctattgtatctttatgattaatgtcacttgtcataatataccaattaattgtgtggccggtttcttcttttaaacgaatcagttgacgcgcctgaagttcaaataaactcgtaccctctatttcaaaagaacctttaggccctttatatcctaaacgcgtaccttgtcctccagccatcaataatacagcaaattcaccatttcgtattgcctcaaaagatggggatgatttcctaaaaaacggtggtatcttacgtgaaaaaggtacacctagtgcagctggtttcagaattgatacaggatattataataacgatccattagataaaatacagaaacaagctggtcaaggctatagagggtatgggacatttgttaaaaatgactcccaaggtaatacttctaaagtaggatcaggtactccatcaacagattttcttaactacgcagataatactactaatgatttagatggtaaattccatggtcaaaaattaaataatgttaatttgaaatataatgcttcaaatcaaacttttacagctacttatgctggtaaaacttggacggctacgttatctgaattaggattgagtccaactgatagttacaattttttagttacatcaagtcaatatggaaatggtaatagtggtacatacgcaagtggcgttatgagagctgatttagatggtgcaacattgacatacactcctaaagcagtcgatggagatccaattatatcaactaaggaaataccatttaataagaaacgtgaatttgatccaaacttagccccaggtacagaaaaagtagtccaaaaaggtgaaccaggaattgaaacaacaacaacaccaacttatgtcaatcctaatacaggagaaaaagttggcgaaggtgaaccaacagaaaaaataacaaaacaaccagtggatgaaatcgttcattatggtggcgaagaaatcaagccaggccataaggatgaatttgatccaaatgcaccgaaaggtagtcaaacaacgcaaccaggtaagccggggggttaaaaatcctgatacaggcgaagtagttactccacctgtggatgatgtgacaaaatatggtccagttgatggagatccgatcacgtcaacggaagaaattccattcgacaagaaacgtgaattcaatcctgatttaaaaccaggtgaagagcgtgttaaacaaaaaggtgaaccaggaacaaaaacaattacaacaccaacaactaagaacccattaacaggggaaaaagttggcgaaggtgaaccaacagaaaaaataacaaaacaaccagtagatgaaatcacagaatatggtggcgaagaaatcaagccaggccataaggatgaatttgatccaaatgcaccgaaaggtagccaagaggacgttccaggtaaaccaggagttaaaaaccctgatacaggcgaagtagtcacaccaccagtggatgatgtgacaaaatatggtccagttgatggagatccgatcacgtcaacggaagaaattccattcgacaagaaacgtgaattcaatcctgatttaaaaccaggtaaagagcgcgttaaacagaaaggtgaaccaggaacaaaaacaattacaacaccaacaactaagaacccattaacaggggaaaaagttggcgaaggtgaaccaacagaaaaagtaacaaaacaaccagtagatgaaatcacagaatatggtggcgaagaaatcaagccaggccataaggatgaatttgatccaaatgcaccgaaaggtagccaagaggacgttccaggtaaaccaggagttaaaaatcctgatacaggcgaagtagttactccaccagtggatgatgtgacaaaatatggtccagttgatggagatccgattacgtcaacggaagaaattccgtttgataaaaaacgcgaatttgatccaaacttagcgccaggtacagagaaagtcgttcaaaaaggtgaaccaggaacaaaaacaattacaacaccaacaactaagaaccctatggcgaagaaatctaaaatagcaaaagaacaaaaaagacaagaattagtaaataaatattacgagttacgtaaagaattaaaagcaaaaggggactatgaagcattaagaaagttgccaagagattcatctccaactagattaactagaagatgtaaagtaactggtagacctagaggtgtgttacgtaaatttgaaatgtctagaattgcatttagagaacatgcgcataaaggtcaaattccaggtgtaaaaaaatctagttggtaaaaatttactacttaggtccatttacaatagaagaaaaacaatgtacatttaaaaaggatgaataatatgaatgatttttacaaaattaaaggtattattcgtattttcattaaacattttgaagattaattctattgtaaggggttaaaaaagatgaaaatttttgattatgaagatatacaattaattcccaataaatgtattgttgaaagcagatctgagtgtaatacttcggttaaatttgggcctcgtacttttaaattgccagttgttccagcaaatatgcaaacagtcatgaatgaagaacttgcacaatggtttgcagaaaacgattatttttatatcatgcatagatttaatgaagaaaatagaattccatttataaaaaaaatgcatcatgcagggttatttgcttctatttctgttggagttaaagaaaacgaatttaattttattgaaaaattagcttcttcatcgctcataccagaatatataacaattgatattgctcatggtcactcaaattcagttataaatatgattaagcatataaaaaaacatttaccaaatagttttgtgatagctggtaatgttgggacgcctgaaggagtaagagaacttgagaatgccggtgcagatgctacaaaagtaggtattggtccaggaagagtatgtattactaaaattaaaactggatttggtacaggaggttggcaactttctgcgttaaatctttgtaataaggcagctagaaaacctattattgcagatggagggttaagaacccacggtgatatagccaaatcaattcgttttggtgccactatggtaatgattggctctttatttgctgcccacgaggaatcaccgggtgaaaccgtcgagctagatggcaaaaaatataaagaatattttggtagtgcctcagaatatcaaaaaggtgaacataagaacgttgaaggtaaaaaaatgtttgtagaacacaaaggatctcttaaagatacccttactgaaatggaacaagatttacagagttcaatttcatatgcaggaggaaaggacttgaagtcattaagaacagttgattacgtcatagtaagaaattcaatctttaatggtgatagagattagtaaaaagtagtaggtgaatacaattaaaagatttcttttat

SEQ ID NO: 3522 - DNA, 3737 bp, Artificial Sequence
  Description of Artificial Sequence: synthetic nucleic acid sequence
caacagaaaattgtaaactttccatattatcattgaatgatttaacagtttcaagcgccatcgcttccattttttcatccaattcatgttttggaccttggtatgcaggtaattcgccgtggaaatatttgtttatcatagagatagtacgattcactagattacctaaatcattcgcaagatcgtaatttgttctttcaacaaaggcttccggtgtaaatacgccatcagaaccaaacggtaattcacgcattaagtaataacgtgtcgcatcaagaccataacgatcaattaatacattaggatctacgacattacctttagatttactcattttaccatctttcattaaaatccaaccgtgtgcaaaaacttttttaggaagtggtaaatccaacgccattaacaatattggccatataatagagtggaaacgtacaatttctttagccatcaagtgtatgtctgctggccaatatttattaaataatgtttcatcatcagatagataacctaatgaagaaatataattaacaagtgcatcaatccacacgtatacaacatgtttaggattagatggtacacgtacaccccaatcgaatgatgtacgtgatactgctaaatcttctaaacctggtttgataaagttattaatcatttcattttttctagatggtggttgtataaagtctggattttcatcgtaaaattctaataagcggtctgtatatttattaatgttgaagaaatagctttcttcttttacaagttcgacttcgtgaccagaatcaggacttttaccacctacaattttgccgttttcataaacagggtcaacaagttgtgactctgtataatatgtttcatcaggaacagaataccaaccttcgtattcacctaaataaatgtcaccttgttttaataatcgctcaaacactttctcaacgacttgcttatgacgctcttctgtagttcgaataaaatcatcattagaaatctcaagtttactccataagtttttaatacctgaaatcatttcatctaagtattctagttctgttttgccagctttttgagctttttcttggattttttgaccgtgctcatcagtgccagttaaataacgaacatcatagccttgcattcttttatagcgagctatcacgtcgcctgcgactgtagagtatgcatgaccgatgtgtaggttcccgctcggatagtatattggggttgttatataaaatgtatctttagccatcactggtcctcctcattaattacataataaatgatatctaaatttatttttcttttcaatgaagtcgcgtaccgttatgtatcagtttgaaaaattcgcatcaattgaaaattaattgtcatcatctttactacaataccataaaatcaacacgctatgggttttttacaataattaagtcattataaagtaaagtgtttaacacatttttaatcaatattatgataaatattatatatgtcacccgtcttcatatgtcgatctgtagcgacaaatttaattgcttttttaggtttaacatgtttggtttcaatataataatcaacatgttctttaaccgtatagctttcaaaccatgattcaccactcttaggtaatgcaccttcaatcagtatcacaaactcacctttaagaggtaatttgtcatgattaatcaatttcaacatatcatcaactgtaagtgtaagaacttgttcaaatttcttcgttagctctctaccaacagtaatccatctttgtgaatctattttagctattgctttcaaagtatcagtaaccctataaggcgattcataaagtattaaagtactattttgaaacattctatcctcaagcacttcaattttttctttttcttttcttggcaaaaaacctaaaaatgtgtatgtgaaagatggtaatccacttgacataagtgcagtcaacccagcattaggacctggtactgtttctatatttatattatttttacgtgcttcgacaaccaattcatatcctggatcactaattaatggcaacccagcatctgatactaacgctatatttaagccagtttgtaactgcttgattaaatagtcagtttgttgttctttattatgttcatgatacgactttagaggtgtttgtatttcataatgattacacaatttccgtgttacacgtgtatcttcacatgcaatcacatcaactttttttaatgtttctatagctcgaaatgtaatatcaccaagatttccaattggtgttcctactaaatataaagttgtcatgttatccctcctgtatcatttttaacttttgttgtctagtatatgttttaatttcatattcacgtttcaatgcttccgatttcgttgtatatgtttcttgataaactaactctaccggccgtcttatttttgtatatttagcacccttaccgttattatgctttattacgcgtgcatttacatctttagcatagcctgtatataaacttccgtcattacatttaacaatataaacaaaatgtttatccataataaacacctttcatctcatcgctatatgatccatcctcattatatatgtataatggattacgtatatctaaaccttggttaccaccttttcttccttccacaacaattgtttgtgcaggcttatcatgtttactatacactaacgtcagtgctttaggctcaattttaccatgtcttaattcggttaagacatccattagcctttccgctcgatgaaccataataaaacgaccaccctctttaagtaaatgtcttgcagcttcaatacaatctttaagattacacattatttcgtgacgtgctattttatgtgcttctttttgatgttgatgattttgattcattttaaaataaggaggattacaagtcactaatgtatattgagcaggttgaaatgtttgatatacatcttttaaatccatatggtgcatagttagtctatcgttcaaatcattcaatttaaaactgcgacgtgccatactcactagttgctcttgtatttctattccttcaataggttgagttgatttagcagctaataataatggaataacaccattgccggagcataaatccataactttatcatttttgcgaacttcggttaaataccctaacaatagggcatcagtagaaaaagagaatacttcatcattttgtataatctcatatccttcttttattaaatggtcaacgcgttcattatcttctaacatatctttactcctaaaaaaaggatgttattacagtatgacttaaactacacacttataatacatccttatatttaaacatttatttatcgaaagaattaatcactcaacacattaaggcataataagcaatcttcaccatgacgatgtttcccgaataattcacccttacaaatatgaaaaccttcacgatataacattgctaaattatctttacttggagatggtgtttttacatgcttataattatctttatctaagtgagtttcaaccgattcttcagttttgttcatcaatcgttttaaattttcattttcaacttgcaaagcaacattctcctcaacaagttcgactgttaaatctttaagttctgacatgtcggttgtaagttgttcaacgtgatgttctaatttcataagtctttcgaataattcgtttcgattcaaaggttattcaacctcctta

SEQ ID NO: 3523 - DNA, 4142 bp, Artificial Sequence
  Description of Artificial Sequence: synthetic nucleic acid sequence
agcataattctatcctcctttactaaaatcgttttaaatatgatggatgactttctatagattgggttttagcctctcctactttaataagccacaagtataacttcgcaaatgcctttgattctcttcgccgtgatacccatatgcttaacatactgccgaaaactataatagcaatcgatagaataatacttatgagtggtggtgaaacaatatgaatatcaacgttacttaatgtcgtgaagaaataatgatgcgtaataatataaacaattactacaacaataatcatacatactccgatgactcttccgatgagtccatgactaaaagcaactaattgattccatgacaccattaacgaccaagctaatataagagcgcttaatacatcatatgcatgtctatcactattcaaccaaaatattatcgctataagaatagctagtagacgaccaaatacaagccagccatatgattttttaacagatggaggcgtaggaatgttaaatcttttaacaacagaacccgattgtagaaataatgtcgctttaaacacaccatgcaatattaaatgtactatcgccgcagaatatgccccaagcgcacattgtactaacataaaacccatttgacttatcgtagaacctacaagttgtctcttgtaatcaacatgcacaagactgattccagaacccaacaatactgaaatacttgcaataattaataacagtgaaatggctatttcgtcattaaataccggagaaaagcgtgtaagaataacgccaccagcattaacaataccagcgtgcataatagctgaaactggcgtaggcgcagctacagattcaataagccagccttgaaatggaaattgtgccgccggaataatcacagctaaaacaataagtaaattgatacagagacgcattccataattgattgcattatcatctgacatattcgaataaatataccaatctcctgtagcgatatacaataaaatgacagcaatcaataacgacaaccatgccaatataaatgaccaagctgaaattcttgctgcttccctaggcaccttccataatttgttaactttaatgagccgtgttaacacaaataatgttgcaccccaaaacatggtcattaaccttaagtctccacttaaccatgccaatgaagcaaatgcagtaattaatgtaaaaaacggaaaatatttacggtaatgcatgtcgccaattaaataacgcatagaaaacttttgaatgataaagcctaaagtcaaaataaatgtcatcattaaccaagtaagatgatcaactacaaaaggtccaacattcgccctttcaccgaaaaatattaatccacttaatcccgtaatgataggtaaaacaagtaaatatatatgaaatttaatatattgaatgggaactcgatgattcaaaaatattaatccactcagtatagcaatgacaagtgtaataaaaaacataaacaaaattaactctgaacttaacattgcgtatcctccatctcaaaaaatatctaaaacaataataaaaagcctacaatagctaacctttcatatatgtcataatgaaagaatttaaactattgtaggcttcaatttaactcaagtgtttcgcacttttatcctcaatatgtatataaatcttacggagtataaataaatcgtacactttatttaaataagctgcctatatcattttgtagtaaagtaagaactctttcccctttatcaatcaaggttattcaacctaaaattgctaaagcaagacttagttattaccttttcgaataatactattaatatattttaaatgagcaagagtgtcaatggttacgcttctcaaaataagactcaattaatcatataataatgattattgaaagcttaattactcaaagatccttttgtaaagcttatgtaaacagtataaagacaaaataacacttaggaataactcactgttgagtgaaaaacatgaatcattcacttaagacattgatattttaatttagggactatgcacatatttaattcaaattccagttacactatagataacaaattagtaagggaggtcatttaaatggcagatgtaatcgctaaaattgttgaaattgttaaaggcttaattgatcaatttactcaaaaataatatttaaaagttacgtattttataagttagcttttgaatattcaacaaccatctctaaatacatttcccttttgaaaggaggtcatgaacatgagcatcgtatcaactatcatcgaagtcgttaaaactatcgtagacatcgttaaaaaattcaaaaaatagtctacattctacataaccaccatcttttacgatggtggtttttttatgtctatttattttcagctcgtttaaactcctttaaacatccaacatttacttctcttcattattggataacttttcaaaataaactattgtaatgaatatatttttacttataatggtatacacagtatcacgtttgttgaaaaaacgatgactattgattcatttgataaataacgacatcgaaaggaaggacaaaatgaagaagtgttcaatttccagtttattatcaattattgtcacactcattagcatttttatatgttttacaaccatgtttacgaacatctataacaacactgactttaacttttggtatttcccaggagcaattatctttgttatctcaattattattaatatcatagcaatgtttaaaggtaataagacgttaaacatcatcctattttttattaacttttttgccttacttatctttaccacaccatttgcaatcgtttaaatgttattttcaactacaaaatagttaggcacgactcatatcacaccttcggccatagaaattttttgcaactaataactgattttgaaaatacgtcgatattaatattttagatttcattatttaagcgggcaagcgtctctgaattcagaggcacttgcctattttatttttcacgtgaaacagcacagtatattcattcatattacattttcatttaaagtacagaatcaaacaattacattcgtcgatcataagtccattgatacggactatctagtaatcgccaatcttcatcaatctcactactatgaattaagcatgcatctaattcccgggaaattttttcttgatctaaatccgtaccaataattacaaattgcgtttgacgatctccatattcgatatcccaatcttctactacatcttgacgcgcctccaaaatagcttgctgttgactttcactcattgttgccacccagtatgtaacggggtgaatattacaagatgaaccagcctgtgataacaaacacgctacatcattatactgcgctaaccatacaatcccttttgttcttacaatattttctggcatttgttctagccattgatgaaatctttttgcatgaaatggtaatcgtctagtataagcaaatgatgtaatcccatactcttctgtttccggcgtatgtgtcgcatgtcctccagctgttaattctttgatccatccagctgattcacttgccttctcaaaatcaaataattgcgtattaagtacatctgataattccactttagcatttactgttttaataattttagcttcgggttgcaatgcacgtaatacattttctaatttttctaaagcttcgtcgctaatcaaatcgattttattgataatcatcacatcacaaaattctacttgatcaatgagtaagtcagcaatagtacgctcatcttcatcatcaacactttcatcacggtctgccaataaatcttcactacgaatatcattaacaaagcgattcgcatctacaaccgtcaccattgtatctaatcgacatatagaggttaaatcaatacctaattcttcatctatgtatgagaacgtttgagctactggtacaggctcagatatcccagttgattcaattacaatttgatcgataccccctttgtgaactaagcgctcgacttctcgtaacaaatcgtctcttaaagtacaacatatgcatccattagaaagttctactaatttctcatctgttctagataagccgccaccttgt

SEQ ID NO: 3524 - DNA, 3255 bp, Artificial Sequence
  Description of Artificial Sequence: synthetic nucleic acid sequence
acgcagtaatcattaattctaactatgcgattgaccaaaaattaagtcctaaaaaagattcgattgctttagaatctcctaaagataacccatatgcaaatttaattgcagttaaaaaaggtcataaagatgataaaaatatcaaagtattaatggaagtgctacaatctaaagaaattcaagattatattaaagataagtatgatggagctgtcgtacctgctaagtaaatagcaaacaattaataatatttaatcgcttgtcacatgaatatacaaaaacacgtagatgattcagtataaaatcatctacgtgttttttgctattgaacctttaatttttaactcacttttgttatacgttttaacatccataaacatttttctgtgattatagttatctaacaatgactataattcactagccatattttttgaacaggtagttttgtaaaaggtaagatatattgtctttatacgcacaacatatctataattatttaaatattatcacggtataaaataccaacacttacaccgctatatcccatttggtaatcaaatttgataatttcaatttgtggatgtgattttaaaaattgatttacttttttatctaaccctttctcagtaatcgctttaatagtaataaatttcataaaatataccaacccaacttataattattttatattcaatatactataatctactgtaaatttatagtttctttcgtaaaatcatctttatgagaaaaaaattcataaaagatgtttagctcataaataagagggtaacaatattaataagttaaacataaggaggaattttaaatggctgaagataaatttgaacaagctaaaggtaatattaaagaaacagtaggtaatgctactgataataaagaattagaaaaagatggtaaaggtgacaaagcttctggtaaagcgaaagaagctgtagaaaacgttaaagaaaaagcaaatgacgttattgataaatttaaaggtaataaaggtgactaattaatagtccttctaatttagccctcatgtactctatggtatatgagggcttgtttgtatatatatcaaaatgatgcttcattttttgctgtaattttaccaagaacataacttactaagaagccagtgatcaataggaaaaatgatatgatccattggattaagtctttcgggaatccagggaaaactgcatacaacgatccgattacaaagcctattatcaaagcaaatgtcattgtagggtgttgatgtagacaatattgaattaatcgacttgaaatcataaaaccagttacaataccgaaacctactattaatatgataggtaatgcatttaaattaaaatgaagtagttcagaaatagcatacattagcgtcccatatactccgaagacaagtaacataaatgatccagaaatgcctggtaataacatagcacttgaagcgaaaacacctgcgataaaatatttaatgataagactgaaagataaagtaagtgtttcacctgaatgcttgtctccatgattaagcaatgcgaaaacgactataatagcaatacctaataatagaataaaataatgtattatactgaaattttttttgaaatttgagatggttaataaataagggatgataccgagaatcaaacctgtaaaaaataacatagtaggaatatgatgttgactaagcaaataattaaataattgacttaatagtcctatagctattagcatccctactaaaataggtagtaaaaattttaagctaggccaaaatcgtcttgaaaacaaaccactaattgagctaataaagtcatcataaattccaagtaataaagcgatagtccctccacttacacctgggacgagatcacttgtacccataccaaaacctttaaatatatttatccatttgaattttttcataataatctcctttcatgaaaattttaaaggttaaagtgcataatatcacattatttgaacttcttgggatattttcttttttgtctaaagattggctattgagaaagtgagctttccattatcatttaaagaatttcagaacaattacataaaaataattattgttaaataataaatctaaataagtgttttaaaaagtttatattagggaccaagtacgttataatgaagtggattgaaattcaatgagtctttttgactatagattaaaattattataaactagttaagaaaactttatattttacggagggaatataaatgtcatcaacattagagattaaggacctacatgtgtctatcgaggataaagaaattttaaaaggtgttaacttaacaattaacactggtgaaatacacgcaattatgggacctaatggtactggtaaatcaacattatcgtcagcaattatgggacatccaagttatgaagtaacacaaggtgaagtattattagatggcgttaatattttagagttagacgttgatgagagagctaaagcaggcttatttttagctatgcaatatccatcagaaattacaggggtaacaaacgcagattttatgcgctcagcaattaatgcgaaacgtgaagagggacaagaaattaatttaatgcagttcatcaagaaattggataaacaaatggactttttagatatcgataaagatatggctcaacgttatttaaatgaaggtttctctggtggagagaaaaaacgaaatgagattttacaattaatgatgttagaaccgaaattcgctattttagatgaaattgactctggtttggatattgatgctttgaaagtggtttctaaaggtattaatcaaatgcgtggtgaagagtttggagcattaatgattacgcactatcaacgacttttaaattatattacaccagataaagtacatgtgatgtacggtggtaaagttgtgaaatctggaggtccagaattggctaaacgccttgaagaagaaggctatgaatgggttaaagaagaatttggtgctgctgaatagtcatattccaaaattagcattgagatgttcacataaaatgatgaaactgaacattcgaagtaaaatttatttcatcaagtaggaggaaaaagtgatgacaactaaaactttgaacatttctgaagaacaacttgttgattattctaaagcgcacaatgaaccttcttggatgacagagttacgtaaaaaagcgttgaaattaacagaaactttagaaatgcc

SEQ ID NO: 3525 - DNA, 4035 bp, Artificial Sequence
  Description of Artificial Sequence: synthetic nucleic acid sequence
tactgtcttttctgatacaaacaatgctcttgcaatttctttatttgttttacctttaaccatttccttaagcacttctttttcacgtttagataacttattcgtataatgcggtttttttgatacggccttaatcacgcttttagcttgaggatgtatgatacgttcaccttgcaaaactttatgaattgtctcaattaacttttgaggttcaacatctttcatttcatacccatcagctcctttatcaatagctgaaataacatgttcatcatctacatagctcgtaagtactaatactttgatttcaggatattgttgtttgagtatttcagtaatttctataccattcatctctggcattactaagtctaaaagcacgatgtccggtctttcattgttttttaaataagataaaaatgttgcgccatctttaaaaccctttaaaactgataaatcatctacagttgataataaaaactctaaaccttgccttacaatatagtgatcatcgacgagaatgactttatgcataaggatgctcctttaacttcaatggaattttaatataaatccgagtgccctgatttatttttgattctatagtaactttaccgttcaaatactgtgtacgttgctttatgttttttaaaccattaaataaaaacgtattaattgattgcgtgtcaaaaccttgaccgttatctctaatatctacctcaagataatcaacattttgtgataaatcaagataaactttgttagttttagcgtgcttaataacattattcattgcttcctgaataattctgtatacattttcttcgatatcattagataaatctattagtccattaatagtaactttcaaatctaatcctaacattttactataatagtgtaatgcatgaattaagccttgttctaatccaactggttttagttgccaaatcagtgctctcatttcatttactgcattttgacttgtttcctcaatagtcttaaaagctctttgcgcttgctcgtcagtagttatcccttttgcagcgtgagccgttaattttaaagaaaataacatttgatttactgaatcatgtaagtctctagctagtcgattacgttcattaattttggcattttctttttctttattagttagctgaattctctttatagctgaaccaatttgaaatgctacagattctaatagttctaagtcttcttcactataatgttctttgttaggagatgctacgttaagcaaaccgaatctttcgctcccagactgcaatggaacagtagcatgatgagtaatatgattcgtttctttatcataagcatgattagctaaattgattctagaacaatttattatattagaagctttagttaatttatgattttgatatgcttgcacacaccaacaagaaccatttgtcaaatagtaacaatggtttttagataaagcttcaggtaaatctacagaggaaactaaatcatggtgcccctcttcatcaatatagaaaatccaaccagttgaaaagtcgctcccatttataagtaaacgcaaagctccttgcatcatgctatatatttcagtttcttcatttagaaattcggctatttccttaagtaatgcaagtctagttggtttctccattttatcccctcaaatttagcattttatcattattatacatctcattctttgtttttaaaaactcacaatgtcgatgttattaaaactttcaaaataaaacaagttatagagtcgtgcaaatatatgatatgatagaactgagtttataggaggaaaaaatgaaatttacaatacctaaacaatttaacgattatacattgagagagattttccaatatttaaaattacctaaaaaagacttacatcaactgaatatgtctaaagaaattttaattaataaagagtacggtacattattaaataatgttaaaactggtgatcatgttgagataccaacccctaatgaagtaagtaattatttaccaagttatcgatatgctcaaatttattacgaggatgatgacttggccattgtcatgaaaccaaaaggtgttaaaacgcatcccaatgatttaaaagagagcaacacacttatgaaccatgtgatttacactgttgatagtgaatatgttgagcccatacatcgactagatcaagaaacagtaggtttattgatagttgctaaaaatccgcttatgaaaaaaatcttagaccgaatgttagaatataatgaaattacgcgtatatataaagcaaatgtcaaagcgttgttacctattaagccacaaacgatagatatgcctattggtaaagataaatttcattcaaacaaacgaagaatttccaacacaggtcaacgtgcaatcactcacattattaactctaaaatgattaaagaaggtgtatgtcaactcgacattaaactagatacaggtcgaacacaccaaattcgtgtgcaccttgctgagattggccatccagttattggggatccactttatggaacttcaacattacgacaattagagctaaatagtcatcaaattgaatttactcatccactgactcaagaaattatttctgtaagtctagatgataaatagcaatatgtcgatgttatcattaacattaagttaaatatcgaattaaaaactatattattttaactattaattaatgaaataggacagaatgttttattaaaaaagtcaacataacacctaatttttgttgttctaatttataaattttttctattgaagcattctcttgaactgtcataccaacctttttattaaaaccaatacctttaccaattaaaacaacctcttgatgattttttgtgcatatgatgacattgttattgagtgttttcgttattacatacttgctcatcataatcacctttctaatatcattattaaaattataatgcttaatacctaaattgaaaaggaatctattttgaaattttttactgttatatagagattgaatcaatgacatcaatactttaaatcttgccaaaaataaagcggcttgatacatcaagggatatgtatcaagccgttattttattgatttattcactatttttttggcatttttgcatgttgtccccaagtctcaatgccaaataaatttatttctaagttttcgggtttaaacacaggtctcttaccttctttacgctgtctttgataatctttcatcactgcaaacgcaatattcgacaaacctataattgatatgatatttactattgccataagacccataaataaatcggcagtactccaaactgtttctgttttagcaacagcacctacaaatactaaaagtactacaaaacatctaaaaataaataatatcatcttattgttagataaaaattcaatattggattgtccatagtaatagttacctacaacagatgaaaatgcaaataaggtaactgctacagttaagaaaatacctcctgctgaacctaaatgttcgttcaacgctgattgcgtaactgctacaccttgaggcgcgctatcaccaaattgcaaaccagaatataataaaatcataattgctgtagctgtacaaacaagcatagtgtcaaagaatacacctaatgattgaattaaaccttgtttaacgggatggggcacagcagatgtagcagcagcattaggtgcagatcccataccagcttcgtttgagaataaaccacgtttaataccttgaagaatagcagctcctacagcaccaccagtaacctgctgaactccgaatgcacttttaataatagtgccaatcataggtacaatttgatctatattgagtaataaaatgattaaaaccatacctatataaacaatagccataataggcacaataagtgaagatagtgtagctatgctacgaacaccaccaaagatgataatacctgtaataactgcaagtactattccagtaattaccgggctaatattgtattgtgtatt

SEQ ID NO: 3526 - DNA, 3606 bp, Artificial Sequence
  Description of Artificial Sequence: synthetic nucleic acid sequence
acgctaacaacttcattatcatcgtaggctacagctaaatcaccatatttttcgtaactccacttcaaactttctacagaaccattggatgttccaaatttatcttcaacttcttcacgtgtcattccattataaacacctctatatccacttgttgaagctgacttcatataaccttgatcaaagtcatcactaaaaacatcaatgcttggaccagtggattgatccttattttgaccactttcatttgattgctgagactgtgttgtttgatgactttgctcatcactaatataatgattgtaagtatagtacgcaccatacaatagcgctgctatcaacaagacaaatataattgataatacaattagccaaccagtatgtttttgttctttataaaatgttgaatcatgatgttgtctttcctcacaagaaatatacgattgctgttcacgcatatgttcaatttgattttcactttttctttgtgtcgatgtctttaaatgttttccacatttattacaaaatgactgttccttttttatcggatttccacaatgagggcagaatttcatttatatcacctttcctctaaacgattgtattcatcacgcaactgattcacctgagttagccctgctttcataagtataaatataaatagccatgcaatcataattaataagatatattttaaataaccactacttaaaagtgttatttccgtatcccatattccgtgtaatgtcactgccacaaaaaagaaaaatataaaacgtttatcgatgatattcgcccattcgaaatgctttgtttctttcactattactgccgcagcaccaacaatagctgcccaaacgaggtgactacctaaagctgtccaacctctttgtatagtgatttcagtaatattattaactccatcaaataaattaaatccaaacctaaagatataaccagctgattcaaacaccgcgaaccctgcaccaacagcagcaccgataagtaatccattgagtattttatttgtttttaaataattaataaataaaataacaacagttgcttttccaagctcttcaacaaatcctactatgaacgcatctgttatagtcataattccataatattgcgattcagtactaaatgtaacaaattgatataaaatcattgtactaatgagtgataatacaccaccaataaagaacatcctcattacatcaaagatactaatgtttttaaatgcattagattcgaagaagaagattaatcctgaaataggaactaatagtgcgccaataaatatcatacctggtatggcattggcattaccaaatatatttgttaatatccataacgctaggaaagtgatacctaaagctaaaaatacacgtgagaacacccaaggtcttccccactcctcggaaacttcattaatatgtggcgtcgtacgttttgttccagcaataaatacatcatccgcttcatctttggtgtgagatttaaacacctcagaaaacatgtcacgcaaatttaattttaaactttcatcattccctgctagcctacctattgatttcgttgtgttattaaatagatgcttggcttcttctgtcaatcgaatatgatctgcagtttcattttcaatttcaggttttgtatttgaatatgtatgtgatgctatgttgtcatttgaatttgataatgtttgctgaagagaatgaccacaattgatacaaaacttatcatcgacatttactactttgtgacactttggacattgtctatcttgactattaaaattatgttcagtttttgtctttggattatcgaacacactctgcccacaattaacacaaaatttatcatccttctctaaatgtgccccacaattagaacaaatcaattcaatccctactttcaagttatctctataaaaaagttgttatcaatattttaaattaattctcataaaatcgctatattctatgacagataaactgttaaatttcgtattgcaaaaataaaatgtcgataaaagcgactgcttttatcgacgttgttcttcgtatcttacacgctgacgatatccatatgtgctttctttaatgagttcatcattaagtaaaccagcacctattgcacctgcaactgtcgaaattgaagctgcaaaccatggaatacttaaatataaatcaatgcctgcaggaccttttaatccaacttgctgacctaaaaatcctgatggcaataatacgatttcagcaattaagaatagtaaataaagaataatataataaattataatggcaaaaatcaatgtcattattgttgtaagattgtataaccaagtaatacgcttatggttgcttttattaactggttcccataaatcatgtgacatcattatccatattagcattccaataatcgcaataattgaaattccaaataaacgccacattgaaaagttataagccatttgccacatcgttgtaaatacaagtccaaatgcacctgtagtaaatgcaatagctactatattacttaaacttgccatcatatttaatggattattcgcaaatgtcattccactaacaaggcgaaacatgcctctagaacgtgaacttgataaatatcttaagtgataagagtctgtttctttcatatatattgtttctttgtctattttagagagcggaaattgtttttttactgaattttctatttgattattattatcataattacgactttcttgttcagcttcatttaattcttgaataatattataaatcgcatgcttgaaacgtttttttactggacgccagccaaatgccggatatgagaatatagctgcaccattttccatattaatatctaatgccatcacttgtttgtcagcaaacatcggtaaatctgtaattgctatcacataatcccattgtctcttatcgtgataatcggctactttctcaaaaatttcatctacagattcagcaaaaccagtaagcggatcagtaactaaatcaaaaatccattcttgctgatgatcataatgcgtagataacattttaggcatttcttgtatgagattttctgcaaggcgttcagtaacacctggagcgacgactagacccacagttttttgatttgtcatgcgtcatcctcctctctatgtccttgttttttaccttcatattgttcattattttcatctttacttgaagtttgttgttcgacattttgttgtgatacatcacgagaagtttcttgttctttttgttcttgctcagcttctttataacgatgatattgtctataagaataagtaatacgacgtattttctcttcattttcaacagttgatcccatagctccagctaaaagtcctaatgatgatacaaaccaaatcaatctcatataatttgagaacgtaaattgtgattgggcactcgtccaactattaaataattccacagggacaaagagtgtaatactgatgattaacaataaatataaaatgacataatttatgagtgtaatcaaacttagtgtaacaagtgtggttgaattataaatatatcgatatacacgctgagattt

SEQ ID NO: 3527 - DNA, 3572 bp, Artificial Sequence
  Description of Artificial Sequence: synthetic nucleic acid sequence
agatcaacaagcacaagctacccaacaagacattaagtcattaaaaaatatagcatatggtgttatcgcttcagataaaccatcagagtttaaagaaccattaaaaaatataaaatcacgcttagaaaacgcatctaagtataatcaacaatttatagatatcttgtcagagttggaaaaaagtgaacatgttgatctatctaatgaaattaagcaagtgaaagaagcaaacaatagcattaatgataatttaaaaagtactaatcaattaatagatgcattgtcaaatggtagctccggacaattagaagcagtcaatgtattacgtgacttacctaacttaaataaaaggttagatacattacgaaattacattaaaaaagaacttaatcgtaatttactagctgtttctaatgagattactgatcaacttaataaaggtcaaaatacattatcgacaatccaatctaaattaaatactattaaccgagtgattaacgctggtcaagatattttaaatagcggtaaaaagagaattgatacgattcaaactgcattgccagcaatcgaaaacgcatatataaatgcaatgcgaactgcacaagcttacttcccaacagctaaaaaagatgtcgcgaaagctgcagactttgtacgtaatgacttgcctggattagagagagaattagctaatgtaacacagtctgtaaaccaaaaaataccatctttatttagtcgttatgataatgctgtagatttattaaacgagaaacagcctcaagcaaaagaagcacttgcttcgcttgccgatttctcagaaaataaattgccagatgttgagaaagacttgaaaaaagcaaataaaatcttcaaaaagttagataaagatgatgctgtagataagctaatagatacattgaaaaatgatttgaagaaacaggcagatattgttgctaaccctattaataaaaaaacgacagatgtgttcccagtaaaagactatggttctggtatgacgccgttctatactgcattgtctatttgggttggaggattattaatggtcagcttattatctgtagataacaaacatgaacacttacaacctattatgacgaagagacaagtgtatcttggtaaatctggtttctttttcttattaggtatcatacaggcattaatagtatctatcggtgatttagttatccttaaagcatcgatagaatcaccgatattatttgtctctattgccgtgtttagttctctcgtatttaattcgattatttacacatctgtatcattgttaggtaaccctggtaaggctgttgctattatcttacttgtgttacaaattgctggtggaggaggtacattcccaattcaaacaacgccagaattcttccaagcgatatctccatatttaccattcacgtattctatcgacgcattacgtgaaacagttggaggtatagttccagagatactgattacgaaagtgatcattttaggtttattcggaatcggattcatggttgtaggttattgcttgaaacctgtgactgaccctattatccgtaaaattgctgaaaaagctgatgaaagtaaagtaactgaataaggatcaacgattttacttaattaatgttagaacagtacgatttaaaatgatacttacaggaaaacatgttgtattgttcttatcttagaaagataaattaaaaaacggttattcaccttaacaaaaggtggataaccgtttttgtttatcctaaatttaacagtgacagattttattgctatagaaacaggcactgttgtaattatcgatgcttctcttatatgaaagaaaaatatatgattaagtcagttcaagcaacatgatgttttattcaattgatttaaattaaaaattgatgcaacctgtttatttaatatgcctcatctttactaaaactgactattaaatccatattaccaacaaatttaatatattgatcttcagaagttaaaataaaatgatcgcccttatcgattttatatactttgttattgattgaaacttgcccgtggccgttaatcattgacactaggcaataagtgtgtggtttttgaaaatctaatgcaacatatgaagtgatgctgatgggcattgatacgacttcaggaagaccttcagcatttccgaacgacattttgaataacatcgaacgttattataatatagaaaatgtggagacgacatctcaatatatttttttcattaatatttaattgtgcatctttaaccgcttctcttgcagcaaccaccgcgtattgtgtaaaccgatccatacggcgagcttcttttctatcaatgtggtcttctatattaaaatctttcaattcaccagcaagatgtacattataatcatcagtatctattcttgtgattttatctataccgttaacaccttttagtgcattgtcccatgttgttttagcatcgttaccaattggagataaggctccgatacccgttataacaactctattatttttattcatacgttatcctcctattttccccatttaataacgattgcgccccaagttagacctccaccgaagccaactaagactaaagtatcgtcatctttgatttttccattttgcaattcttgattaatacttaatggtattgaggcagccgaagtattaccatatttatttactgagacactcattttttctctttctattcctaatctctctctcgcagattccataattctaatattagcctgatgtggaacaaataagtctatgtcttcagacgataaaccagctttctcaactacacgcgtagatgcatcacccataattctcacagcaaatttaaatacttctctaccattcattttgagtttgccagtttctctatctaagtacaagtatttaccaccactaccgtctgaacccatttcatagctaatgataccacgaccttcagcaacttctcccatgacaacagctccagcaccgtctccaaataatacagcagtagaacggtcagtcatatcggtaatcttagataatttatcagcacccacaactaaaatatgtttgtaatcaccagattgtatatattgtttagcagtaatcattgaatacataaagccagaacatgcagcaagttgatccatagtagcaaccttacctgttcctagtctttcttgtaagatgttagccacgcttgggaaaggcatatccccagtagctgtagcaacgataatcatgtctatatctactggctgaatgccggcatcctctatcgctttaatacttgcattgtatgctaaatcagatgtgtcttgatcttcgtctgcccaatgtctttctttaataccagtcattttagaaatccattcatctgaagtttctaaaaactgctcaaaataggcattgtctataatatttttaggtgcatatgcaccaaaacctttaatacccacattcatggttgtacaccttcttaaaaaatttttaataccaggtattaatttaacatattcatgtttttaaactcaagcaga

SEQ ID NO: 3528 - DNA, 3204 bp, Artificial Sequence
  Description of Artificial Sequence: synthetic nucleic acid sequence
agaatttaaaacagaagaaaaagaagcggtaagtactgattataagaataatcaagtgtattcagcacctaatcctttaggaggcacattaatgcttcaaggattgaaaattgatgaaaaagaaaatgtagacaatatggatcgcaataattttatcacagcaatgattaaatcacgtgatgttatgtataagaatagagacattgttaatggtaatgagcctagtaatgaacaacatctgactgatgattatttacttggtgaacttaacaaagttaatattggtgaaaacacagataatggcagtgattttgatcaaattagaacggataatacaagtacaacccattttgtagttattgataagaatggtaagttagcaagtacgactaatacactatccagttacttcgggacaggagactatatgaaagagggattctatatgaataactctttaggcgactttagtaaggataaatcaagtcctaatcatggtgaacctcacaaggcgcctagatcatttatttctccgtcagtaattgttggccctaatttctatatgggtattggtacaccaggtgggaacaagattccaacaattcttaatgaagtgattgtcgattatttaaacagtgatggttcattacaagaatctattaataaaccaagattttataatgacggcggcacgatattttacgaaaatgctatgactgatgaagatataaatatctttaaaagtcttggttatggtgttgaagaaaagcataatgatccaaactttggcagtgtccaaggtgctgtttatgataaagataaaaatactgtagatgtcggtcatgatgtaggtaaccgttaaaataaatatttaatttaataagcaccttaaatgagtaatgaaaacatttaaggtgcttttttgtgtgtattaaattataaattttatatacatatttatttgttttcaagtttaacgataaaaataacttaaatatgaatataatttaagacaattttttgacaaagagtgtaagcgtatacaatgaatgaaagaagtagtatgatgattgagtggaagaattacatataaaaatgaaatatatagaggtgtcttatggactttatagctattttaatcggattagggccactattaggttggggattatttccaactatcgcttctaagtttggtggacgtccagtcaatcaaatctttggtgctactgttggtactttgatcttcgcaattgttctagcactatttaaaggtataggtttaccaggaggtatggcattagtattttcgctcatatcaggtgcaggatgggcatttggtcaaattattacttttaaagcgttcgaattagtaggttcatcaagagcgatgccaattactactgcatttcaattacttggtgcatctttatggggcgtttttgcgcttggcaactggcccggtataacaaacaaaatcattggatttctagctttactcgtaatccttataggtgcacgtatgactgtatggactgaaacaaagcaacaagaatatagtaaaaatctacgaagtgcagtgatcttattacttgtaggtgaaattggctattggatatattctgctgcacctcaagcaacggatattggtggatttaaagcttttttacctcaagctataggaatggtcattgtggctgtcatctatgcgttgatgaatatgtctaaaggtaatgcttttaaagagaaagtaagttggcaacaaacaatatccggatttttctttgcgtttgctgctttaacttatttaatttcagcacaacctaatatgaatggtttagcaacaggatttgttctatctcaaacatctgtagtattagcaacgctaacaggcatttttttcttaaatcagaaaaaaacatcaaaagaattaatgattacaattgtgggattagttcttattttagttgcagcatcaatcacagtgtttattaaataatattaagaagggacgaataagatgaagaaaacagcagtattaaatagtcacatttcaagcgcaatctccacactaggtcactatgatttattaacgattaatgatgcgggtatgcctatacctaatgatgacaaacgtatagatttagcagtgactaagtcattgccatgtttcattgatgtgttggagacagtgttaactgaaatggaaatacaaaaaatatatttagcagaagaaattaaaactgcgaatgcacagcaattaaaagcaattaagaaattaatcaatgatgatgtagaaattaaatttattgcgcattctgagatgaaagaaatgttaaaatctcctttaaataaaggaaatatacgtactggtgaaatcacccctttttctaacattatcctagaatctaatgtgactttttaagcttaatagtcatgtgattgtgcttttaaaaagataaagtaggtgaagttgaaatgaataaaaataaagtgattgtaattggatcaacaaatgtagataaatttcttaatgttaaaaggtttccaaaacccggtgagacattacatattaatcaagctcaaaaggagtttggtgggggcaagggagccaatcaagccatagcagctagtagattagcagcagatacaacatttatcagtaaagttggtaaagatggcaatgccaactttatattggaagatttcaaaaaagcaggtattcatacacaatatattttaacttcagaaagtgaagaaactgggcaagcatttatcactgttgatgaagcaggacaaaatacgattcttgtttacggtggtgcgaatatgacattaagtgcaactgatgttgagatgagtgcggatgcgtttattggtgcagactttgttgtagcgcagcttgaagttccatttgaggcgatagaacaagcatttaaaattgctcgtaaacaaaatatcactactgtattaaatcctgcaccggcaattgaattgcctaagtcacttttagagttaactgatataattattccaaacgaaacggaagcagaattattaacaggtatttcaatcaataatgaaagtgatatgaaagaaacagcaacatattttctcgatttaggtatatctgcagtattaattactttaggggagcaaggcacgtattgtgcatatcaagaacaatacaaaatgattcctgcg

SEQ ID NO: 3529 - DNA, 3456 bp, Artificial Sequence
  Description of Artificial Sequence: synthetic nucleic acid sequence
acacataataacgccgctaatattggtccaaacataaatggcaaaatcacatgtaacatttttaataacagacttaacataatagcaattaataatatgattaaattattaataaaattccgcttcaaaataccactctactttcgttaaaagtaagtcacaaaatttctaactttatttaaattcaaagagtagaacaaaatgcatcttaaattcctagtccaccatcgaaccccaacttgccctgtctgttgaatttctcagtgaaattctttttgttagggccccaaaccccaactcgccttgtctgttgaatttctaagtggaatttactgtattgatgacataacatagctttaaaagttgatataagtgcatttttaattcagttataaactacttataagttaagaaagtctaggacattgacttttgccctagactcaattaatttaaataattatattttaaaattatcacacaatacgacttaatgcattatcaaatgcttggatagttttctcaatatcatctttagtatgtgcagttgataaaaatgttccttcaaattgtgaaggtggtaggaaaacaccttccttagccatttctctatacatattactaaataattttaaatcacttttatttgcttcctcaaaatttgttacaggcccctcatttaagaagtaaccaatcattgaaccagcgcgatttactgtgattggaacattatgcttagcaaatacctcttttaatcctttttcaagtatatctcctagagaattaaaatactcataagattcaggagtaagttgactcaatgtttcataaccactagtcattgctaaaggattacctgaaagtgtgccagcttgataaatagtcccaacaggagcaatgtaatccataatttcttttttaccaccaaaagctccaacgggtaaacctccacctatcacttttcctaagcaagttaaatcaggtgttacaccaaagtatccttgcgcacaattataacctacacggaaaccagtcatcacttcatcaaatataagtaatgctccatattcattagtaatatctcttaaaccttgtagaaatccattcactggaggcactacacccatatttccagcaaccggttcaacaataacaccagcaatatcatcgccatatttttcgaacgctaatttaagtgaatctaaatcattatatggcaccgtgatagtgtttttagcaataccttcagggacgcctggtgaatcaggtaaacctagtgttgcaacacctgatcctgctttaatcaataaagaatcactgtgtccatgataacacccttcaaattttataattttattacgtcctgtataacccctagctaaacgaagtgtgtctaaagtagcttcagttcctgaggaaaccattcttactttttcaattgaaggtacacggtcaatcacaagttcagcaagtttattttcttgaagtgttgaagcgccgaagcttgtacctttatctactgcttcatgtaatttggatataacttgttgatttttatgtcccagaattaatgggccccaacttagcacataatcaatgtattcatttccatcaatatcatatattttagatccttcaccatgatccataaaaatagctggtgtgtctactgatttaaatgctcttacgggactgttaacaccgccaggcattaatttctcagcttgctccattgctttaatagatttttcaaaactcatcatatgacctcctcaattatcatctatttatctaaataacgacagatatcttttgcaaaataagtaattattaaatcagcacctgcacgtttcatagatatcatttgttccataacaattttctcttcatctatccaaccatttaacgctgctgcttttgtcatactatattctccactaacgttgtatgctacgactggcacgttcgtattattttttacatctctaataatatctagataacttaaagatggtttaactatcatcatatcgcaaccttctttaagatcactttccaattctcttaatgcctctaaacggtttgcaggatccatttgataggtttttctatccccaaaagaaggtgctgaatctgcagcatctctgaatggaccgaaaaagcttgatgcatatttaataccataactcatgataggaatattttgatatcccgcttgatcaaggccttcacgaatttcagcaacaaaaccatccatcatattacttggagcaatgatgtcagctccagcttcaacttgagaaatagctgtttttacaagtaatggaagtgatttatcattgtctacatcatgcgtatgatcgtcaataacgccacagtgtccgtggtctgtgtattcacaaagacaagtatctgcaacaataagtaaatccttatataaattcttagatattcgtgtcgcttcttgaacaactccattatgatcatatgcaccagatccaatgtcgtctttgtcatttggcacaccgaagaacatgattgctctaatacctaaatcatatgcctctttaatctcttcatgcaataaatttaaactaatttggtatatgcctggtagtgatttaatttcactttttatatcatcttgctcaactacaaatattggatatattaaatcttcttttctaacatgagtttctcttactaaatcacgcattgtcttagatgaacgcaatcttctatgtctatcaaatttcattttgttccctactttctattattttatcaataatgtgaatctaatgtttgtttatttgccacttttacagatgtattgaattttaaaatggtcctagcagtttgcttaccgatagcaaaataatgatcaaattcaggcacattgtcctctttgaaataaaattcaactgcagaggaactagaaaaagtcactgcgtctatttgatgttttctaacaagagacttaacttgacttatatttttaaaattcggtactggtctatataaatcaattttaacgacttcattatatttgctcaattgttgaactaatttaggacgtgctttttcacttgagggcaacaataaatgttgttcgctaatcttaaactcgtccaaaaagccttcttgagaaaaatcacgtggcacaaagtcgacactaatacctaattcattacaatactgagctgtcttatcacctataacagctacctttttaactttaacgttttttaaataaggataaaagtattttactgcgtttttagacgaaaaaataagccagtcgtagctatgatcaagcaatttttcattaaaatgaagttgttttagttggataaaaggcttatggataatatcaactaaatgactatgaacttcattcgtctgcgtcataactataactggtttcataaatttatttcacctctataatagagt

SEQ ID NO: 3530 - DNA, 3374 bp, Artificial Sequence
  Description of Artificial Sequence: synthetic nucleic acid sequence
tgtgtaaccattgtaacgaattttagttcgtgcacctacagactctcttactacagaatgtaacccatcagcaccaatacacaaatcaaacgattcactttcctgtttggtaaaatgtagggtaaccttacaactcgtttgttcaattttagtaactttaaatcctgtgtgaatagatgattcttcgacatatgactgtatgatctcaattaaagtttgtctagataatgcgacatttagggaatgagacttcaatttagcgctcattaatggggtgccttgctcatcataaatattcattgcggtaagattttgaccagcatttttaatgcctttagcaaggtcatgatgccctaatttttttaaaacattatctcctatcccaataccagcgcttaattcgtttatagaagtatttttttcaaacactttaacttgatgaccttgttcttctaataacgcagcagcagttaaaccacctatacctgcgcctactattgctattttcatgttttacacctcaaatttatcattctttattattttagcatacacacacatgttgaaaagcaaacccttctatatttaattgtcaataaatacaattctctaattaaaaataatgaatatatatctaatctttctattgttaatgcttactttaaattttcactctattgtaaaagaaatatttaaaaattcaaaaggggtatatgctcacgaatattcttttaaacctaaaaaacctgagacatcttttattgtcccaagttttttatcatatagctaatcattgacaaagttaaaactactctgtttgaagctattcatatataaattgccaaaatagaatgaaacacttagttgattgctaactcattctctaattttatttatttgtaatatttttttcttatatgatctttttttattccatatttatcatagtatttctccattaaatcagctatattattggcccactgaatatcactagcatattgatgttggcctggattttgtgggttccaccgcatttgatataagctcaattgattatttttaaagtaatggtatctcacaaaccacgcgccacccattatcgctttttcaggagtggtccacttcttctgtttagcaaaactcttaccagtctttacagcatcttcatcaaaagcaccaataccaaaaaagttataatagtgatggttaccttctttaattccttttgataaatctgattgaccatttcctgtctcaactagtgcatgactgatgagatataggatattcacttcatatttatcttgggctttaataaacgttgatcccttattttctaaaataccttttccttttaagatatggttaacttccttctctgacataggtactttttctgatatatccatgtacttcaaatcattatcactatgttttatttgcatagctttctctatatcttgtttggaagcatatataaacttaccattaacttctttagtatggatatttccctcacttgtttgaagagacaccgcttctttaaatgtatgtttaacatcatttttaaaaaggtttgtatcaaatataagaaaaagtattgctaaaatgacgagtatgctaattatgaacaatgtcgtcattcgaagccgagtattctttaacatttcaactaactcctaaaaattttaagataatacaaaataggctattacgatagcaatcatcactataaagaacgagacattaattgcaattttcatacctgtacggtgtctgaacataacattaaaaatgacgagactaattgttaatgatacaacaaaaaatgcaatagctaacatgagctttagcataattaaacagatgattccaataactaatagtacattagatgtgattgctagagcttttaatactttaggattgatatgcgtcactccttctatgatatttaataacattactaatcatacatgattagaagaataaatgtcgactcataatacggtaaaaagtttttatatcaaatgtactagaaatttaagtgatagatgttagtttaaaaatatattaaaccgtactagatttagttattacgagacattcctctaagcagatttaacatatatcatactacgattgatatcatcatcacgtaaaaatccaacaagaatgttaattgttgttttgtcaccaggtttggttagatttgtagaatgtatccactgtttaaacgtgataataattcacttaagttttcaacatctaattcttctagcaaaaagacaagttgtgcgatatttgttaaaacgtctgaatatatatatctttatttcaagccattagcattgaatatcataaccttttgtttaatagacattgaattacatattagctcagtttatttaagtattagttaaaagaaaatggtatataatgcaatataatccttaaaaatttagcaaaaatgtttaaaactaaaataagagaatatttaactcagccatctttaatttgcaaaaaacctagaacatttcgttctaggtttttaactcaagcattacactatatgtgattttaaaaatttttcttttttataaatttaaattgtctcttagtaattgtgtattttcatttttagatgcatcacttggtatgaaatagtacaaaccgtcattttgtataccaccttcaccctctaactgatgtcgattaacttggtcattagcatctttatacttagttctaattgtattaagatcacctaattttaaatctgttttaacatttttctgaatttgattcattaatgtattaaaatgagtgattgaagaagcgcttgtcatcttatctgccatcgcttctaagataagttgctgacgctcttgtctaccaaaatcgcctcctgccccatcttctttacgacttctaataaagtccatggcagcatcaccatctacgtgtgttttttcacctttaacaaagtgattagcccccattgtaaatgtactattacttacgacatcaacgccacctaatgtatcaatcatgtcatgtagtccatccatgtcaatcgtagcgtaatggtcaattggaacattcattaatttttcaattgttttaacagccatgttaggaccgccataagcgtatgcatggttaatcttttcttcagtacctcgacctgctatttctgctttggtatcacgtggaatacttactagctcagttttcttttctttcggattaatggaaagtaccatgattgtatcacttcgttccccaccgccttgttgctttcgcttttcatcagaatctacgccaaaaagtgcaatagtaaatggatcaccattttttaaatttacttt

SEQ ID NO: 3531 - DNA, 2956 bp, Artificial Sequence
  Description of Artificial Sequence: synthetic nucleic acid sequence
aaaatatgatgtattactaatttgtgatgaagtagcggttggtttcggacgtacgggagaaatgtttgcttgtaaccatgaagatgtacaaccagatattatgtgtctgggtaaggcgattacaggtggttatttaccgttagcggcaactttaacatctcaaaagatatatgatgcttttttaagtcagagtcacggtaagaatacgtttttccacggtcatacatatacaggtaatcagttagtttgttccgtagcacttgagaatattaatctttttaaaaagaagcatctgattgggcacattcaaaagacatctcaaacattaaagcaacgcttagaggcacttcaacctcataaaaatattggagatattagagggcggggattaatgtatggtgtggaattagttgaaaacaaatcaacgcagacaccactcgatattccaactgtagaactgattatacatcgatgtaaagagaatggattgatgattcgtaatttggaaaatgtcatcactttcgtacctattttaagtatgtctaataaagaaattaaaaaaatggttaaaattttcaacaaagccttacatcaaacattgggtaagaagtaagaggggatttatggacattaaagcacagttaaaacagattcaagataaaggtttatatagagagcttcagccgattcagtccgtagaaaaacaatatatttatatcaatgaccaatcttatattaattttacttcgaacgattatctcggtataggacaagttgaatatcaacctcaaaatttcttagattttataaagacatatagtatccatctatcaagttctagattagtgagtggcaattcagttgtttatcagcaattagaacaggaaattagcgagcattttaattttgaagacgccttaatttttaatagtggttacgatgcgaatttggcggtatttaatatttttaaaaataataatattgttattttttctgatcaacagaatcatgccagtataatagacggtattaaattaagtggtttatcaaaagtgatttatcaacatttaaactatgatgacctggaaagtcatttagcacggcacaccaatccagatgttcaaaaagtaattgtctctgatagtgtgttttctactaatggcactaaagcagatattaataggctagtacatctcaagcaacgttacaatgcgattttaattattgacgcatctcatagtttaggattaaatctctttgagtatcatgcagacattgacatagttacttcaagtttatctaaagcgtggggagcccatggtggcgtcatattcagttcaaaagatataaaagatttaatcattaataaaggtcgttcgcttatctactcgagtagtttacctagctatcatttgtattttattcaagtgagcttacaacatgtgattgaagatacatacagacgagagaagttgaatgtacttagtgaatattttaatcaccaattcatggaattatttcccgatcaaccattatctaatacacctatcaaaaatatcgtttgtgatagtttggcttcagcacaagcacaatacgacatgttatttgaacatggtatatttgtcagttatttaaggtatccaacagtgtcacagctaacattaagaatttcattatcctattttcatgacacagatgatattgatcgacttttcaatgtaatgaaacaatacgatgaaggtgatagctatgtatagtataaaaatgcgtgcaagccacgaagatattcatattagtggtgctgaaacaatgtgtgaatttgaggatttagaaaattatttaaaaaaatattttaataaagcatttaatcatgaaaatggaaatatagatttcttaaatttgaaaattgaaaaggttaaggcaccgattcaaacgttagtagcattaccagtggttgaaaatctaaacgatactttaacacaattagcaaaacaaacaggtgtttctgaatatgcgctaaacaaagggttagaatttataaaaaatgatattacttatactggagccattattctatctgcacaaaccggacaacgacttgatagcactgaacaacgaggtatcagggtaacacaattagcatttaaaacatgcaaatgtaatggagaaatatcagaaagagtaaaagatgcacgtgcacttgcaacttgtatcaatgcatttgaaggtgtaaaggcagaactatgtgtatcagacgatttgcattacacgactggatattttgcgtcgcctaagttaggatatcgtagaatctttaatattaaagaaaaaggtacgcgtcacggaggaagaattatcttcgtagacgaagaaataaatttaaatgaatatgtttcctttttagaaacagtacctaaagaaatcatagaaaaataagtaataataaacactcccagtaaagaaagcatttaaaatgtgacctttactgggagctttttagttatatcatattgtttttttaatgaaagagttacagggtataaattattttgtaaatgtgattttaggcgaggtacctaagccttctttacttatagcattaaaaaccaatttttttgaattaataagaatcatttcaataatgatattcggattgtctacattacttaaaattatttttctggaatcttcatttattaacgtacaaacgtaattaggtgttatatctttattaaatgtaatatttaatggtgaagtttctacttctacaggatgccaaataccttctaatgtatggaaccaacaaatttcttgatattttgaatcgtcacttacgatgtttatgttgttgtaattatgcataagcacacctttctatattaataaccataaattgatgcataccattcatagtgatcgccatttgatactggaatgatattactatgtgcatctt

SEQ ID NO: 3532 - DNA, 4103 bp, Artificial Sequence
  Description of Artificial Sequence: synthetic nucleic acid sequence
tttttctaaataaactacttcgattccttcatctctcaaagtttgagcaaatttgtcatgctcttcttgtgcaacttttaagtagggaatatcatcgaataataaaccacttaaatgatcaggtactaaattttctaattcttttcctggtctttttaacaacacagttttcaatttgcctatttcactatttacttgaatgggtccttgtaccatttcaaattcctcctttgctttattacattcacattataaaacgctttcaaaaaacatcgtgtgatttaattcacaattgtttagggagggtttttacaaatgaatgttgagcagtggttaaatctatcatctaaaaagcaacaagcatacattgaattggggacacgattcagcccgttttattttaaaaagttatggttagatgcatgggaagaaacgcatgaacgtcgattggttgatgaaatttatcgtgttccaaccgaagatactgatcaagcaaaagcaaaagtacaacttgcgttttgtattgatgtacgatccgaaccgtttagaagacatttagaaagtgaagggccttttgaaacaatagggattgctgggttctttggtctgccaattcaaaaagaagtacttgatgaacaatttgcacatccatctttaccagtgatggtagaacctgcatatcgtattaaagaatatgctgatcaacatgaaatgaaaatttataatcaacaacaacatacacttacatctatgttttacaactttaaattaatgaaaaacaacgtgttgccaagtttgcttttaccagaattaagtggtccttttttaagtattgcgactatagctaacacaattttccctaaaaaagcaaaacgtattgttcatcgattctcacaaaaatggctacgtaaaccaacaggtaaattaactattcagcgtgagcaagatgcgtattcaaaactaccaatcggctttactttagaagaacagattcaattttccaaaaaagcattacaattaatggacttaacagatgattttgcaccacttattgttctatgcggacacggtagtgaatcacataataatccctatcatgcttcattagagtgtggggcttgcggcggtgcctcgagtgggttcaatgcgaaattattagcagtaatgtgtaatcaagaaaatgttagacgtggattattgatggaaggaatcgacattccaagacatacagtgtttatagctgctgaacatcaaacgtcagttgatgagttagagtatatttatgttccacctttaactacagaagctcaaaatgcctttgacgaacttaagcatgtgatgccaaaagtatgttataaagccaatttagaacgtttggcatcgttgccaaatataaataacactgaccataatcctaatgctgaagcgcatcgtcacgctagcgattggagtgaagttcgtccagaatggggtctagcacgaaatgctgaattcattattgggaaacgtcaaatcacccaaaatagtaatctagagggacgggcatttcttcataattatgattggacaaaggatgaagacggtgagattttaaatacaattatttctgggccagcactagtagcacaatggattaatttacaatactacgcctcaaccgtggcacctcactattatggaagcggtagtaaaacaacgcaaactgtaatggcgttattgcttggctttttgactataagtataaacgccctcatcatagcattgatttaacactttgcgatgcaattattcaaaaatacggtggtaattatttaagtcaccttgtttatagtggtgacaaagattgtttctttaatgaaaataaagattcttttattatgtatcgatataagtccaatgcccttgtcgttttgggtgatccaattggcaatactaaatcattcgagtcattattagaagcattttatcagtttgcagagtatcaaggttatgagattattttttatcaaataagtgatcaatatatgcctttatatcataattttgggaatcaattcttcaaattaggtgaagaagctattattgatttaacaacgtttacaacatctggtaaaaagcgacgtggtttcagagcgacgctcaataaatttgatgatttaaatatcaattttgaaattattgaaccaccatttactcaagatttctttgatgaacttaaatttgtgagtgataaatggttggatggaagaagtgaaatgcatttttctgtaggtcaatttactcaaacttatttatcgaaagcacctattggagtaatgagagatcattctggcaagatgattgcattttgtagtttgatgcctacttattctaataatgcaatatctgttgatttaattagatggttgcctgaattggatttacctttaatggatggattatatcttcatatgttgttatggagtaaagaaaaggggtataaagcatttaatatgggaatggcgacactctcgaatgtaggtcaattgcattattcttatttaagagagagaatggcaggacgtgtatttgaacatttcaatggtttatatcgttttcaaggattaagacgttataaagaaaaatatagccccaattgggaacctagatttttagtttatcaaaagcattattctctgtgggagagtatgcttaaagtgatgagagtcatacgccataaataatgaatattttaaacatttatctctaaatatccataaatatagcctggaacatcaattgttgttccaggcatttttaatgtaaggtagttgttgacttaattgaaaaaatatttttatcaaaattcttcattcatattttttattctcaagatggaatgatatattcaaaatgaatcatggtccaatctattatttacatatgattatctttgacataattagcacgatcttgttgttcttgttcataacgttcagggttctttttgtagaaatcttgatggtatacttccgcttcataaaaagttgatgccggtaaaatttttgttgcaattgctttatcagcgttaaaactatcttggagttcacatatatattgttctgctaactgtctttgatgttcatttgaatagaaaatagcagtcttatattgagaacctctatcttgaaattgaccaccatcatccaaaggatcgataactgaaaagaaaatttctaataatttatgatatgaaaatagagcaacatcatactcaattttaaccacttcataatgcccagtagatccagtttttacttcttcataagaaggattaactaagtgtcctcccatatatcccgacgtgactttttcgataccatcgaatgtatcaaaaggtttagtcatacaccaaaaacagccaccagcaaagtatgcagtattgatattcatttatgccatcctctcattggaccttagtaccatttattaaaaaactcttgcaatttgaatactttttctataacgttaatacatattaattatagtatatagatatgtaattttgaaggtataaggtaggtaaatatgactgaacagaaggatattaaagaaacagagtatcgacgacagaaaggaacaacttcgacaccttctaggcgaagaaataaaaaaagaatgcggaagttaccttttatcattttagtcatccttattattttaatttctatcattgtgtatattacccatcagtataacagtggtatgaagtatgctaaagaacatgctaaggatgttaaggtgcataaatttaatgggaatatgaaaaatgatgggaagatttcagttcttgtccttggcgcggataaggctcaaggtggtaaatcacgtactgactcgattatgattgttcaatatgattacgtacataaaaaaatgaaaatgatgtctgtcatgagagatatttatgctgatattcctggttatgataaatataaaattaatgccgcatattcacttggaggcccggaattgttaagaaaaacacttaacaaaaatttaggtgttaatcctgagtattacgctgtagtagattttactggatttgaaaaaatgatagatga

SEQ ID NO: 3533 - DNA, 3516 bp, Artificial Sequence
  Description of Artificial Sequence: synthetic nucleic acid sequence
actgcaattaacataacaacaataatgacacgtaacactttattattcaatttcaatcctccgcatcattaggtcatatataaccattgagtaattgacactataaactataattcattcactcgtaaaatatcaactttataataataaaattatatactttatcttgtaggttgtaaaatgtcatagaattaaatcattagtgagtagttaaattagttttgacaattcataatgtcagttaaaatatatttatacaagtaaaaagggggtaccatatatgattaatcaaaaacgtttattagattgttttctagaattagtgcaaattgattcggaaacagggcacgaagaaacaattcaaccttatcttaaagatacgtttgaaaaaatggggctccatgttattgaagatgaagcttcaaaaaataatagattaggtgctaacaatcttatttgtacgttaaaaagtaatataagtcatcagaatgtgccgaaaatttattttacaagccacatggatactgtcgttccaggaaaaaacatccaacctgtagtaaaagaagatggatacgtttatagcgatggaactacgatactcggggcggacgataaagccggtcttgcggcaataattgaagcgattaaacaaattaaggaatcaaatttgccacacggacagattcaaataattattaccgtgggagaggaatctggattagtaggtgctaaagcaatagatactcgccttcttgatgcagatttcggctatgctgtagatgcaagtaaagatgttggaactactgttatcggtgctccaactcaagtaaagatttatacaactataaaagggaaaaccgcccatgcaagcacacctaaaaaaggtattagcgcaataaatattgcatcaaaagcaatcagtcgaatgaaattgggacaagtcgatgcattaacaacagccaatataggtaaatttcacggaggttgtgccactaatattatagctgatgaagtcactttagaggcagaagcacggtcacatgatgatcaaagcattaataaacaagtgaaacatatgaaagagactttcgaaacgacagcaaatgaattaggcggtcaagctgaagtgttagttgaaaaaagttatccgggatttgaagttagtgaagctgacaaagtaacacaatatgctatatctagtgcattagccctcggtctaaaaggtgatacttgtattgctggtggtggttcagacggcaacatcatgaatcaatatggcattccttctgtgattttaggagtaggatatgaaaacatacatactacttcggaaagaatagcaataaaggatatgtatatgctcacaagacaaataataaaaattattgagctagtagctgaataaaacatgcatatcgtaattgttaattagcgatttatgttacaatattattgaaaatttttgaacaagagaggtaagtaatatgacacaacaaattggagtagtgggtttagcagtaatggggaaaaacctagcttggaatattgaatcacgtggttatagtgtttctgtttataaccgatcaagacaaaaaactgatgaaatggttaaagaatcgcctggaagagaaatttacccaacatactcattagaagaatttgtagaatctttagagaaacctcgtaagattttattaatggtaaaagctggacctgcaacagatgccactatagatggtttattacctttattagacgatgatgatattttaattgatggtggtaatactaattaccaagatacgattcgtcgaaataaagctttagctgaaagtagtattaactttattggtatgggagtttctggtggagaaatcggcgcactcacgggcccttctttaatgccaggtggtcaaaaagatgcttataacaaagtcagcgatatcttggacgcaattgctgctaaggcacaagatggtgcttcatgtgtaacttacattggccctaatggtgcaggacattatgttaagatggtacacaatggtatcgaatatgcagatatgcaattaattgctgaaagttatgcaatgatgaaagatttattaggcatgtcacataaagaaatttctcaaacttttaaagaatggaatgctggagaacttgaaagttatttaatagaaattacaggtgatattttcaataaattagatgatgacaatgaagcacttgtagaaaaaatattagatactgcaggtcaaaaaggcacaggtaaatggacttcaattaacgcactagaattaggtgttcctttaacaatcattacagaatctgtatttgcgagattcatctcatcaattaaagaagaacgtgttactgcttctaaatctttaaaaggacctaaagcacattttgaaggcgataaaaaaacattcttagaaaaaatacgtaaggcactttatatgagtaaaatatgctcatatgcacaaggtttcgctcaaatgagaaaagccagtgaagataatgagtggaatttgaaattaggcgaattagcaatgatttggcgtgaaggttgtattattcgtgcacaattcctacaaaaaattaaagatgcctacgataataatgaaaacttacaaaacttattattagacccttacttcaaaaacattgttatggaatatcaagatgcactacgtgaagtagtagctactagcgtgtacaatggcgtgccaacacctggtttttcagcaagtataaattattatgatagttatcgctcagaggatttacctgcaaacttaattcaagcacaacgtgattactttggcgcacatacttatgaacgtaaagaccgtgaaggtattttccatacacaatgggtagaagaataatttacgctataaaatctcactctaaattgggtgagattttataaaaattttaatgtaaacgttttctcttagtatagtttttatcaaaattaatgagtccttttatttaaacttattaattttgtttatataaattatttagttttttaataacataggaggagatattatgaaaagaaattggtggaaagaagcagttgcatatcaagtatatccacgaagttttaatgatagtaatggagatggaataggtgatctacctggattaattgaaaaattagattatctagaaaatttaggaatagatgtcatttggttaagcccaatgtatccatcaccaaacgatgataatggatatgatattagtgactacaaaggcattatgagtgaatttggtacaatgaacgattttgatcaattgttatcaagcatacatcaaagagggatgaaattaatattagacttagtggttaatcacacatcagatgaacacccttggtttattgaatcaaaatctagtaaaacaaatgcaaaaagagattggtatatttgggcagatcctaaaccggatggatctgaacctaataactgggaaagtatctttaatggttcaacttgggagttt

SEQ ID NO: 3534 - DNA, 4004 bp, Artificial Sequence
  Description of Artificial Sequence: synthetic nucleic acid sequence
tattcgaccttaccaatactatcacgaatacgttgatcaaattttcttaaatcttcttcattaaaagcattacctaaacttaacataggcgtgtcgtgatttactttttcaaaagaagactgagcttcgccacccacacgcactgttggagagtctgtcgatttgaattctggatatttttcttcaatttcaatcagctcatgtaataacttatcatactcactgtcaggcactgagggattatcttgtacataatattcataactatattgattcaataagtcatgtaatttttccacacgctttttaacatcttgcatcccctatgagtcctccttctttgttattggtgcgaactgagctaataatcgttttggaccttctgatttaaatataatatccaactctacagatccatttttttcattcacgttactaaccatcccttcaccccatgctttatgcataactttatctcctactttccaatcagatgatgaaacttgttttttagttgatgtagtacgcttactaaaacctcttttaggttgagatttgggagatatagtttgtcttttttgaccggtatgactatcaagtaggtcttctgggatttcttttaaaaatcgagatggcatattggattgagaacgaccaaacaacattctggtcgttgcatttgtgatataaagcaactcttctgctcgtgtaattgctacataacaaatacgacgttcctcttccatttcatgatcatcttcactttttattgctctgatatgtgggaacaacgactcctccattcccataataaaaactataggaaattcaagaccttttgctgaatgcattgtcatcaatgttacaccattctgtgtatctgcttcgtcaatatcagcaactaatgataaatctgttagaaaattaataagtgattgttcctctaaaggagtattttcctcataatctttaggtacagacataaattcatctaagttttctaatcgacttcgtgattcaatactttgttctcgatcaagcatgtctctatagcctgatttttgtagtacttcatctacgatttcactaatttcgagaaattcttgttctttgattaaattttgaatcatttcataaaaactgatacattcttgagttacctttttagagagacctataaaatctacctcagccaatgcgtcaaacatacttatattattttgaagtgcataggtttggattttttcaacagatgaaggtccaataccacgtttaggcacgttaataatacgttgcaaactaatatcatcattgctattagcaataactcttaaataactaagtaaatctttaatttctttacggtcatagaacttttgacccccaaccattgtataaggaatatttgatttcataaatgtttcctcaagtacacgtgattgggcatttgttctatataatatagccatttcactatattttttaccactgcgttgatgcttcattatttctttaacaacgtattctgcttcatctctttcagtcatagcttcataatactgaattttgtctcctccagaatttgcagtccatagacctttaggtttacgttcagaattatgttttataacttcatttgcagcatttaaaatattcttagttgaacgatagttctgttcgaggaaaattgtctttgcctcaggatagtcctcttcaaaagataaaatattttgtatatcagctcctctccaaccataaatagattggtcagaatcaccaacaacacataaatttttaaatttgtttgctaatagttttactaaggtatattgtgctttattggtatcttgatactcatctacatgtatatattgaaatttattttgatagtattctagagtttcgggtacacgttcaaataaattaatagttgtcataattaaatcatcaaagtcgagtgcttcattacgtgataactgtctttgataacctttgtaaaccgttgcaaccatttgagagtgaaaatcattcgcctctttttgagcatcctcaggtgtttttaattcatttttcaaattgctaattgcaccaataaacatacgtggctcaaatcgcttactgtctatattttcacttttcaatacatctttaatcactgatttttgatcggtaggatcaatgatagtgaaatttctttcaatgccaatacgatcagcatctcttctcagaattcttacacacatagagtgaaaagtggacatccaaatcacttgcgcttcttctcccacaagatgttcgacacgcgccttcatttctttagctgctttatttgtaaacgtaatagctaaaatattataaggtgatacatctttttcatctaataaatacgcaatgcgatgtgttaacacacgtgtctttcctgatccagcacctgccataataagcaatgggccttctgttgttctaaccgcttcactttgctctgaattcatatttttttctagcgcattcatttattagactcctttatctttacagtttttaatgcttttttaatgtcgttatatataatatcgccgacaacaatggtatccgcaatgttagacatttcgttagctttgtcaatgtttgttataccaccgccataaaataattgagtatgttgaagcatatttgcaatcgctttaaccttatcaacatctccatatgtgccactatattctacgtacatgattggaaatcgatataattcttctgccatttgtgcatatgcttcgacatcttctatacctaattgagtataagctttggtaatttttgcaactttactatttgcgtttagaacgacatatccctcgaaaaaaacttcatcaaaattaatcacatgtccatattttttaagggcttctagtaaaatttcgttatgatattttgtatccttactattcatgactgttggaataaaatagaaatcaaaaccaggcatcacactttctacattcgaaacttctaagacaagtggtaacggataacgtcttactctactcattaaatgaataacattatcttctgttacatcatctgtcccaccaataattattgcatcagtgttagacatacacagtgcctctaaattttcatccgaaattgatttagccggatctaatttaaacatatgtttccacttggttatgtcgtacattttatgaaactcctttatttaacataccctaaattatagcatttttaagttttaagttctaaagactaaataagttaatcctatatgattttaagtcatatgtaatttaacatatgctttaagcaaaaatgactatactgctactaaattcaataactagatactgtgtaaattcgttataataaatcagatagaatgcttaaattaattatctttaaaaatttatcttcattaaaaaatagcttcgaaagatttcaataaatctttcaaagctattaatgtattaaatgaaacactgaaatcatacgaaagtatatgcattcttatgcctttgtttcaatatttagtctatccaaaatcattgtataagcatcattaccccattgtaacgaacgctttactctagaaatcgttgcagtcgatgcaccagactcttcttcaatagttgcataagtataaccttgcttaatcattttagcaacttgaagtctctgagataatgactgtatttcatttacagtacataaatcatcgaaaaactgataacattcttctctgttttctagtgctaagatcgcatcaaataattcatctaatgactgacctcttaatttttcaatttgcatctcgaacaacccctatacaaatattctctcattattttaacttactaattcgttaaagtgtagtagtttcatgaaaaatgtataggaaattagaatcatttgtcttgtattaaatttgatttaattaagataaaccagcacgcgcgaatatagtgtcgacctgattaagatgatgc

SEQ ID NO: 3535 - DNA, 3386 bp, Artificial Sequence
  Description of Artificial Sequence: synthetic nucleic acid sequence
actgtatgaatatgattaaattaatttctacttatacgttaaaacgttactttgtaatgagtgtgccaattttaccttctagtgctgcatctaattgatttaatgatgtgatgagcacgctaccgttaggattattttcaataaaggagatggcagattcgattttaggtagcatgctgcctttggcaaattgttcttcttcaatatatgttttaagcgtatctatatttgttgttttaagtgcttgttgttggtcagtatgatagttgatataaacataatcaatcgctgttaaaataatgagttgatcacagtgaatatcagcacctaataatgcacttgttttgtctttatcgatgacggcatctatacctttaaagctatcatgctgttcgcgaatgactggtataccacctccacctgcagcgatgacgagtgtgtcattttctactagagttttaatactttccagttcgataatagatattggttgtggtgatggtacaacgcgacggtaacctcgaccagcatcttctacaaattgataacctttttcctgttgaatacgatttgcttcttctttagtgtagaacagaccgatgggtttacttggactattaaaagctggatcgccttcatcaacttctacttgggtaactagtgtgacaacttgcttatctatgcccattgaatgaagttcattttgtaaactttcttgaagttgatagccgatgtaggcttgactcatagcgccacattcagcaaatggaaaagcaggaccttgatcgtgttcagctgcataattcagaccaaggttaatacttcctacttgtggtccattaccgtgactaatcacaatttcgtgacctttagtaattaatcctactagggatttagctgtattttttactaattcaagttgttcttgtggtgattttcctaaagcgtttccacctaaagctactacaattttagccatttcactcacttccttctataatttagaattctcctaaagttgctaccatgaccgctttaattgtatgcattctattctcagcttcttggaatactacagaagctttgctttcgaagacatcatcagtgacttccatttcactaatgccatatttttcataaatttgttgaccaattttagtttctgcattgtggaaagaaggtaaacaatgttcaaaaataacatttggattgcctgttttttctaataatgcttggttaacttgatatggttttaaaagtttaaggcgttcttgccatacttcatcaggttcgcccattgatacccaaacatctgtataaataacatcagaatctttcacgcctttatcaatatcatctgttattaaaatgttaccgccattttccgtcgcaatacgttcgcaacgatttaataattcttctgtcggattgagttctttaggacaaacaagatggaaattcataatcttatttaaagtaagttttttgttaataaaacagggaatatgttaaaatagatgtccaaatgaataatagttaaatttaatcaaacaaataaattgtaatttaacctccgttctaataaattgtcgcttattaaaatcaatatgcgcataactgtattcaagtatatctttgatatttttacctttgacagtgatatctataggtttatctggatgagggtatgcatcgtatatatctctatttcttatagttccttttaacccttcctcaccattcttaggtatatgcacacaagaaatatcataattataggctaatctaattgcatcatgtaataattgagtaaaaggatgcggcttacaaataatatcttcaatacattgaactgttaagccattgtttttgtttgaaactactgaatttgcccagtgtttgactgccttacgatcataatatgtttcttttaataattgctcatcttcatggtaatcatttaagtcaataacttttgagtcgatgtgctcaatctcataagaagttgtacgtttcttaaatttaattgaaagatgtactaattcctcagcattttgacctgcttgaacatatatagttccatgatcttttccaactactgtttgatgttgatgagcggtaataattacatcaataacaccaagttcttccataattttttcagcttcgtttgcatttttttcatttcttttattggcactactaattttatttaacccaccatgataaataacaataaggaagtctggttcttcaacttcatgtatgtatctaatccaacgtttagctgaaaccaaagtcttctcaatacagacatcttcttccatttctgcgtactcgttcttcattaatccatctgatgttaaacctacgatagcaattttcaaatctgaatacattttgattgtataaggcgtagaaaaatatggctctctagtaacagtatactctatatttgctgatagccaaggaaaccttgagagtgcaactgaacgtgtcaaaaaagataatccaaatttaaattcattagggctaattccactagcatcatactgcattgcattcatcaacttaatcataggatgacgtttatatggtgctacaacggcgtaataaaatgctgcaagtgatcccgccaaacttcccccactatctagtaatatgacattttcattattttttcgagcttcattaacataagtaccagcccgataaatgtttgagccataatcaccatttaagaagtgactatgcatatcagaagttgcaatcacatcaactattttattttcatttttttccatagagccactcctctccttgaatttagtgtaacatgtaccattcattaaatgttataaaactattatcgcattgatatcattctaaataaaaaaactattagcaaaggtgcacgtatgtctttgctaatagtgtattgactatccaatttgtatacgttctttaggatagctatatttttcgggttctttacgtccagctaacataataatgaatgaaataagtcctacacgacctataaacattaatatcattaatacagccttggtaatgtcgttgacatcgcttgtcacacctaagcttaaaccacatgtaccaaacgcagacattacttcaaagaaaatttgtaaaaaggacaacttgccttgttcagtggcagatataataatcatgctaataaatgtaattaatgacgccatagtaaatacggcaaatgatctttgtacatccataatatgtacttctctgttgaaaattttaatacctgttttgtcaccagtattattaaaattaataacaaacaaaattaaaatagcaaatgttgttgttctgattccacctcctacagaactgggagatgatcc

SEQ ID NO: 3536 - DNA, 3059 bp, Artificial Sequence
  Description of Artificial Sequence: synthetic nucleic acid sequence
ttcatcattagcaaaatgatatttttcattaacgacttctaaatttttctcagttagaatatcttcaacacggaatccttgttctttaatctccgcttctaccataaatttacctttttcaatattagaagaacgatcttgttttttaaagaaacttttgattttacttttggcactagaagattttacaattttcaaccagtctctacttggaccgtaagaatgtttacttgtacgaatctctataatatcaccagtttgtagaacataatctataggtacgattttaccattaaccttagcaccaatcattttatttcctacttcactgtgtattgcataagcaaaatcaattggtactgcaccataaggtaactctataacatcactagctggagtaaatgcatataccttatcgctctgtaaatcatattttaaggattccataaattcttgcgcatctgcagaagtatggtcggtttcagcaagttcttttaaccaattaagcttattttgaaaatcctgtgttttttgattaactgtcttaccttctttataagcccaatgtgcagcaacaccatgttcagcgatttcatgcatttcgtgcgttctaatttgtatttctaaaggatcgccattgggtccaactacagtggtatgtagtgattgatacatattttgcttaggcatagctatataatctttaaaacgtccaggcatcggtttccataatgtatgaactaaaccaagtgtcgcataacaatcatttatcgaattaactataatacgtatagcaagcaaatcaaatatttgatcgaattgctttttttgttttatcattttgcggtatatactgtaaatatgttttggtctaccgttaatttcgcccgaaagattcattttagtcatttcgtttttaattttattgattgcatttgtaatgtaagcttcgcgttcactacgttttttcttcataagattaacgatgcggaaatattgcacactgtcaatatatctcagcgctgtatcttcaagttcccactttatcgtgttgattccgagacgatgtgctaaaggagcatagatttctaaggtttccttagagattcttacctgcttctctcttggcattgcctttaaagttctcatattatgaagccgatctgctaacttcactaaaattacgcgtacatctttagcaatagcaataaatagtttacgatgattttctgcttgttgttcttccttagagcgatacttaacctttttaagtttagttactccgtctactattcgtgcaatttcttcattaaacatatctttaacatcttcaaatgtataagaagtatcttcaatcacatcatgtagaaacccagcgacaatagtgggtccgtctaaacgcatctctgttaaaatccctgcaacttgaataggatgcataatataaggtaagccattttttctaaattgacccttatgtgcctcataagctatatgataacttttgagaacatattcatattcacttgttgataaatatgatttagctttataaagcacctcatccgcgctatatggatactcgttattcactttaatgacaccccactcaattcattactttcgtttagtactcatgttgcaaagatgtttaacataccacatgaaagtacttattcattgttttgtattcattttaccataaatcatttatagcttaagaaagtagaaaggttctacatatatcaaattatcatgttcaactatataattgaaactcatttattaactttctaaataatagtttcatgatactacaatatgacttacaaataaataaatgatgttaaactttaatcacacatttaaatttacatttaagttgtcggtcccaattaaaaatttaaaacacatatttttattaaatatcgttttaaaactatgtccaattaaaaatagagatgaaatacttagctaatattcatagcaattataaagtaaattataataacattgataatcatttaatacattaaggcattaaggttttccaaaagattaatgagcctgatattattttttcaggctcataaaaatctatattttattatttttattcatcatatgaaatcaaactcatcacatcataatcttttattttatcaattccattcaaatatttaagttcaataataaaagcaatacctacaactataccacctaattgttcaacaagctttattgcagcttcaatagttccacctgtagctagtaaatcatcagtgattaaaactcgttgtcctggtttaatcgcgtctttatgcatagttaatacgttagttccatattctaaattatattcataacgaataacttctcgaggtagttttccttctttacgtactggagcaaatccaatacccattgagtaagcaactggacaccctattatgaatcctctggcttcaggaccaactactatatctatatttttttcctttgcgtattcaacaatttgatccgtagcatatccataagcttcaccattatccattatagttgttatatccttaaagcttacacctgctgaaggccaatcttttacttctgaaacatattgttttaaatccattgtttttcctcctgaaagctatgttaactttgatattatccattcttttatatttaaaaaatcatcatagagaagacgttcttctacttccatacgtgctcgtctcatttggtaaatacgactattttctatatcttgtttatttggcgctggatttatcttaatcaatcccttttcgtcgtaaataaactccaattctttaaagactttaagcatgaatgttaatatttctggcttaatatttaagtactcacaaagcagcataccttctttaattaagtcagtttcttttttgtttattaaagctttgtaacactttttaaaaagcgacttgctagggataccttcaaaatatattgacttttcatgctgcagaactaaatatagttgagaaatttgtgaatgttctaaggtttgttcaatttca

SEQ ID NO: 3537 - DNA, 3171 bp, Artificial Sequence
  Description of Artificial Sequence: synthetic nucleic acid sequence
taacttcgggaaaccggagctaataccggataatatattgaaccgcatggttcaatagtgaaagacggttttgctgtcacttatagatggatccgcgccgcattagctagttggtaaggtaacggcttaccaaggcaacgatgcgtagccgacctgagagggtgatcggccacactggaactgagacacggtccagactcctacgggaggcagcagtagggaatcttccgcaatgggcgaaagcctgacggagcaacgccgcgtgagtgatgaaggtcttcggatcgtaaaactctgttattagggaagaacaaatgtgtaagtaactatgcacgtcttgacggtacctaatcagaaagccacggctaactacgtgccagcagccgcggtaatacgtaggtggcaagcgttatccggaattattgggcgtaaagcgcgcgtaggcggttttttaagtctgatgtgaaagcccacggctcaaccgtggagggtcattggaaactggaaaacttgagtgcagaagaggaaagtggaattccatgtgtagcggtgaaatgcgcagagatatggaggaacaccagtggcgaaggcgactttctggtctgtaactgacgctgatgtgcgaaagcgtggggatcaaacaggattagataccctggtagtccacgccgtaaacgatgagtgctaagtgttagggggtttccgccccttagtgctgcagctaacgcattaagcactccgcctggggagtacgaccgcaaggttgaaactcaaaggaattgacggggacccgcacaagcggtggagcatgtggtttaattcgaagcaacgcgaagaaccttaccaaatcttgacatcctctgacccctctagagatagagttttccccttcgggggacagagtgacaggtggtgcatggttgtcgtcagctcgtgtcgtgagatgttgggttaagtcccgcaacgagcgcaacccttaagcttagttgccatcattaagttgggcactctaagttgactgccggtgacaaaccggaggaaggtggggatgacgtcaaatcatcatgccccttatgatttgggctacacacgtgctacaatggacaatacaaagggcagcgaaactgcgaggtcaagcaaatcccataaagttgttctcagttcggattgtagtctgcaactcgactatatgaagctggaatcgctagtaatcgtagatcagcatgctacggtgaatacgttcccgggtcttgtacacaccgcccgtcacaccacgagagtttgtaacacccgaagccggtggagtaaccatttggagctagccgtcgaaggtgggacaaatgattggggtgaagtcgtaacaaggtagccgtatcggaaggtgcggctggatcacctcctttctaaggatatattcggaacatcttctacgaagatgagggaataacgtgacatattgtattcagttttgaatgtttattaacattcatttgtacattgaaaactagataagcaagtaagattttaccaagcaaaaccgagtgaatagagttttaaataagcttgaattcataaataatcgctagtgttcgaaagaacactcacaagattaataactagttttagctatttattttgaataacaattcaaaatatggtggaaacatagattaagttattaagggcgcacggtggatgccttggcactagaagccgatgaaggacgttactaacgacgatatgctttgggtagctgtaagtaagcgttgatccagagatttccgaatgggggaacccagcatgagttatgtcatgttatcgacatgtgaatttatagcatgtcagaaggcagacccggagaactgaaacatcttagtacccggaggaagagaaagaaaaatcgattccctgagtagcggcgagcgaaacgggaagagcccaaaccaacaagcttgcttgttggggttgtaggacactctatacggagttacaaaagaacatgttagacgaatcatctggaaagatgaatcaaagaaggtaataatcctgtagtcgaaaacatattctctcttgagtggatcctgagtacgacggagcacgtgaaattccgtcggaatctgggaggaccatctcctaaggctaaatactctctagtgaccgatagtgaaccagtaccgtgagggaaaggtgaaaagtaccccggaaggggagtgaaagagaacttgaaaccgtgtgcttacaagtagtcagagcccgttaatgggtgatggcgtgccttttgtagaatgaaccggcgagttacgatctgatgcaaggttaagcagcaaatgtggagccgcagcgaaagcgagtctgaatagggcgttgagtatttggtcgtagacccgaaaccaggtgatctacccttggtcaggttgaagttcaggtaacactgaatggaggaccgaaccgacttacgttgaaaagtgagcggatgaactgagggtagcggagaaattccaatcgaacttggagatagctggttctctccgaaatagctttagggctagcctcaagtgatgattattggaggtagagcactgtttggacgaggggcccctctcgggttaccgaattcagacaaactccgaatgccaattaatttaacttgggagtcagaacatgggtgataaggtccgtgttcgaaagggaaacagcccagaccaccagctaaggtcccaaaatatatgttaagtggaaaaggatgtggcgttgcccagacaactaggatgttggcttagaagcagccatcatttaaagagtgcgtaatagctcactagtcgagtgacactgcgccgaaaatgtaccggggctaaacatattaccgaagctgtggattgtcctttggacaatggtaggagagcgttctaagggtgtcgaagcatgatcgcaaggacatgtggagcgcttagaagtgagaatgccggtgtgagtagcgaaagacgggtgagaatcccgtccaccgattgactaaggtttccagaggaaggctcgtccgctctgggttagtcgggtcctaagctgaggccgacaggcgtaggcgatggataacaggttgatattcctgtaccacctagtatcgttttaatcgatggggggacgcagtaggataggcgaagcgtgctgttcttt

SEQ ID NO: 3538 - DNA, 4106 bp, Artificial Sequence
  Description of Artificial Sequence: synthetic nucleic acid sequence
aattcaatttgctaattcgtcaaaagttcaaacaggagatagtgtttttgcaatgggtaatcctctaggattagaatttgcaaattctgttacatcaggaattatttcagctagcgaacgtacaattgacgccaatacttctgctggtaatactaaagttaatgttttacagacagacgctgcaataaatcccggtaattcgggtggtgcattagtggatattaacggaaatctcgttggtatcaattccatgaaaattgcggcagcacaagtagaaggtataggttttgctatacctagtaatgaagttagagtgaccatcgaacaactcgttaaacatggtaaaatcgaacgcccttcaatcggtataggtcttataaatttaagtgatattcctgaaaactatcgtaaagaactacatactcataaagacaaaggcgtttatgtagctaaagtagacagtgaaaatgccattaaaaagggtgatattattactggaatagatggtaaacaaataaaagatgatacagatttaagaacttatttatacgagagcaaaaaaccaggtgaaacggttactctaaaagttatcagagatggtaagacacaagacattaatgtaaaattaaaaaaacaagcatctgcatctgaatcatctcaatcacaaagtcaatttgctcaataaaaaattttcatattacgtttattgattttaatatattatagttgatcgattttaagtaaaaactctgagtatacttcatagtaagagatactcagagttttacttttatagttattcctttttaaataaatcttttaatttttataatatatagaaaacattgtgaaatgattcaatcaaattttttcatttatgattggtaattaaccatgaaatattttttctttcctcgtcgaattattgtaatttcatcttcaataaggtctttactacttaactcataatcgactgattgttgacgttcaccattaatatatattgcaccgttgtttacatcttcacgtgcttggcgtttagatgaagcaatacctgtttcaataagtgcttcaactatatttgtcgtttttgtagatagcgttacttgaggtacgtctttaaacccttctttaagttctttagcagataatgattttaaatctccactaaacagtgcttttgaaatacgtatagcgtcttttaaagctgcttcaccatgaataaatttcgtaacattttccgctagtgctttctgtgcttcacgtaagtgaggcgcttcattttttgattgttctaatcgattaatttcttctttttctaaaaaagtaaaatattttaagaatttaattacatcttcgtcagattgattaatccaaaattgataaaattcatatggacttgtcttttcaggatctaaccacacagctccagactctgatttaccaaatttcttcccatctgatttagttactaatgggattgttaggccatatgcctcagtttgtccatacattcgtcgcattaattcaataccacttgtaatattaccccattgatcagatccgcctacttgaattttacaatttaactcacgatttaaatagccaaaatcaatagcttgtaaaatagtataagtaaattctgtataagagataccatgttctaaacgtgtttgaatagaatcttttcctagcatatagttaacgccaacatgtttaccataatctctaagaaaactaatcaacgaaatttgaccaagccaatctttattattaactaattttgcccctttatcactgccaaattcaaataatcgatgcatttgattagacaggcctttgacgttagcttcaacttgtgattctgtttgtaacacgcgctcttcagactttccagaaggatctcctatcataccagtacctccaccaattaagacgataggacgatgcccatgttcttggaagcgtcttaatgttaaaaaaggtaacaagtgaccaatatgtaaactatcagctgtaggatctgcgccgcaatataaagtgacctgttccttatttaataattcttcgataccctcttcatctgtttgttgataaattaaccctctccattttaaatcttctattaaagcattagccattgataaaatcctcctaaattattttataaatttaaaaaagttaaagatatttaataaatatagtgatataagtgatttattcaaacatattaaaaagcgcccctacaaaatgtaagggcgcttgtgcacggtaccaccatacttagatagagttcgttactcataaatatctctattaatgatacgctcattaataaaacgttgaataataaaaatagcaaggtgtattcaccaataagaaactactagttcacagccaccactagttctctttaagctttctcaaaagttacttgtcctttatattcaaaacatattgaattgaatattattatagttaacattattttaaaagtcaactttcaagatatggtatactatatctaactttaggaggtatctaatgcatttcaacaagtatcaaatactaactatacacaatatgcatcctgatttagtgaaaattttgggtcgattaaattatcgaactagttatggtcagaatgtacttaaacattcaattgaagttgcccacctttcaggtatgcttgcagcagaattaggagaggatgttactttagctaaacgtgctggattattacatgatgttggtaaagccattgatcatgaagttgaaggtagtcacgtagaaataggtgttgaattagctaagaaatataatgaaaataacataattattaatgctattcactcacatcatggtgatgttgaaccaacctctatcatttctattttagttgcagcagctgatgcattatcagcagcgcgaccaggtgcacgtaaagagacacttgaaaattatattagaagacttgagagactcgaaacgttatctgaaagttatgatggggtagaaaaagcatttgctatacaagctggtagagagattcgtgtagtcgtctcacctgaagaaattgatgatttaaaatcatatagattggcaagagatattaagaaccaaattgaagaagagttacaatatcctggacatatcaaagtgacagttgttcgagagactagagcaatagaatatgctaaataattccataagccactgaccgtatttacggccagtggcttattaaatataatataaaaaaccgagcgtataaacgctcggatataatgatttattttaattgtaaatcaacttcatttatttcttttaaaatttcagctgtatcatagcaatttgtagcgatatttgcatatttctctgctaaacgataagcattaatgtataaaattaaactttctttagcgatatcttcagcgtcatcagatttggctggatttgaagttacaactaattcagcaaatttttcaggatcaatattaatagacatgaatgaataaacaactcctatatttttattagtttcatattaacacaatacttaaatacaaaaaagtaaagtcttttaattttcagaataattaatttgttaatgagacttttattatagtacggtatccattaaacttaatttatgagaggatgaacagagaatgagaatattgtttataggtgacatcgttggtaaagtgggcaggaaaatgattactacttatttacctaaaattaaacaaacttatcacccaacagtttctatagtaaacgctgaaaatgccgcacacggtaaaggattaacagaaaaaatttacaaacaacttttgagagaaggcgtggatttcatgactatgggtaatcatacatatggtcaaagagaaatttacgattttattgatgatgctcatcgaatggtgagacctgcaaattttcctgatgaagctccaggaacaggtatgagaataataaaaattaacgatattaaattggctattattaatttacaaggccgttcatttatgcaagacattgatgatccatttaaaaaggctgaccagctaatcgaagaagctcaaaaatctacaccatatata

SEQ ID NO: 3539 - DNA, 3235 bp, Artificial Sequence
  Description of Artificial Sequence: synthetic nucleic acid sequence
acggagattggggcttttctattttagataaggaaggcaacctcgaaggttcttatattgtgacatctgatggtgaagttacaaaatacgatgaaaacggggaagaaatagagtaaaagtatattcaactgtcgaaattaaaaatttagaaaaagaaaattgatttcccaggaaattgacaacgttagcatattaaaagctagcgttgttttttatatacttaacattaattcttctttgtatttttcaatttttattttctaagcacttcaattttgcttgatggatggtctggaaaatattcaaacacatatggattgagcaaagatttttagttttatgacttttaaagttcaatgccaatgatacaattggaataaagcaaaatttttaataaagtaataaatgaagaggggataagttattcaaatgaatcattttggtaagcttcatcgtatatcattaatattaaatattatgtttttaatactcatgcctaaaatctatagttttgataatatttatttatcaataatttggactttgttaggaatagcaaatgctgtctacttgttgattaagcaaagacgagaaaacaccattaaacgtaaatgaaggaaaaagaactcatttattatgatgtgcattccagaagttggactaaaatctatctttgtggggtgttttttatgattgaatatgataaattttattttaaaattaaagtttttcaagaatatttaaatggttaaaaaaagtaagaataaaaaatatcaaaggcttgccccctaaaaaattgtagaagacaagcctttaaaatattacactaaataatacttcttgtggttcagtataaatttttagtgttctttctttttgtctaaatcttttttgatttcatcgggtgatttagattcattagccggtttaagtaatttaaatattttaacgtctgctataagtctgcctccaaattgataattgttttcaggtgatgcaaatgcaacaaaatcatcttttttattgttattgatatagccttcaataacagcgtcacccattggtccctgttttaaacttgtgaaatggacagatttgatgatattaggttctttagtgttgtatttaagataaagcgtgatacgttcttgttgctctttgtagtagatttctttctgtttttctttttcgttatatttcattttgagataaaagcccccaaaaatgattaatatgacactaataaagatcaagattttcttttttgacatagatatagttcaacaactccttatataaggtgaatgagtatggatagcatacagaataaagattttacatataaaaaacttgcagatgaagcatataaaattagttctaaactatcatgaatcaaagtatctaaatatcacgttcaatatactaaatgcttgtaattaaaataagccgaggtacattcattaactgtactttggctcaacttatgttatatgcactttatattcaacttcacttctttttcttatcaaaatacggtacaacaaatattacaaataaagcacatccaatagctaacaaagaacctaaattttccaattcattcactccttattttgtgtacaatatcaacactactatttttcagaaacacgcttaattaatattattgcgtcatcaagtaacatactgataccgaaaaagaaaaattcattgactatcgcaatcacactccctaaagataacattgtagaaaataaatgacgatgtgatttttgcatttacgacactccctccgatactcataagatgattgttgacttaaagatttttaaaatctatttatataaagtgagtatttgtaaaactttgctatttaatatattacatttctaatttaaaattatattgaataaaacaatattaaaaaagtaattttatggaaagaggaaataatgaaatgaaagaatttaaagtaatcatagttattttatctttaattccatttgaatttttaggaatttttacggactatcaaacaggtttattactaggttattttccatttgtaattatatcgatactaataagcttttcaatttttaaatcaggggttaaaggcaatattagtgttgccttagcaaggttagtggggatattggtgtcttgaatatgtgtccatttattcatggatgttgataagacttccggttattttaaaccttttaccacagatgttttttcaattattttagccggcattcatattatagtcattacgctaatttgtttagttatgtatagcttttcttatcgcaataagtaagttaagaaaaattaagatttcctagatgatgtgataaaaaaatgaaatagaattagcattgaattgttgttcaatcctattcttcgaacacaactgactttatttacggaatttttgtgtggaatggtctttgcttggacctcgactactgttgaatcaaattttaaataagaatttttaattttgtcaccaactgactatatgttaagaatcctttagacatttatttgtgctatagtcctttctttatatatttattgatataactttattgatttaatagttgtcttttctggaaggaagttatatttaatattgattgtaagtccgacgggttttttattaatatctaaacgataataaccaataggcccactaccttggttatctgtcgcattttcgaaatcggctttctttatagtttttaaaaactgatatgtctgcttatctttagcaatcttatgaagttgctttgtgtcatgatgttgtatggattgatttaattggtgttcacttgagtgaatcacccacatgtcgaagaagaaaaagttaataacaacataactacaggcttggataaagagaataacaactataaaaatcaatcttttcattgatatgcaccttatttttaatgaaatatttgcttcttatatttaatttatcataatattgttcagtttaacttaaaattcacgatgttcaatatatattcatcattctatattttgtataaaaagcaaggactatatttaacagtttgctcatttacttttcggcccactatatgtttaagtaatcagtctaaaacttatttttatgtcacttttgtaaattgctcgagatttactactacttaatattaaacaacctccctctgactcaacaggggaggttcatttattgtttatt

SEQ ID NO: 3540 - DNA, 4010 bp, Artificial Sequence
  Description of Artificial Sequence: synthetic nucleic acid sequence
ctttgatgataattacaaatgagataatcatctttagtttgatttttatatatttgctttttagcattttgatagttctctaacgtttcatggtaatccaaatgtgcagaataaatattagtaatgatagcgatatgtggtttatattcttcaatgcctaataattgaaaagatgataattctgttattaaatactcatctgatttaacttcttgtgcaacttttgaggctacataaccaatattcccagaaagtcgtccagtcaacacgcttttttggaaaatatcaccgattagtgaagtgacagtagttttaccgttagttccagtaactgctatgattggtgcctcagaaattaaatagctaagttcaacctctgttaagattttaagccctctatttgctgcttctttaataattgatacagtatatggaatacctgggtttttcacaatgataggatcatcatctaataaagaaaaaggatgactaccgctaattacctcaatgcccatagattctaaatctttagcatgtgcatcctgtgaaagatcctttccatcattgactttaacgttagcccctaatttaaggagaagtttcgccgcttcatatccactttttgctaagcctactactaaaacatttttattttctaattcagtgtaatttagcaatttaatgcactccaatccataaacctattaatcccgtaattaaacctaccgtccaaaatactgttactactttccattcaccccaaccacttaattcgaagtggtgatgtataggactcatcttgaaaatacgtttcttcgttaatttatatgaggctacttgtaacattacagataatgtctcaactacaaacacaaaaccaattaatattaatgataattcttgattcaacatgattgaaatcgttgcaaaaataccacctagagcaagacttcctgtgtctcccatgaaaactttcgctggatttaaattgtaaggtaagaaacctagtaaagcgaaaatcattataatacaaaatatgccaatagccggtgaatctaacatgtaactcattacagcatacattgcaaaacctattattgacaaaccagttgccaatccatctaaaccatcagttaagtttacagcatttgagaaaccaacttgccaaaagacgataaatatcacataagcaaatgacaacggaatatcaaaattcacaaatggaatatgcaaatctgtcgtaaaatgcacaaggtgaaatacatcacttagcacaaagaatataactgcaataattatttgtgctagaaacttttgtttactagttaatccttggttattctttttaactacaataatatagtcatcaataaatccaataagaccaaaaccgattgttacaaatagtaacaaaataattggatttgaatggtctacaaagataattgcaatgatagaggtaattataatactaattaaaaatgtaagcccacccatagtaggagtacctgtttttttcatatggctttgaggcccttcctcacggatactttgtccaaacttcatacgtttcaatgttggaataagtatagggactaaaataaatgttatcagtaatgcgatgattgcgtatataaagatcatataaatctccttttcttcactttctaattttagctctttttatttgtaaataacctttaatattttatcagtttttgttttattttaatatacgacattatctatttattaaataaggttgggaccatttgtgagctaatccctaaaatgttaatcccaacctgttgttgatatcaagttctcttaaattaattatttctctcagaacctgatgtttcatttgtgctgtcatcagaatcatttttcgagtcggcgtttgacttatcattcttagttgacgaagatgtatttgaatgatcctcatcagctttatctttctttgatttgttatccgaagagtcctcatcagttttctcttggtcatcatccgtatcttcagcagataatgacacttctatcttatctttatttttaatgatttgaccttttgagatactttgattcgtgacaaatccattacctttagtagaaactttaagtttcgttaaatcttcaaaagcaagtacatcttcctttgtccatccggtcatatccggcattgttaattccccgtctgtcattaacattactttactgtgtggtaggactttggtacctgacttaactgattgttgtttaatctgtttgccattaccaatcgtaataggtttaagagattgagcattgacgctatcctctgctttttgaacttcatctccttgcacgttaggcactttactatagtcagtttttgatgaagtatcactagattttccaacatttaaatatttcagcgtattctccataattggtttaaatgctttgctcacacccatttcatatgcttcttgatcatttttttgagcaagactcatacctgcatagacaatgactttaggatttttcttaggtgcatcccccatgaagcttacaaagtaaggattttcacctttaacataaccgcctccatttgaatcagctacttgtgctgttcctgtcttaccttcaatatcataaccttttacgcgataattcatagcatgactcttcttactatttactactttatcaagttcttcttcaactttattggctgtttcttccgttactggtttaccgacaaactcttttttaccagagtaataattctttttagttattggattatcaatactacttacaaaccatggtttaagcatatttcctttattaaagaaagccgattgtgcttgaatcatttgagcaggggtaacagttgtggattgaccaaatgctgacgttttttgttgtaattcatttgcccaaccaatattacctgcagcttctccatcaaacataccacccgtttttttgccaaatccaaagcgttcataccaagatttcattttatcggcaccaaccaaatcttgtaagtgcatcatcaacgtatttgatgaataagtaaaacctaacgacataggtatacgtccccaaccagttttattccaatcggaaatttcagagcccataatatttctatgacctgatttatacttttcatccggtttgaatttaccttcttgaattgctgcagctaagccgtatgttttaaaagtagagcccggttcatatgtattttgatataaatcgttcgcccactttttgccaaaatctttacctgtttcaggattaaaagttggacgttggctatatgcaagtatttcaccagtttttgcgtccattactactgcaaataaatcttttggagcataccgttcaaccatgtcatcaagagcttcttccacaaagacttgtatattagaatcaattgttaagtgtacatcatctccacgtttaggttgctgctctttcttcgtattaggtgcgatgtagccccatatatcatgtatatatttaagtgcacctcttgatccatttaaataactattaaatattttttcaacacctaatgcaccatttaattcaccagtatcaggatctttctgtgccatccctattaaatgggaggcaaaattaccattaggataaaatcgctcagtttctgggtaaagtgctataccaggtaatttcattttctctattttttctttttcttgataagttaaattagtacctttctgaccaaattcgatttgaaaggctttcttattattaagtcgtttttctatttcgtcagcgtccatatctatgatttcagctaatttttttgctgtcttttttttatcaaccacgtgtcgcggctttttactttctttacttgcttttttatccacaactgcaacaagtttatatctttctacatcttctgctaaaactttaccattacgatcgtaaatcttacctcgttctggttgttgagaatttttgactaagtatttctcattggc

SEQ ID NO: 3541 - DNA, 3348 bp, Artificial Sequence
  Description of Artificial Sequence: synthetic nucleic acid sequence
gccatttcttgagccatttcaaagttcataacgtctcctgcatagtttttaataacaagtagaacgccgtcaccattgtccacagctttaatggcatctaatattttatcaggtgtaggtgaagtgaagatttctccacatacagctgcatcgagcatgccttctgctacaaatcctgcgtgtgcaggttcatgtccactgccgcccccagaaacgagtgcaacacctgattgttttttatgctttctaacaacaatagtgtcagatacaacttcaacatcgttgtttgaaactgtaattccatcaagcatatcttttaaaattgtgtttttatcttgaattaactttttcattcaaagcgactccttttagttgaactgacttttagataaatcattaacagttaaaattgcgtctgcgatttcatcagcagtgattttatcacttaagttagcaaacgtatcatttggtgttaatgcacgttcacctacttgaactaattcttcataacttgtgttttcaatgtgaagaccttctaatgttgttggcatattgatattatcgaagaatgttttgtatttcatgaatttttcagttggcgcattttcaagtactaattgtactaaaataccgtatgccactttttcaccatgagttaagtggtggatatccccttctaaagctgtgaatccattatgaattgcgtgtgcacctgctaatccgccgttttcaaatcctaaacctgaaagtaatgtattggcttcaatcacagcatctacttgtggtgtcacgatatgtttttctacagaagtataagcactgtaaccatattcaaaaataacctcttcacatttttgagcgattgctaaacttgctaatgtaggtttgccatggaacatgttttgcccttgtctacgaagtgtagattcaacttcgattaatgttgctaaaccatcactcatacctgatgcaaataaacgtacaggtgcttgtgcaacaatttcagaatctacgataactgtatcagggtttttagggtagaattcataaccactaaatgatccatcttcgttataaataacagatactgctgctgttggtgcatccattgatgctgtagacgcaaaatcgatgacgcttgctttaagttcaaatgctacagctttacctgtatctaacgctttacctccgcctaaaccaataacaacgtcaatgtttttttctttatattgtttaactatacgttgaatttcttcttcagaagattctcctttaaatacttcatattcaaaatcaacgttgttatttgctgagaaactttcttttattttttcttcagtgatattccaaaccacttcatctgcaataatcaacgcgtgactaccaagacgttctgtttcttcagcgatagagctaacaatacctttcccttgtacatatcttcctggtgattgataaataaatttagacataagtattcctccaaaacatcttttatatttatattaaaaaataagatttaaaatgaaataatgtaatctcattcccctaatcttaatttttaataagcatggatcatactgtctctcatctctcaattcctagtatacgctttcaaaaaaatttttaaaggattatccatcgaaaatttaatagaatttgattaaattgttgttaattcttttgaaaaatcattaaaacagcgcatggttagtgcattatgacaatttatttaaaactatatttacatttattgaaaatatttttaattataatttaactgtcgatttcaaaccctaaatcttcaatcatgcgataatcttcctcattcggttgaccgcctgtaattaagtaatctcctacaaaaattgaattagccgctttcaatgcgagtggttgtaatgaacgtagatttacctcccgtccacctgcaattcgaatttcttttgttggattgattaacctaaacatcgctataattcttaaacatttcattggtgacaataaatctaatccaccaaatttagttcctttaataggatgtaaaaaattaataggaatgctatcagcatcgatggctcttaaagcaaatgccatatcaataatgtcctcattcgactctcccataccacatatcacacctgaacaaggagaaatattattatctttcatcatttcaaccgtattcactctatcctcatatgtatgtgtagttactacttcatcgtgataacgctcactcgtatttaaattatgattataacgatcgacaccagcagcctttaattttttagcctgttcttctttcgttaatcctaagcacgcacaaatctttagttgtgggtgtatctttttaatatcttctactgtttcgcaaatatgatcgacttctctgttactaggacctctaccactcataacaatacagtatgtaccgatttgattttcagttgccacttgagcgccttctttaatttggtcctgttcaacaagtgcataacgttgcttttctttcatttttacagattgcccacagtacccacaatcttctgcacagataccacttttagcatttaatatcatattaagcttaacttttttaccatagtaatgttttctcactgtgtaggcttcatttaataaatcaaatgtatcaatttcagcattttcgaaaatagatattgcttcatcttttgttaatgactcttgatttaacacacgttgagctaggtttaatgtcataatctttaactcctttttcttaaaaattagcattttcaaatcattcgattgcacattgtaaacttttcgatattataagtttacattaatctagatacgattgaaaatatttataaaaaaaaggatggaacaacgcgtacattgtttcatcctcgcaatggtataacacggaattaaagtactccatgtaaatataactttattaattattaaagtgtctgcacacaatacaataattatgtgtaaaactttcttttactaatagaaatttagtatttaatgtcaggaattattttacttcacccgttttaggattaaattgtttaattgatgactttcgtagttcatccttttcattcttacttatttcgtattgattatgataaagtgtcgattcccaacttccatacattggatttgggaaaataatatactttttgccaaaatcttttgcatgcttctgtacgagtttctcacgttctttagcagtagattttttaggatctgtaaaatctaacaaattgtcaccaaataacatcactaacttatgatttttttcgacttgttgacgtcgcgatgctttacttttatcgtttttccctttta

SEQ ID NO: 3542 - DNA, 3039 bp, Artificial Sequence
  Description of Artificial Sequence: synthetic nucleic acid sequence
ttgcatatgtccttatttaaagattttttcattgcgttatctaatcatacatatcttaataaaatagctaaaaagatgggacctcaaatgggagcaaatcgtgtagtcgcaggaaatacgattcatcaattaattgagactatacaatatttaaatgattataatatttcagttactgtcgactcattgggtgaatttgttaatactagagaagaaagcattaaagctaaagaagagattttagaaattatcgatgcaatatatagcaataatgttaaggcacatatgtcagtcaagataagtcaacttggaagtgagtttgatttaaatcttgcttatgaaaacatgagagaaattttacttaaagctgataagaatgggaagatgcatattaatattgatacagagaagtacgatagtctttctaaaattcaacatataattgatagattgaaaggtgaatttaaaaatgtgggtacagtcgttcaagcttatctgtatgaagccgatgatataattgataaatatcctgaattacgtttgagacttgtgaaaggtgcttataaggaagatgcgtcaatcgcttttcaatcaaaagaagaaattgacgcaaattatattagaattattaaaaaacgactactaaattcaaagaactttacatcggtggctacacatgacaatgaaataatcaaccaagtcaaacaatttatgaaggaaaatcatgtcagcaaagataaaatggaatttcaaatgttgtacggtttccgcacggaattagcacaaaaaatagctaatgaaggttatttttttacagtttatgtaccatacggtaatgattggtttgcgtactttatgagaagactagcagaacggcctcaaaacttgtcattagctataaaagaatttactaaacccaaaatcttaaaaaaggtaaccttgggtataggtatatttgcaactttattgacgtctcttattcttggcattaaaagacataaaaaataaagaggctgggacataattccctagcataatagccagtaaatgagttttcacgacatgtaaatgatattgtagaaacaattcccgatactgaattcgatgaattcagacatcatcgtggcttaatataagaaaagtaacagctcaacgagctgaaaataatcaaaaaaattataaaaaagacaatttctatattatttcaatagaaattgtctttttttacttatcttgaacctttttgtcccagcttctttattttttaattgatttgcttaattagattagccatttcgattgcactaactgctgcttctgaacctttatttccagctttagtaccagctctttcaactgcttgttcaatactttcagttgttagaactccaaaaatcaccggagtatctgaaatgtcgtttgctttagaaacacctttagctacttcattacatacatagtcataatgtgaagttgcgcctctaatcacacatcctaatgtaatcacagcatcatattcacctttttgagctaatttttttgcaacgagtggaatttcgaatgcgccaggcacataagctacatcaatatttgtatcttctacttcatgacgaataagtgtatctttagccccttcaagtagacgtgtagtaataaaatcattaaatctactaacaacaatcgcaatttttaaatccttaccaactaatttaccttcaaaattcattttcgagccctcctatattaaatgtcccattttattttttttagtttccatataactatggttatattgtgtttctggaacgataagttcaattctatctacgatctcaatgccgtaatcttctaaaccttcaaattttttaggattattgctgagcaagttaatttcacttatatcaaaatactttaatatttcagctgcaacatgataatctctcaaatcctcatcaaaaccaagagcaagatttgcagtaactgtatcataacctttttctatcaactcatatgcgcgcaacttattaattaaccctattcctctaccttcttgaggtaaataaataatcattccaccatgttcgtcaatatatttcattgacgcttcaagttgtgccccgcaatcacatctttgactatgaaaaatatccccagtcagacaagcagaatgcatacgtacattaggattgctttttaaatctcctttaacaatagctacgatttcttcatcgctataatccgttgtaaatccatacatatcaaaatgaccaaaatcagttggcatcttgacctttgccttaagattaacattaagttcaacagccttacgaaaagcaaccaaactttttatagtaatcatttttaaatggtggcgttctttaaatgactggagatcttcacccttagccattgtcccatcatcattcataatttcgcagattactccagctggttgtgctcctgttaaccgtgccaaatctacggcagcttcagtatgaccattacgtgttaacacaccattctcttttgctataagtggaaataagtgccccggacgatgaaaatcttcaggattagtattttcatctatgagtgctctagccgtttgtgtacgttcatgtgcactgattcctgtagtagttttataatgatcaatgcttacagtaaaatgtgtgccataaatatcagtgttattttgctccatagattgtagttttaatctttcagctatagatttatcaattggtgcacaaatcagaccacgaccctctttagccataaaattaatggtattatcatccatccattccgtaacagctacaagatctccttcattttctctatcttcatcgtcaactacaataatgctctctccatttcttaaagcctctatagccaactcaattgtatcgaattgcatgtgatattcctcctaaaaaccaaatgctctaagcttttcttctgttaactgcgattgattttgattcatgatgttttcaacatatttgaatagtacgtcagactccaagtgcactttgt

SEQ ID NO: 3543 - DNA, 3666 bp, Artificial Sequence
  Description of Artificial Sequence: synthetic nucleic acid sequence
aaaagttgcacgactaatctgtgatgtatttaaaacagatggtacaccatttgaaggtgatccacgagctaacttgaagcgtgtattaagaagaatggaagatatgggctttactgattttaatctagggcctgaaccagaatttttcttatttaaattagacgaaaaaggcgaacctacattagaattaaacgatgatggtggttatttcgatttagctcctacagatttaggtgaaaattgtcgccgtgacatcgttttagaattagaagatatgggctttgacattgaagcaagccaccatgaagtagcgccaggtcaacatgaaattgactttaaatatgcagatgccgttacagcatgtgataatatccaaacatttaaactagttgttaaaacaattgcacgtaagcataatttacatgcaacatttatgccaaaaccattatttggtgtaaacggtagtggtatgcacttcaacgtatcactatttaaaggaaaagagaatgcgttctttgatcctgaaggtgatttacaattgactgatactgcatatcaatttacagctggtgtccttaaaaacgctagaggattcactgcagtatgtaatccaattgtcaactcatataaacgtcttgtaccaggttacgaagcaccatgttatattgcatggagtggtaaaaaccgttcacctttagtacgtgttccaacatctagaggtctatcaactcgtattgaagtacgctcagttgaccctgcagctaacccgtacatggcattagcagcaatcttagaagcagggttagatggaattgagaataaacttgaggttccagaacctgtaaaccaaaatatctacgaaatgaatcgtgaagaacgagaagcggttggtatccaagacttaccttcaactttatacactgcgttaaaagcaatgcgtgaaaataaatcaattaaaaacgcattaggtaatcatatttacaatcaatttattaactcaaaatcgattgaatgggattactatagaactcaagtatccgaatgggaaagagaacagtatattaagcaatactaagcgctaaacaatttcaggggaaacctaataggggtaaggagttaaggcattttgccttagcttctttttttacagctatattttgttaatcattttataatgagtaaagtatttggtcgaatgcattaaaatgtaatcttaatgtactttttatcgacaaaacttaaataaatcaacaagccatcaatgattcaatttagtgaaatgtactgaagaaatcttgtgatgaggcaaacaaagcacttaaactttataatttgtctatgaaagtatctagagaaaagctattaaagcagcaattagatttgatagtcaaagactccgctttagacattcatgatgaaatagaaaataagttggttgatagagaagttgaaagacaagcacatatacttggtgaacatgtgaaaattgatgacactgaagtaaaagcggttgttaacagtaactttaaaggtgtgaactggtctacaagattatgtcaagatatggctgtagttcaaaaagaagtagaaaaaacaacgagtaatgtattacttagagggagacatcctaatgagtacgtagctaagtttaaaaagcaaacaaataccacaacatataatgcaagtagattgttagttactgaatcagcatgtgtgcaggctgaatcacagaagttaacttatcttaaagatttaggtgaagatggcgaatataaatacgtggccaaaatcgacaagaaaacatctaaaatatgtcactctttaaatggcaaagtatttaaagttaaagatatgatgcctggagttaatgctccacctatgcacccttggtgtagaagtactacagtaacacatgtgggcaattggcgagatagattctttactgagcgtaaaggtaagtatcagacagagaataaagaatcataaaaagaaaaaaatacaagaaaaagcaaaaaagaaattcctgatgtgatacgtagtggtaaaataaaattagatataaatcctgaaaaacaaaatagacattccttaaatcatagtttatatttgaaaaataaaaattttgcattaaaaaataatgaaagattaccaagttatactacgttatctatcaatgaattaaatagattagtacaacagtactcaacttctggtaaaatcttaataaataaaaacggttttaaccataaaaaagtaataaattttgagaggattataggaaaagcatttatagatggaaaatatattgagactacatttggtaaagtgcattattcaaaaacagactctcatataataccttttataagtaaggagaaataaaatgttaattaaagatgcttatcgtaaaaatgttattgtcacacttaaaaataatgaaaagtttaaaggttttgtgtttgattatgaaaacccattagaaagtgatactggaaactattccctggatttagagacagatttaggaatatattcaattgatgaatcggaaataaaaagtataaaattaatatcttagtagcatcctttctgcatagataaatagaaagtggtgctatttttataagcttttttaaccttctacggaaggttattttttatgtccaaaacgtgctgatgacgttataaaagcaagtatggaatacgcagtcgacagactataaacggaggtatatctcatggagaacaatcaaagtaatattactgaagaaacgaaacacaatgataatttagaaacaacttatgaacaaacgcaacaaaaagagaaaacattctctcaagaagaagtatctcaaatgattaaggatcgtttagctagaaaaaaaagaaatctgaataacgtatgaaagatgcaattcaagaagctgaaaaactagccaagatgaataaagaccaaaagaatcaatatgagttggaaaagctgttaaaagaaaatgaagaactaaaagcagaaaaagctttatctcaaatgaagaatgagactcgttcaatgcttaatgagtcaggtttagaaaacttcgatgatcaaattgttaatatattagtaaatactgatgctgaaaaaacaaggaaaaatgttgaatcatttactaacttacttaatcaaatggtaaaatcaaatgttgaaaaagcattaagacaagactcaccagtaagcactcaatcaaataaaatgacaaaagatgaagaatcagattatcttgtttcagggagaaaatgtctataaacaaatgtactaaattctcaatttttaacattctactttataaaaattaaatagaaaattgagtttaacctactaggtggagaattttctctatatcgatgacattttaaaagattgaaagtaattgtaactataaaattttataataactgaatttacagtctataaagattatatttatacgaatatattaaaggtttgctttcaactaagaaaacaaacctttaatgttaaaactctttcttaatgattacctatctaaatgattcattgcatattgtgcttcttcaggagtaaatccttctccattttctgaaacgagttgatcatataacgcttgattagaaatgtttatattttttacgtaactttttgctaat

SEQ ID NO: 3544 - DNA, 4216 bp, Artificial Sequence
  Description of Artificial Sequence: synthetic nucleic acid sequence
atatccagataatgctttatattgtttgtaaaattctagtaatttaattaatttctgctcattcaaaatctgcacctccaaatataagtagacaacgcatatatcattatcttaaatatttggataattgtctttgacatttgtttttaaacaattgtcaaaattacgaataaacacaatttaagttgtgctacgccttttatttattttatcttttttatatatttcaactacatatactgcattatatttcattctgattttcaatgggccctttttaaagtcatgttccataatgtgcatgtatggtctaaagttctcctcaactctcatcaagaacggtgtagaccaaacatatttgtgacgtaagttttgagaaatcatatgattaatattgccaccttcatcatcaactttagcaatcacacaaatatattcatctattaacgcttcatcttcaaagttaatccatatatcaacgtctttaaagtcgctctcattagattcactttcaatcacacgccaatcatataagtagagataatattgatcagcattttcaataatattatagaatcgttgttcaatttggttttgattagtcatccaactcaaatgattaaaaatcagtccaaacgttgttttaaacccattctcatcaaataaatgtacagcgttaaagactttaggatttgaaaatacatttaatccgtagcctttaaaatgtttttttagttttgaaatcgttttaaatagtaatggagcgctattacttaaatcaatttcattattattcagtaattgatgattatataaatttagaaaaattaaattttcactactaaaatcaaactgctttaaatcatctattaaatgcttaaattgtagaatatttttgagtaataaaccttcctcattatcaagtaaatagggtgactttaatctagcattatcaatataaagatagtcaaattttaaacgctttatttgcgaagctaatgatttaaattgtgcagtgtcattaaacatgcaactaatatctaaacctattttatattccaattcgatgttttgtatcttcaagatattacgataaatttctcgaatacttttttcgttcaaattaaatataaattgcacattgtaatctgaaacagaacatttattcataatttttaagttttcatattgatatgtaaaaagttgattaagttcatatatttgctcgattttatcgatgctaaatgcgacgtgcaagcgatattcaataataattttaatgatatcattcatctcttcttgagagaacaaattcttatattggcataagttaggcataatacaaaaaataatatttgaaccttcataccctatttttttatgaataccttgcaaaaacaacattttaatttcatcaattgaattaatttgaacgacagaataaaacgttgaaacattagaaattggatattggtcaataacaatttcatcataattatctaactcattcgttggcattttagaacatattaatgattgtacacatgattttaagtgttctgaaacatcatcatcagaacatccattgtacttatcatattttttcattgcacgatatgcattgggcgttacacttaaataatttttgaattgtctagaatatgtagatacattactaaatcctaacgtttcactaatttggcttatcgttttagttgtcgtaagtagcatctctatagatttactaattttaagtgtatctatatattttttaaatcccatacctaataacaaatgaaactgcgtagaaaggttggacttagaaacatataatttattggaaatatcttttagagtaagtctttcttcgatgtgattatatatataattcaattcatcctttaactcaccataataatcatacatatattggtcttcagcaatttttttgtcaataatagcctcattagcaagaatatgaacaattttattgataatatcttgctctttatccacatcattatctaaaaaattcaacgtaagttgagcaactagttctttaatttctttcttagattgtattaaatccgaaatataatggtaattaaaaaaagaatagcctaactctgtaaaccaatcactagaaatatatacttctagtgtgatgccattgtcactgatactaaacacatccatattattcacaatatataactcatctgagagtatcctttctttcataaattgttgaaagtgcatactcccttcgataggccaaaataataaaatgccgtcttgacatcgtgttgccgtatattctttttttgaaagtatatgcaaacaagaatttgccatatctttacctctttccctcagtcttttatgcccatatcaattcatgtaaattttcacaagtatcagaaaataatctaacacaatataaaaataaatcaaaaagaaaaagatatatttaatcatttttttatttttgtacttcatcttttctattagatataaaaaaagatgtgtcgtgttgagagttcaacattaaatgaaaaacccagaaactctctgatagagaaacacgatcacatcttttaattcattcataatctctttagtttttaaagcgatttgctaaactaagtatatcttcgatgatatttaataagttgataaacaaattaaatcccatttctcttggtgagaattgacctcttttcattctattaaaatcgtataaagtataaaggagaaacaataataagctcactattgtaatgacagtatgaaaaattggattattaataaatatccctataatcccagctataattagcgcaattaatgtcacaaacaaatattttcccatactcgaagcgtcttttattaaaaagtaacctataataccaaaagctataaatgcaccaatagcaagaataatatttttatagaatacttctgctcctaaattttgtaagtaagtcgtaaaaagagcatacgaaagcaaacctacaataatagcgtatatatgagagatcactaatccatattttcgcgcacgtttaataaacaacgttgctaatatcagaattaacaatcctagagacaatggttttctccatgacataggaagatattgtccaaaataacaaccaatcccaaaaatcatccaataatacataaaatataaccaaacttttgcataggcatgtgtttggttcttatcttgagattgtcttttatgatcagttgattggtgtgtcgattgtgacattataataactccttttctatattaaataattaggtaataaaaattttacaacactataaagaattacaaaagtatttaagttcataaattctaaagaaatagttcatacagaaggctcctttttgttaaaattatactataaattcaactttgcaacagaaccaaacaaaatatggtattaatatatctaaacaaattgaaaatttaatatcaaaatatttaaatgaagaatatggtaatcttgaataagcaaaaaaggatgatcagaatgaaaaaagcaatatttagtattattatttctcttattttagttctaactgctactggatgtagtaatagttctaaagaaaaaccaattaaaaaaagtgcattagaaattaatcctacaagtaaagctgttaatattacagtaaataaaaaagaaaataacaaacctgaaaaaattgggaaagtgtatcgatataaaaataacaatgcaaaagaaattactaacgacggtattaaaaaagatactaaagatacattgatttggaaaggtgtagcaaacaaatacgataatgtaaaagatttattaggagaaagtattctttatgaagttaaatataaaaatggggatataaaaaaattcgagagaaaaattaaatatactgaataaaattgaaagtagtgatgataatggaaaatattttaagaataatagctgaaatattatctaatatctatgaattcataaattatggtctaaaattcaaccgttcaaaaaagcttgaaaataaatgtgaggggaaagattaatctttcccctcacatttatttaattataactatgtttaaaattcttagctatagtatggttcggacctgttgttgcagtatacatatcataagaaattgttacgcctgtacctttttagctgctgtgtaaaaatagctaccttt

SEQ ID NO: 3545 - DNA, 3209 bp, Artificial Sequence
  Description of Artificial Sequence: synthetic nucleic acid sequence
ttcttcagtagttccgtacaccaaacgcgcttctttttctttatcatatgtgtacttttcttctaatttaagcgttccatataactgaccatcttcaccatataaagcaatatcatcacctatttcaagtttatctgcttcggattctgttacaggtaaagtgataggaatactccaaactaagccattgcttaaatgtgtttcctctataaccttagtgtagtcttccttgttcataaatcctgtaaggggactaaatccgccaatacctatgagctctagatccgatattccccaaggatttaaagtaatcggtttaaaatttaatgcttcctcaatcaaacgttcacgttcgtttccttcaacaacacgattgatgagttctcctccatgaggtttaattgtataattggttattgtttcattgttagacattataatcaaatctccttttccaattaattatatttgtttactcggcttttcttataagaaaaagacaatttcttgtttcgaacgacttgaaaaacaagcaaaataataattgcaagaataataatgaatcgaactgtatttgaaatagtgttatcttttacaaaatagcttaataatgcattactatttgtaaaaataattaaaccaccgacacaaattgcaagaatgttaatgggtaacactttaactaaatacgctgaaataggtgctgctaccattccaccgagacttaaagcaattacagcaaaccaattaatttgagtgactcctaaaaagataatgaaacttaaagcggcagatgacgtaacaaaaaattcacttgctgagactgttccaatcgcatatcgtggttgaatttttttacttgaaagcaggagcggcgtattaaccggtccccaaccaccaccaccgattgcgtctaaaaatcctgccacaaaaccttgtggaattactttaaaactactcaaatttcccacatgatgatgatgttcatgtgcacgtttaaatagaaattgatacaaaatataaaatcccatacttaacaagaataaagcaatgaatggtttaatataatcaccatgaataaatgtcaaaacacctgcaccgataaaggcgcttattgacccaggtatagctaacttcaacattgttggtttatgaacattatcaaatctccaatgtgatgtcccagatgcagctgttgttgcaatttcagaaaaatgaacggttgctgacactactgccggtgctataccgtaagttaataatattgatgacgatgaagcgccaaatcccatgcctaatgacccatcaacaagttgtgctaaaaatcccgcaattgcgaaaattaatactttgcgcatatatcatatgcccccattcttcatttgacttgtgattttagccatcggatgaaatcttgttgcttcttctcatctaaatatttgtctgacaaaatttgctcgagtaacgcttgtttatcagatggctcaattttaagtgatttaatatattgtctactttcatataaaaactgaatatacattgaatagtcttcattgtatgtatcttttaaatctttaataattcgttgacctaatttaggacttgcaccatcagttgatacacttattgttaatttatctctttttaagaaattagggaacgttacattacctaggtctgcttgtcctgcatgattaaataatacgttcttagacaaagctgcccccacatcgttgttaacatcagattgattagtagccgcgatgaccacatcagcattctcaacatcttgtggttcgaagtgtttcttttcataagtgatttgcttcgtttctagatatttttgtaatgtatcggtaattgttggacttacaacatgaatatgttttgtataagctaataaagttttagcacgacgtgttgccactttacctccacctacaatgacgactttcttgttacttaaatcaatcattaagggcatattcatgatgatttcctcctatacactttaattaatactcattataaacgtgatttttactgtttttttaaatgtatgcgctaagttgatgacatttccgttaacgtttcattttgaacagttgcctgttctacaaaccaattaattttttctctcatcttaaccacttcgcctacaataatcattgctggattctgaatatgatgtgctcgttcttgaattgtatcgagtgtcccagtcactgtcatttgctgttttgacgttcccatatgcacgagagctactggtgtttctgacgaacgaccatattgtattaacaactcacaaatttcactgagtctcttaacccccatataaatacataaagtttcaggaccattggccaaatgttgccagtatttgcctttatccataccaggtttattcactgcagttacaaatgctacagaagaactataatcacgatgtgttactggaattccaggtataatttcaaagtggatattatgacatgctaattcctctgcttcttctccgccacgtccaaaaacaaatggatcgccaccctttaaacgtgtaactatgtgcccttttttggctaaggttaccatcattttatttgtttcttcctgcggtaaggagtgcctgtgaggatccttaccgcaatagaagaacttagtagaaggagaagcataattaagtatttctttatttacaagtcggtcataaaggatgacatcggcttctttaatggcttttaaaccttttaacgttattaattctggatcaccaggtccagctccaactaaatatactttccccatatgaaccactccccctctcgtttaactatgaaaatcgcgaccatcatgaactttggctatcacaccgtcacgaattacaaagtccccaaagtgttctccgtcaagacgctctttactataacgcaacaacaatggacgtagactttctaatatctcattttcgtcgatattctctttatatattttatttagacgttcgcctttaaaactaccacctaagtacatattatatttaccaggtgctttaccgataaaggctatttctgctagcgctggtctcgcacatccattgggacaacctgtcatacgaatcgttatttcttcctcttttaaaccagactcatctaataaatcttcaatttttgtaattagtgaaggaagatatctttcagattctgcca

SEQ ID NO: 3546 - DNA, 3073 bp, Artificial Sequence
  Description of Artificial Sequence: synthetic nucleic acid sequence
ctatcgatgatacattaatacaacaactagaattgaaaaccacacaattagataatattttatagtagaaagaaggattaaaaatgcctcaaagagtattgctcgttgatggaatggctttattatttagacatttttatgcaacaagcttacacaatcaatttatgtacaattctaaaggaattcctacaaacggcattcaaggttttgtaagacatatttttagcgctatcaaagaaatcgaacccactcacgtagcagtttgttgggatatggggcaagaaacattcagaaatgaaatgtatgatggttacaaacaaaatcgcccagcaccacctgatgaacttatacctcaatttgattatgttaaagaaatatcgcatcagtttggttttgtaaatgttggtaagcgtaattatgaagctgatgatattattggtagtttagcggaaacatattcacaagaacatgaagtttatatcattaccggagaccgagacttactccaatgcattaatcataatgtagaagtttggcttattaaaaaaggttttacaatatatcaacgttacacgcttgatcgttttattgatgaatatggactaaatcctcaacaattaatagatgtcaaagcttttatgggtgatactgcagatggctattctggtgtaaaagggataggtgaaaaaacagcaattaaattaattcaaaatcatggaactgtcgaaaatgtagtgaacaatttatcatcattaactcccgctcaacagaaaaaaataacaaataatttaaatcatctgcatttatcaaaatcactcgcagaaatatataccaaagttccaattgaaacagacaaactttttaaagagatgacatatgctcatacactaaatgagattttatccatttgtaatgaacatgaactatacgtttcaagtaaatatattgcaactcacctctaaccataaaccaatgaacatttcatttagatattgttcattggtttttttaatatcaattagcatctccactaaaaatataaatattttattaaaacttcgtgaattaatttcacaaagttatcttaaagtgatattattgtttagaacaaataaattgttgttcaaaatgctattgtgataaatgaagagcaaaccgaaattaaacggtcggaacatctgctcttttttattgagcaaatgtatgagttattcattgtcaaaattatcaacattaaaaacgtataattttcaaatcacatcaaacaacaaagaaaaaacatcaagaataggagtggcaatagctttgaataatcgtgataaattacaaaaatttagtattcgaaaatacgcaattggaacattttctactgtgattgcaacacttgtgttcatgggtatcaatacaaaccatgcaagtgccgacgagttgaatcaaaatcaaaagttaattaaacaattaaatcaaacagatgatgatgattcgaatacgcatagtcaagaaatcgaaaataacaaacaaaattctagtgggcagactgaatcattacgttcatcaactagtcaaaatcaagcaaatgcacgactgtcggatcaattcaaagacactaatgaaacatcgcaacaattacctacaaatgtttcggatgatagtatcaatcaatcgcatagtgaagcaaatatgaataacgaaccattgaaagttgataatagtactatgcaagcacatagtaaaatagtaagcgatagcgatgggaatgcttctgaaaataaacatcataaactaacagaaaatgtacttgcagaaagccgagcaagtaaaaatgacaaagagaaagagaatctacaagagaaagataaatcgcagcaagtacatccaccattagataaaaatgcattacaagctttttttgacgcatcatatcacaattacagaatgattgatagagatcgtgcggatgcaacagaatatcaaaaagtcaaatctacttttgactacgtcaatgacttactaggtaataatcaaaatattccttcagaacagcttgtttcggcatatcaacaattagagaaagcattagaacttgcacgtacgttaccacaacgatctactacagaaaaacgtggtagaagaagtacgagaagtgttgttgagaatcgttcatcaagaagcgattacttagatgctagaactgaatattatgtttcaaaagacgatgatgattctggtttccctcctggtactttcttccatgcttcaaatagaagatggccttataatttaccaagatctaggaacatcttacgtgcttctgatgtacaaggtaatgcttatatcactacaaaacgacttaaagatggatatcaatgggatattttatttaatagtaatcataaagggcatgaatatatgtactattggtttggacttccaagtgatcaaacaccaactggtccagtaactttcactattatcaaccgtgatggttcaagtacatctactggtggcgttggatttggatcaggtgcaccactacctcaattttggagatcagcaggtgctattaattctagcgtagcgaatgattttaaacatggctccgctacaaattatgcattttatgatggtgttaataatttttctgactttgctagagggggagaattatacttcgacagagaaggcgctacacaaactaataaatattatggcgatgaaaacttcgcattgctaaatagtgagaaaccagatcaaataagaggattagatacaatatatagttttaaaggtagtggtgatgtaagttatcgtatttcatttaaaactcaaggagctccaactgcaagattgtattatgctgctggcgcgcgttctggtgaatataaacaagcaacgaactataaccaactctatgtcgaaccttataagaattatcgaaatcgagtacagtcaaatgtccaagttaaaaatcgtacacttcatttaaaaagaacaatcagacaattcgatcctacattacagagaactactgatgttcctattttggatagtgacggttccggaagtattgatt

(The sequence listing continues in the following parts.)
